United States Patent Application Publication US 2024/0301345 A1 - sequence listing, part 8

SEQ ID NO: 1094 - DNA, 107833 bp, Unknown
  R13_10m  MAG No. k141_12464
cttcctccaacgggagcgattgttaagcgccgaaatcggtatcgccttgggcctcggcctgggcgatggcggtttcggcgttttttgctgtttgctcaatgacctggttgtatccggtcaaggccgcgaacggcatgaactgggcggcccgctggcgacgagacatatgcggatgcttgcgtgattggtggtgtggcaggttgatgatgtcgtcgtatgcatgggtttcttgcagggtcatgcgcgatggcctccgatctgacggttgcgagcctgaccggtggcaccgtcttccatatccatggctttgatgacggcgttgcggccgaatttacgtttcacatccagcaacgcacgctggatatcacgctctcgagccaacgtctgtgcggcggcatcgtccccacaagccggcatacgcccgcttccgtcgccaccggattccgtgctatcacagtcatatcgcatatcgccatcatcaccgaacaaatcaagctgctcatagcgtttgcccgccgccagttctttgggcgtggccacatcatcggcaacaactgtgagtcgacgcaccagcaaccgcgcatccacaatacgctcgtacagcatggtcatcgcctcgcgaatacgtgcggcagacgacgtaaaatcgcccaatccaatcgaccccacggccgacttaggcacccgacgaccgaaacggtcaacggtcaccggcccttgataggtctttgccgcgcgttcggcggcacgcctcatcgcccggtctgcgcatgaatcaagcttcgaagcatcgagactgccaatgtcatagccgaccgccagtgtcagccgattcgtcatcacccccttatcgaccagatcgagggcgagcgcatcggccatctccttggcgatcagccgagccgtatgccaatcggcgggcccggtgagcacctgcccgctgctgatgctgtgcgcacctggctcataggattggatgtccgcgatctcgcacggctcccagccccacgcatggtcgatgagcagttcggcattgacaccgaacatgtgatacagcaggtcttcgttgtagtaatccgaagcacgacccaccgagcatcgggcgatatcgcccatggtcatcagaccggcgtgctcgagtttcctggcatagccgcgcccaacccgccaaaaatcggtgagcggacgatggctccagagcagccgacgatatgacatttcattcagttcggccacgcgcacgccgtccttgtcggcgggcatgtgcttggcgacgatatccatggcgactttggccagatacatgttggagccgatgccggcagtggcggtgatgccggtttcatcgagaatttcgcgcacgatggttcgcgccatggcatgcggccccatacccagcgagcgcagatatggcgtgacgtcgatgaacacctcgtcaatcgagtagacatggatgtgctcgggtgcggcgtatttgaggtagatgccatatacctgcccgctgacctccaaatagtgcgccatgcgcggcttggcgatgaccatcgaggctttgagtctcggcgagcgttccaggtcgcacgcatcgcaggactccccgattaatcggccgccgggagcatggaccgcgcgctcgatgttgactccattcaggcgctgttttacctcgaatagccgcgcacgaccgggaatgccatagttcttcagcgagggtgagaccgccaaacatattgtcttatcggtgcgggtttcatcggccaccaccagatgcgtggtcaatgggtcgagtccgcgcgccgcgcactccaccgaggcatagaaggacttgagatcaatggcaatataggtatgctcgcgttgcgtcgataccgttccgctgcccatcgccatcacctccttaccaccgccggcccgaccagcatatcaatacggtcgaacatttgttcgatacaacatgtctgttcgaagctgccgaagtcgacgcacgcaacgcgcccaagcacgctcttcacccacaccacacgcacagcggcagagcagcggcagagcagcggcatgcatgcgtaccatgggaatatgaagaaaagcattacggcagacagcgattttgcggcgtgggcggcagcccgatcccagaaaacgaatcgatcactggcaggagcccgcctcgcgattccggagccgcagaagcgtgccgaaatcaagtctcaggcccagcaatggggcatgaccgtcgaagatgccacgatgaccgacgggcacagcgaggaattcctctgtgacggcacacaaagcattgattccattgccgacatgcgcacggcaagtgggctggaggcaatggagtacgcggaacagcacatgccggtattacgcgacaccatggatgacctcaccgcccgcgtcgatttctcaggcattcgtattgccgtctgcctgatactggagccaaaaaccgcgattctgctgcgcaagcttaaggccaccggcgcaatcgtcggcgtatattgcggcccggattccacggatccccgagtggcggaacagctgcgccgagaaggaatcacggtcgaatccagccgagcctggaccgcggaacaggcgcacgaggcagccctgcgcctgctggacaagatacagccgaacatcatcatcgacgatggtgccagcttcgcccgcctcgcctcgctcgaacgccccgagctcacggcgaatctcattggagtggccgaggaaacgaccagtggcgtacgcgcgttccagcagatgcaggaagcgggagcgctcacctacccggtcgtagccgttaacgacagtgtgctgaaaaccggattcgacaacgcccacggcactggggagacatgcgtgaccaccatgcagcgcattctcggcgagcatgcattcgacggcaagaacgtcaccgtcatcggctacggcccggtcggccaaggcttcgcacggcgtattcgcgcgcttggagccgaagtcaccatctgcgatatcgatccagtggcttcactcaaagcggtgttcgacggcttcgccgcacaagacattgacgaggcactcccttgcgcggatatggtggtgtccgccactggcgtgagacatacagtcacacttgagcacatgcgcgcaatgcacgagggcgcggcgctcgcagtgatcggcggcatcgccaacgaaatcgccttggacgaggtaagcgacttcaccccacaggtcaacagggacaccgtgcaactcaatgttcccgacggaccaacgctcacgctaatcgccgacggcgatggcgtgaactacacggtgggaggcggcaatccaatcgagatcatggatctgagcttcgccgtacaggccagcgccgtcgcatatcttctggaacatcgaggcacactggatcacacgcttatcagacttgacgcagcgaccgaccagcgcatcgccgccagcgcgctcgaggcgcgcggataccgagccagccatgccgtggaggacaacggctacgattggcgactgaccagattcgcggaaaacgaccgagagaacgccgaccgatagccatagacacggcaccgaacacaacgcagcgaggagaatatgaccgacaacacctggccgaccgtcgataccgagcttatcgatgatgtgacactgtattccgccaaactcatcatccccgtgacgggccccgtcatcatcgatggcgcagttgccatacatggcgaccgcgtggttcatgtaggtaaacgccgctgggtgctggaggcgctgaagcaggaaatgacgtctcacggcaccatccgtgaacggcattgggatggggtgctcacccccggattggtcaacgcgcacactcatctgcagtacagcggcatggtgcaggtcgggcaaggcacctacgatcggttccgcgcctgggaactggcattcaacgaggtgtacgccgaggcgcagaagacccagccatggaagcagtgggccgaggacggtgctcgccagatggtcgaatcgggaacgacggccgccgcagacatcgtcaccgatttggacgccgccggcgcgctggcttcgcagggcatgcacggcatcgcttattgggaggtaatgggctggcacaacgacgaatggatggaaaagggtcgcaccgagctcatccggcagttgcgccggatgaacgaggagcagctgccgaacctcggcatcagcccgcatgctccgtatacgctggagtccgaaccgttcgttgatcttccagacattgctcgtcagctgaacatgcgactgcatatccatctggcggagaccccgctcgaggccggcacttatccgccggtgctcaccacttattcggcgtccgactggcgtgaccacgattgggaaagctaccggcagctcaaggacgtgggcaaaggtgcctccgccatccagttcgtcgatcagcttggctcgcttggcccggatgtgcacattgcacacggcgtgtgggccaatggcgaggatcggcgtattctacgtcagcgcggcgtgggcgtggccttgtgcccccgatcgaatcgcattaccaacaccggcaaagatgcaccggtgcgcgaatacctcgaggaaggcaatctggtaagcgtgggcaccgattcgctctccagcacgccgaccctcgatctgctcgatgacgtgtcgatgctttacgacctggcccgcgaacaaggctatgccagcgacgatctgacacatcgcctgattcgtatgatgacgctgggcggtgccgcctccatgggcatgcacgtgggccgaaaccgcattggacagatcaacgcgggcgcattggctgatttcgcgttcttcgacatccccgtcgacacatcatctccggccggcatcgaagaaacgctggaaacactggtgaagcacggcgcaggcacgaaccgagccacggtgatatccgggcgcgaagcctacaacaacgcctggtgacaccgctgacctgacctgacctgatatcaagaagccaaaaaccagcaaacccgtcaagaacaggagatctcattatgagcgtcgctttgcgagacatgagtccatacgcccggtccatagtggaacgccttggactggaagcccaccccgaaggcggctggtacacgcgtgactggcaatccccgcacacggatgaggcctcaagccgaccgctatcgtcactgatttacttcctgctgcccgagggagatgccagcgcctggcataaggtcgatgcggatgaggtctggctgtggcatggcccggcatcggtcaagctggaactcggcggcagcggcgagactccggaatccgacgaatccaagcgaaccgtaatcaccctgggttccggcatcaccaccgatcaggccgacgtaaccgtatcgggacatgcggtcgtaccggctggcgtctggcagcgcacagtgccaggccagggcgatgcgctggtctcctgtgtggtcagtccgggattcgtattcgacggcttcacactcgaacagtgaacgccatttcgctctgcgccaatatgagatatccgttcgcttacgcgccagattgcgcggctctagccggccataagcaatggagataaccagcatccgagaatatcgctgttttgtagtaacccaatagccatacaattggcgcgcatgcatcaagcacggctttgaaccgtgtgcatgacgaacacttgaggagaggaagcccatgttcaataagcaacacatcgtccgtaccattgcggccaccgccagcatcctagctctgtcgttcaccgcagcctgcggttccggccagtccaccgcatccaattccgccgattcgaacgatatcacccagcagacgtacaagccgggcaagctgaccatcgccaccggacagccggcctacgagccgtgggttatgaacgacaagccggaaagcggtgagggctacgaggcggccgtcgcctacgcagtggccgacaagctcggtttcaagaagagcgacgtggtgtggacccgcaccgcattcgacaccgccatcgctcccggtgccaaggactgggatctcaacatccagcagttcggcatcaccgacgagcgcaagaaggccgttgacttctcgtccagctactacaacgacagccagtccgtcgtggtcaagaaagacagcaagttcgccaacgccaccaaggtatccgatctgaagaatgcgaccgtgggcgtcatggtcggcacccttgcctacgactacgccaaggcgaacatcaaggacgacatccagacgttcaatgatgatgccgcactggctcaggcacttgacgccggtcagatcgacgcactggtcaccagcaccgtggaatgcgtgtacatggtgcagtccgagcaggtcaaggacgccaaggtgctcggccgtctgcctgactccgaagacaagagcggcatgggcatcgtgctgccgaaggattccaagctgactgcagccgtgaccaaggcagtggatgacctgaacgccgacggcaccatcaagaagcttcaggacaagtggctggccgagtacaccaccgacctgaccgaactgaaaaagtaagtggagtaggctcacatcataaggtcacaacaccttggccgggcgctgcggaaattttcctgcgacacccggccattccggcattcaggaagcgagcgacattcatcacatgaccgcagcaccaaccgaaaccaggcagtacaatgcccctgacggacacgaggtaagtcaggtcgagctcagacgacgccaatatcgtgttcatcagcaaattcaatcgacgattaccagtctgatcagcaccattgtgttcgttgtggtcatcgtcatcggcctgaagctctcccccggctggccacgagtcaaggagaccttcttctccggcgaatacttcgtcaaatcgtttccccatgtgcttgacggcctatggctcaacatccgcgttctgctcgtcgcagtggtcggcgtggcgattctaagcacgctgatcgcattggtgcgcaccagccgctcccctattctgttcccgctgcgtatcctggcattgatctacacgactgtgatgcgcggcgtgcctattatcgtcgtgctgtatctaatcggtttcggcattcccggcctaggcttgttcggccgtatcgatccctcggtactcggcaccattgcagtggtaatgggatacagcgcctacgtctccgaggtgctgcgtgccggttttaacgacgtacatccttctcagcgagcctcggcccgctcgttgggcctgacctccggccagacgacccgactgatcgtcattcctcaggcattgcgcaaagtcgcgcccgcactgatgaatgacttcatctccatgcaaaaggacgtcggcctgatttccgtgctgggtgcggtggatgccgtgcgcgccgcacagatcgacgtggccagcacctacaacttcacgccgtatgtggtcgccagcctgctgttcatcctgatgagcgtgccgttcatcctgctgaacgactggtacacggaacgtctgcgtaaacgcgaactcagcggaggaacggtatgagcgaaataaccaatatcaacaccgaggcgagtgactcccccgtgagcaacaagacggtgctgcgtcttgatgacgtgcgcaaatcctttggaaacacgcaggtgctgcgtggcatttcctttgacattcaccaacatgaggtggtggctttgctggggccttccggttcgggcaaatccacattgatgaaatgcgtcaacctgcttgagcaggtcgatgacggccggatttggctgggcaataccgatatcaccgacccgcgtgccgatcaggacaagattcgcgcacgtatcggcgtggtgttccagcagttcaacctcttcccccacatgtcggtgctcaggaacgtgacccttgccgcaatcaaggttcaccactggagcaaggatcgcgccgaaacccgcgctatggaactgcttgaacgcatcggcatgcgcgataaagccagcgcctaccctgatcagctctctggcggccagcagcagcgcgtggcgattgcgcgcgcactgatgaccgacccggaactgctgctgcttgacgagatcacatctgctcttgatccgatgctggtcggcgaagtgctcaacatggttgccgagttaaaggcccaaggcaccacaatcctcatggccacgcacgaaatgagcttcgcccacgacgcggccgaccgcatcgtactgctccgtcacggcgtcatcgccgagaacggcacacccgccgaggtgatggacgagtcgcaggatcccgagaccatcgagttcttcagccatttcaggcactgagacgaagccgaagaacaagcaccggattcatacgacgaaaggccaaaatcctaagccactattcatagtcaactgatctggtgcttaaaccgcgtccgcgaaccccaacaagttccaccaccccacaacacgcgatgtagccgccgattggtagggttggcagatagttaatcccctgtttgaaaaaggagctttggcttgtcggctgaactcgaagacattcatgaggaatgtggcatcttcggcgtatggggccaccccgacgcctcacgactcacctattttggcctgcacgcgctgcagcatcgcggtcaggaaggtgccggcatcgtctccaacgataacggtcatctcatcggtcatcgcggactcggcctgctcacccaggtgttcggcgatgagcgcgaaatcgaacgactgaagggcaattgcgccatcggccacgtgcgttacgcaacggccggctcgggcaccacggacaacatccagccgttcatcttccgcttccatgacggcgacgtggctctgtgccataacggcaacctgacgaactgcccgtcactgcgccgcaagcttgaagacgaaggcgccatcttccattcgaactccgacaccgaagtgctgatgcacttgattcgccgttcgatgcagcgcacctttatggacaagctcaaggaagcgctcaacacggtgcatggcggtttcgcctacctgctgatgaccgaagacgccatgatcggcgcactcgacccgaacggcttccgcccgctctccctcggcaagatgaagaacggcgcctacgtgctcgcctccgaaacctgcgcactggatgtcgtcggcgccgagctggtgcgcaacattcgtccgggcgaaatcgtggtggtcaacgatcacggctacaagatcgtgcagtacaccaacaacacgcagctggccatctgctcgatggaatacatctacttcgcacgcccggattccgatatctatggcgtcaacgtgcactccgcccgcaagcgcatgggcgcacgtctcgccgccgaatccccggtggaggccgatatggttatcggcgtgccgaactcctcattgtccgccgcatccggctatgcggaagcagcaggtctgcccaacgaaatgggcctaatcaaaaaccagtatgtggcccgcaccttcattcagcccacgcaggaactgcgcgagcagggtgtgcgtatgaagctctctgctgtgcgcagcgtggttaaaggcaagcgcgttatcgttatcgatgattccatcgtgcgcggcaccacgtccaagcgcatcgtgcagctgctcaaggaagccggcgccgctgaagtgcatatgcgcatcagctccccgccgctcaagtacccgtgcttctatggcattgatatctccaccaccaaggaactcatcgcagccaagatgagcgtggaggaaatccgcgaatacatcggcgcggattccttggcctacctttcgctcgacggtctggtcgaatccatcggactgaacgccgacgccccatacggtggcctgtgcgtcgcctacttcaacggcgactaccccactgcgctcgacgactacgaggccgacttcctgaagtccctcacgcccgaggaccgtgtgcgtctgcctgaattcgcgctgtacaagagcaagtacatcggcaacgagtacaacaccgtgcagccggacgtgcagtaggctcggccggtccttcgactacacctcagtcattggtctttacgactacccctcagtcagcttcgctgacagctcccctgacaaggggagcttagtacaaacgaaaatccgctttttgcaggtggctccccggcaagggagcttgaaaatagaacagaaaggccccaccaaatgccaaaagcatatgagaacgccggcgtgagcgtcgaagccgggtacgaagtcgtcaagcgcatcaagtcgcacgtggcccgcacgaaccgtcccggcgtggtcggcggcatcggtggcttcggcggcctgttcgacctagcctccctgggctacaaggagccggtcctcatctccggcaccgacggcgtaggcaccaagctcatggtcgccaagctggccaacaagcacgacaccatcggcatcgactgcgtggccatgtgcgtcaacgacatcgccgcccagggtgccgagccgctgttcttccttgactacatcgcttgcggcaagaacgacccggccctgcttgagcaggtcgtggccggtgtggccgacggctgcgtgcaggccggttccgcactggtcggcggtgagaccgctgaaatgccgggcatgtacgacgaggacgagtacgatctggccggtttctcggtcggcgttgccgaaaagtccgccattgtggacggttccaccatcactgagggcgacgtgcttatcggtctgccttccaccggcgtgcactccaacggcttctccctggtgcgcaaggccctgttcgagcaggctggctataccgtggacactgagctcgccgagctgggcggcgcaaagctcggcgacgtgctgctcacccccaccaagatctacgtcaaggccctctccccgctgttcaaggcgggcgtggtcaagggcgtggcccacatcaccggtggtggcttcatcgagaacatcccgcgcatgattccggacggtctggccgccgagatcgagcttggcacctggcctgtgctcccgatcttcgacgtgcttgagaaggccggcaacatcgatcacaaggagatgtacaacatcttcaacatgggtatcggcatggtgctggccatcgaccccgcccgcaaggacgaggcgctgaagctgctcgccgacaacaacgaacccgcctatgtgctcggccagatcaccaccgacaccaccgacacgcaaatcatactgaagtagctccagataccggctcccctcaaagaggggagccaaagactttaggaaggaaaaacatgggtcagaaagtattggtcatcggctccggtgcgcgtgagcataccattgcctacacgctgctcaaggcaccgagcattgacgaagtcaccgtggctcccggcaacccgggcatgctcaaggacggcatccacaccacgcagctgagccagtcgaaccacgccgcacttatcgaattcgtgaagaacaatggctatgactgggtgttcgtgggcccggaagtcccgctgatcgaaggcatcgtggacgatttcgccgccgccggcatcaaggcgttcggcccgtccaaggccgccgcccagatcgagggttccaaggacttcgccaagcagctcatggaccgtcacaacattccgaccgccaaatataagacgttcggagacttggacatggctcaggcttacgtacacgagcatggcgcgccgatcgtcatcaaggccgatggtctggccgccggcaagggcgtgaccgtggccatggacgagcacaccgcccagcgtgcgcttgaagacatcttcatcgatcatcgcttcggctccgccggtgccaaggtcgttatcgaggacttccttgacggccaggaattctccctgatgagcttcgtcaacggcaccgatttctggccgatgccgatctcccaggatcacaagcgcgcccacgatggcgacgaaggcccgaacaccggtggcatgggtgcctacagcccggtgccgcagattccgcagtccgtggtcgacgaggccatcgagaaaatcgtgcgccccaccgtcgaaggcatggccgaggaaggcacgccgttcaccggcatcctgtacgccggcctgatcgccaccgccgacggaccgaaggtcatcgaattcaacgctcgtttcggcgacccggaaaccgaagtcgtgctcccgaagctcacctccgacctcggtgccggcatctccgccattctcgacggcgaaatccccgaattcatctgggatgagtccaacgccaccctcggcgtggtcatcgcctccaacggctacccggagaacgtcatcaagggtgcccgtgtgcccgagatcgaggtcgacgaggattcgcatgtctactatgccggcgtcgcctccgacgacaagggtggtctgattgccaactccggccgtgtcctgctcgtcgaaacctccgccccggacatcaagtccgctcaggacaaggtctacgcgatcatcgacaagctcgagctgcgcggactgttctaccgccacgacatcggcttcaaagccctgaagtaacagaagcggcgcatctgccgcatatttttggcccggtggccatgtcaatcgattgacgtggctaccgggccagatttttctgtcccggtagctgatttcggctctttttcgcaaaccaggacagttgaacacctcgaatataggaatatttggaattcccttccatgcaaaaccgcactattccgccattttcgtaatacgcggacgatactttcggcgtcagttttgtcccggtaagcagaaaatgactcgaaatcaaataccaggacagaaaaatctggcccggtacacgaatcaatcgattgacgtggctgccgggacagcgaacgtcactatgacaacgccatcacccaatatcagcgagcgatatcacgctagctgaatttggcgatgatgttgaacagtttggccttggcttcattgaagggcgggtacacgaggcgcagagtgtcggggaactgcggcttggtaaccacggttttgacgtggctgaaggtgaggaagcctgctttaccgtggtaggcgtcgatgccggacgcgcccacgccaccgaacggcagtcggctggacagcaggtgacccaacggcaacgaatatcccaaagctccggagctggtctgacgttcgaaagtcagccgaacctcgtgatcgcgcgagaacacatatgcagccaacggccgggatcgcttgttgatgaatcggattgcggactcggcatcctcaaccaccaggatcggcagaatcgggccgaagatctcctccttcattaccggcgcatccggtgacgtgccgtatagcacggtaggcgcgatatatcgggcggcgcgatcgaccttgcctccgcaaacgattcgcccggccggatcgaatacgccgggcaccttgtgaatctcgctcggctcaacagcggccgaggcagtcgcatcactatcagcggctgccgtattcgaaccggccgccggcttcgccgcattgttcgcgctaccggtgccaccaccggctgtctcccccgcgcttccgcgtccggcagccgcgacattgaagcgccgcccgaccatatccatggccgcgcctaccgccgatgccacctgtaccagcggcgagctcggctcctcagacggcacggtgccgaccggcaatagcttgcacaatcgttcaaaatgacgatcgttgataatacgaccaaaatcaggcgaggccttcggatcttcgccatagaattcggtgatggctacggcgatgcgctcggccagagcctcggccacatccggcgtggcgagcacatagtcgggtgccacgcaggtctgtccggcattggtgaacttgccccatgcgatacgtcgtgcggccacattgatatccaccgtacggtccacgaagcacggtgatttgccgccgagttccaacgtgaccggtgtcaggtgctcggccgccgcacgcatgacgattttgccgacgtgcccgccgccggtgtagaagatatggttgaacggacatttcagcagttcgccggtttccttgggcccgcctccgaccacgcacacggactcggggtcaagatattgcggcacgagttcggcgatgaggcgcgaggtgttgggcgaaagctcggagggcttcaggcagatggcgttgcctgcggcgagcgcgtcggccattggctccagagccaacagcaccgggtaattccatggcgagatgatgagtaccacgcccttgggctcggcgatcgtccagccggcggcgggttgcagcatccaatgcatcgccttgggatggcgcgcggcccacagtccgagccggttgcggacgaactgcgcctcgccggccaccagattcagctccatcagtatggtttccgccgcgggtttgcccaaatcggccatggccgcagccacgaaagcatcacgattgtccgctaccagacggcatagcgcatccaattgcgcccgtcgccaagccaatggccgcgtacacccggattcgtaggcgtgacgcaactgagcgaaatccgcattgaccatggcacatccttcccgcaggatgcccgggtcggttttccgggcatcgactgtacctatcgtaccgtcatgacgatggcatgagggcgtttgtgctgcaggcaataccagacgtttcggctggtattcgccaaatagcttgggctcggccgaagtaggtggtgcaggtattgtcggcgagttcatcgacggtgatgggattggcgctggccacgccgagcagttcggcattggcaggcaggtcgtgttgtgcggccacagagtccacttgtacctccacatccacagcttcggcagaaggtccgacggcgatatgcccgcctgcatcaaccacaatgcggcggtcatcggtgacatgcacgatggcgtcgcggccctcatagcccgcccatgaccagctggccacgccgtcatgtcctcgttcgatgaatcgcgaggtgcggcccgcgagggtcgcgcgactcgtgaatcatcgcatcgtgcgggagcgtgactggctgccgcgctgccgtatcgcggtccttgccaattgaacggaaccgccagccatgattcacatcgatgcgcttcatggctttattgtaaggcgggagtgattggtctgtgggatctctccctcagtctcacttcgttcgacagctccctcatcagagggagctcacagcactatggcaacggtacagcaattttggacgggcttcgcccgcgttttgctggctcgcctgtcggctcgcacgttgcctacagaccgaaaatcctccggattctccgtcgcggcacagccgctcccctcacctacggatagcccactgagctatccgctttacggttcggccgggctgtctgctttacggcaacatcataaaatctgtgtctttgaggtagtttttgccggcggtgatgtcgtattggatgagcttgtagtcggcaagcaactgcttggtttccttgtcgaagtcatcggtggacatcgggttgccgttttggtcgagatagatgttctggccttcgggaatacgatcccagccttggaccttgttgaccacaggcggttccatagcggcaatcttggaatgcatttcggtcaggaacgccagatacgggctgaccttggcgttcatgtgatcggcggcctgtgccacgaagaagttcggcgaagagtaggctgcatcgcttgccttattgccttgggagctggaagccttattcgaccagatgaagtaatcggtcaggtgcagggccaaggagttgttgccatcctcgctggcggacgagtagatgcccggcaagtgatcgccgtagaacactacggtgacgggcttatccagcgcatccagttcgttcaggaactcctgagtggcctgatcggtaatctccacacccttttgataggtctcaatcgactgctgttcatcatcacccagcggcgtacccgtggtggattcagcggtgtagtcgttgttctcataccactcgtggtagggcatgtggttctgcatggtgatgatctgaatgaacttgttcgtcttgccggacctgatgccttccagcgcagaatcataggaagacttatcagagacgtacggcgactcgtcaatcttgtcctgatacttgatcacgtccggaccggtcagcgtgtagaagtgcgagaacccgaacttcttgtagttcgtagcgcgcgagtacatgctggactcgtacggatggtagccgagcgagttggcgggcgcaccccacatctggttgatggtgggggtccaatgctggctcgggaccagctgctggtacgggctggacagggaggaatcgaaattggccatgctcagaccggaaagtcccatgtattcgaggttggccgtaccgccgccgtagccggaggagagcatcaggccggaggtggtgcccgccttgatcttgcggatgttgggcatcgaatccttattggtcttcagtcccggcacgcggctcgggtcggagaaggattcggacagcacgtacaccactgtcgaatcagtgaggttgttggtgcgggagacgttgattgtctccgcttccttctggtagcgagcggcgaccttcttcatggtctcctcggagtagttgctcggcttgtccatgatcttcgggttgagctgacgggtaaaggccacgagcggaccgttgcgctgcgcgtcatacacggaatcccacatggatggcgtgtcccccaaggcgcgggagaacttgttggccagcgaatcggtggtgctcacatgaatgcagtacaacgcgaacaccagaatcggcagcagcagcagaatcagacgggaggtgaggttcaggctcaggttgtccgtacggatcatgcgacctttgcgcccgtcgaagtggcgcagcaccagaatcagggcgagcagcgcggcgaacgcgccaagtgccacgaggatggtcacgtgcgcgccggccggaatgaaggtgagcatattgccggtgttcgagccaaggaagccgaggtcggcgggcagaatggcctcgtaacggatctcgaccttgaaatgttcgatggcggccacgatgattccgaccgcaagaatcacgatgcttgccgtccagaatctgttgaacagcatcagcaacatgaggtacagcaacgcgacaagtatcacgttgagtacgaatacgaaattgccgtcggtccacatcttgctcacgaagccgaatccgacggtcggactggacagttgcacacgggtggagctggacgaaacgcccacttcgagcgccgtcacaacaataatgtcgaagataacgaagagcacgccgtacgcccagccggggaagggcttgtgggggtgctggggcgtgacttcattggcttcggcctttttgacccaaagcttgaaatggggtttcactgtggtgatactactagtgttctcgctcattcgcctgtttccgtatgggacttttcaagggcatattgttgccgctgaaccttggaaaatccatagttccactttttttcttaccgtttcctaactattcaccctaacgcaaagggtgcctcgggacatccccgaagcaccctgatatataaggagccttccctgatagcgaagcgttctgttctcccctaggcaacgcctcgctatctgacttgattattccccttattgctgttgcggattgccggctaccgccgcattacttcacggcggcggcgaactggtcgaccagtgcgctcatccagtcgagcaggttggtgtactgcttcggcatctgctcggtgagctccacgatcggcacgttgacgtccttggcggcaccggtgatctggtcggtggtggagttggcttcctggctgttgaagacgagcatcttgatggagccgtccttcagggtgtcctggaagtccttgatgtcggccggggtcggctcgctctcgttggcggaagcctgggcgtagcccttcggggtggcgtcggtcatcttgaggtcgtcggccaagtgccaggccacggattcggtggcggcgtacggcaggttctcggtcttggcggaagtctccttgatcttggactcaagctggtcttccttggcgtgccattctttgttgagcttggcgtagtcgtccttgtgactcgggtcggccttctggtaggcggcggtgatggcgtcggcagcgttggaacgcaccttggcggagaaccagacgtgcgggttgtcgccttccttgatgccggcggtttcggcggcggtgaccagcgtggccttggtcgactgggcggccttggtggcccacgggtcgtaatcggcgccgttgaccacggccaccttggcagtgccgaacttggcaacatcctggctggtgggctcgtaatcgtgcgcctcaacgttggtcttggtcatgatgttggtgacttcgacgttgctgccgccgaggtcttcggccacggaaccccactggttgatggaggcgacgacctcgatcttgccggaagacgcggcgctgctggaatcggacttgttgccggcggcattgctggaaccgcaggcggccatcgagaacagggtcgccgcggcggccgcgatggcgagcgcgcgcttggcgttggacatgatggacatgattggattttcctctctaattcggctgtttggccaggcgatgctgctgttgctgcatcatcgcccgcccccccaacacgacagaataacatgtattgagaattattatcatttgcatttacatcggcgtgttgcacgcgcacacccgcgctgccggcggaaatcccgcaccccgacgatgacaacgcgggatcccgccgttttcggcagacgaaacggcagtatccccgcgtccgaacgatacccgcgcgggggttctgccgtttaaggcctcggaaacgacagaaatcccgcgccaccttcgttcggacgcgggggttctgccgtttgccgcacatgtcacaacggcatcgcggcacagaccgacgcctgcaccaggtcgacgagccccacggtgtgggcatcctcacagaccagcgcatcacgcaaggcgattgcacggatgatgtcgcggcaggcgcactccccgtctgtatccaaatggcgtgccaggcaaccggcaccaatgaccggcaattcgagcacgcacgaggcctcacggatcaggcgggagaccactacgccggtcgaacgctcgtcatagacgccgttctcctcgcccatgccgtacaggcacaaacggtcgtcgccaaagaatcgctcttcgaattcgtcaaggcctacggcattggccaccgcacccacgaacatcgactcaccccactcgttgagacggaaggaatcggccagatactgcgcgaccggcgtggcctcaaggcccacaggcagcgagaccagaaacgcgccggcccgcccttgcagcgatccgagcgtccgttcaaggtcatgtttgaccgtgcagctcatgcagcacccctcgagcccgaacgaatcggactcgccgaacaccaccccgcttgcctggggcttcgcgacgttgcgcacgatatcgagaccggattccacggcttcgttcgggcgcacgtcataagcaatcgagcatacggacgggaaggaatcgaccaacgagaacgccacggagtccaggctcaggcggtcggcgccggtgagcagcaccacgggcgtgcgcccctccgcgtttccctgtgattgcaatgccggatgaatcatgacagcctttcttatttgataatggttatcattatgatatagttgcaggcatgtccaaaacatgtcaaattctgggaacacgcgccggggtcggcaaccgcgtctcccactcgcacaggaaaacacgccgaaccttcgccccgaacctgcagtccaagcggtactgggtgccgtccttgcagcggcacgtcacgcttaccgtgagcgccaagggcatcaagaccatcgaccgcatcggcatcgaggcggcgatcgcccgcatccgccgcgatcagaacgtcaactgaaccggccacggcatcacccccatgctcgggcagtcagtaggcccgccactgtgccggcgcgtaaccgcgcaacaaaccgcgctaacgagctgcatcacccacatggcaccgcgacgtacgcgacatacgtgacataacagcgtgacacccacacatagaaagcaccactcatggcaagcaaatcctccgcaatccgcccggtcatcaccctgaagtccacggccggcaccggattcacctacaccaccaccaagaatcgtcgtaatacgccggaccgtcttgagctcaccaagttcgatccggtagtccgcaaacgggtgctcttccgagagacccgctaatccatctgttcgttcattggacaccagtcgcgaggcgaggaagaggcttaagcacccgccgaaatcgtttcctcgttggcattccggcggtttcctctatcaccatttcatgaactcatcttccgaaccttgcggcatgcgcccaatgaacgaatgcactcgtcccagctccggccggcgcgattcccgcgccccggagccttatcaaggagccggacatggccaaaaccagtaagatcaaccgacaattgcagcgcgaacgcatggtcgccaagtatgccgaacgccgcgccgaacacaagcgcgacagcgtcaaccctcatctgaccaccgaagaacgcgccgaggcgatgcgcaagctgcaggccctcccccgcgacgccagccccacccgtctgcgcaaccgcgattccatcgacggccgcccgcgcgcctacaaccgcaagttcggcctgtcacgtatcaatctgcgtgagaaggcacacaagggcaaactgcccggcgtggtgaaatccagctggtgatcgggccggcacaaccggccgtcaggccgtctcaggccatctcaattcaccggattccacccgcgcgtccgacgccattctcatccatatcaccacacaacaccacacaaccaaaggtccataaccatgcaagagggcatccaccccgaatacggccccgtggtcttctatgaccgctccgccgacaagtacttcctcaccaagtccacactggtggccaaggccgtaaacctgccgaccatcgactgggaggacggcaacacctacccgctcgtcaatgtggaggtgtccagctacagccacccgttctacaccggcaagaatgtggtgatcgacgccgccggtcaggtgcagaagttcaacgctcgttacgggcgcaagtgattcgccgcacattccgcaaagaccgtaagacaagaagaaaggaacggacatgaaggtcaaggcatcggtccgctcattggcccgcaaggatggctcctatgtcgtccgccggcgcggccatctgtatgtaatcaacaagaagaacccccactggaaggcgaggcaaggctgatggcactgcccaagtacaaggcgtcccgagcaaacacgcattcgcgccgagccaactggaaggccaaggtgcctcagctggccacggtcagaacgcctgaaggcgaagtggttcaggttccgcagaatctggccgcagccgtacgaaaggggtatatgaagccataaccaacatcgtggattccgcaatccatcaagtctcgtaacaacaactcgacggtccgctccacaggccggcggcgtacgttctttctcccatttccttccgtatgccgtcacctgccggggcgaaccgccgttttatgaggccaccgcatccgatctggccaagctcgccaaggcagacatcgtggtgctcaacggcgccggctacgacggctgggcggaaaaggcgcagcttgacaagaaacgccagaccatcgtgaacgtgggcggcctcatgggcgtcaccgccaccgacgagcacgagcattcccacgaccacgccgagggcgaagaaggccgccatcaccaccatggtgctacgaacccgcacctgtggttcagcccggaagccgtgctgaaggccgccgaagccatcaacgccgtctacgcggacaaggccggggccggttctgccaccgccgccaccgtgcaacgtcacttcaacgacaggaagaaaccctcaaggaaatggacaactggcccacgtattacccggcatccatgagcaaggaggaagtggccaccgagatgctggcccaccgattcgccatcggcccaggcaaccatgtgcaaagttccccgcatatcgatgtgtaccatcggtatgcggggaactcgcatattatctcgaccactatcatgcgtacggtgctaatatgacggcgatatggcaggtgatattcgcatgaaagaacctcgcacgcagcgcacggaacaggtgaacaccgcgcaacaggaccattcggcgaactatctgtttctgattatcggcacgccgctggtggcgttcctgattgcggcttccgcgatgctcgagtcgcgtgggtttccggttccgctggtgcgtatcggcaccggtgccgcggggcttatcctgcaggcgattccgttcatgctgctgggcgcgatgatgtcggccgtggtcagcacgttcgtcagcaccgattctctggcccgccacataccgaaatcgttggccggcggactggccgcggcattggcggccggcctgtgcctaccggtgtgcgattgcatggtggtgcccacgttcgcgaatctgatgcgcaaacgcctgccgctgccgtgtgcggtgacgtttctgtgcgcggtgccggtgatgaacccgatggcgatatggtccacatggttcgcattcaccgacaaaccatggatggtggcggcccgcatggggttgggcatggtagtggcgatagtcgcgggggtgtcgttcgcggtgtggccgctccgctcccctgcggtgcgtgagaggccgctgacgattgggcggtcgttgatttgcgaggattgtgcaggggcgacgggtgattcgcctgagagccacccccagtcggctttgccgacagcccccgccggcgggggcacggggcgcggattggagcggttcacgcatttcattcggcatacgcatgacgactttatgcggatgatgccgattctgctgttcggcacgatcatcgcctccatcatgcgcaccgcattgtcgtcgttgaccaacggttcaagcacgctcgatgacgccggtgccatcgtactgattctggcggcgatgggactggcgttcctgtgttcgctgtgctctacgtccgatgcggtgatcgccgccagcatgattggcgcgctgccggtctccgccatgcttgtcttcctggtcttcggcccgatgctcgacctcaagaacacgctgatgctggccacggaatgccggccacggttcatcatccggttcatcgcgaccgtggcggcggcctgcttcctcgccgcgattgccgcccatctggtgatgggagcgtagccatgaagcgcaaagtcacactccccgaccgcgtggaggcgctgtgtttcgcggcgctgggcgcggccatcgcctatgcggcggtgggcggatcatacaccacgctgaccacgccgcgctcgctgccgtatctcatcatcggtgcggtactgctgttcgtgctggcgaccgcagcatggctcggactgttccacaccacggagcgttcggttttacggttcctgatcgccttgattattccggcgctgctgatcgtcgtgccgttccagcccagcagcggcagcggcggcttcgacgagtacgccggcggccgcgctatcgccattccccgcagctcgcacaagcctgatggcgcctcgcagctgcacggactcgacacggcgaacaagaccctgaccatcagcgacgacgaattcggctcatggttcgagcagatcgaccataatccgcagcgttacgtcggttaccatgtgcaggtcaccgggtttgtgagcaagtcgcgtacgttcggcgcggacgagttcgagctgtcccgccagttcatgtcctgctgcattctcgacatgaccccattcgggttcatagccagctccggcaaggccggcaccccgcacaatcacgactgggtcaccgtcgacgccgtcatcaagcagggcgcctacggctccgccggccacgagcgccaaggcctgatactgcaggtccggtcggccagcaaagccgcagccgccccgaccggctacttctactggcagtaaatgacgcgtctcccgaaatggaaagcactgcgctgcgccatgactcgccccatatcggcagaaatcccgcgttacaacgaaaggtacgcgggggctctgcctttatagggctcaaaactggcagaaatcccgcgcaggcctcgttgaaacgcgggatttctgccagttgattcaaatcatgtgacaacatgccgggcatctgattttctttaataacgataatgaatatcatttgttaacagaaaggggcagaacgtcatgagcatcgagcaaaccgcgaccactcggcgcgtgacgcgaccccgactcctcatcacccaggtcctggcggaactatcccgattcgccacggcccaggaaatcaccgacatcctgcgcgagcgcggcacgcgcatcggcacggccaccgcctaccgcaatgtgcagatgatggcctcccaaggcgagctcgacgtaatccacgtcaacggcgaggccctctaccgcgagtgctcggaccagcatcaccaccatcacatcgtatgccacgaatgcgggcggaccatcgaaatcgagattcccggacttgagcagtggatcgacaaagccaccaagcagttgaagtaccagaccatcgcccacgaactggagattttcgacctgtgccccaagtgtgcggcgaagcatgccatcgaaccgcctctcagcgtcggcacctcaccaaaggatggaccactgacgacgccagacgatactggccgtcggcgctcgaacaaataatggcgcagtcccgacgctactggccttcagcatcggtgcccttccaatccttggcgcaatagcgacgatataagctccactcgcatcgttagattgccaacgcttggcgcagcaccgacgccagacacgctcatcgtcgtcgttccaccaatatttggattggtaccgccaccacctataccaggcgtcggcactcggccaacaatcggcccgttaccgacacaaaactgcatgaggtctcattgctcttaatagcagcaatgggcctgataatcactttcacccactttcgccgctgccgtctgccgccctacagtcgcagacgaacaaacgctgaaaggaacaacaatgactatcaagaccatcgatgagcatgcttacgagatcgttaccgaagagggcaccttcgccgtctgcaaggacacgctggccaagttcgacgccaccaagcacgagcacggcgtggccgcctgtggccgctgcggctgctgcttcaccggcgactgctgcgacgacaccggctgcgagcacaaccacaccgaagagtgcgggggcaaggcttgcctgcacgcttgccacgagaaccgcgaaggccacgagtgcgccttctgccaccttgccttcgacaccaacgagaagtgccacgatgagatcctggccgacctcaaggaactcaaggccgagctggctgtctgagttttaggtttccgatttctcatgcggattgactcctctcagggaggggagccagattccgacacgaaccaccgcgcttaccgtatgatgtctacgggcgcggtggttttgtttttctcgatgatggcgcagatttgctcgggcgcctccttgcagccgcgccggacccatagccagataatcgatgagacggcggagaccagaatttccagcgcatagtcgcgcggaatgccgccgtagctcagctcggcacccacacgggccgcctgcccaagcagcatctgcttcaacacatccttgacccggtcatacatctgcatatcgttgcccgaacgggacagtgcgtcgaagaacatactcacgcttgacatagcgcaacgcctcggcttcgtgttccagtcctacaatctggtggccaacctcacggccaaggagaacgtggagctcgcctccgaaatcatgaaagacgcgcaggaaccgacccaagcgcttatcgacgtggggcttcaggaccgtatcaacaacttccccgcgcagctttcgggcggcggacagcggcgcgcggccatcgcccgagcggtggccacgaacccgaagattctgctgtgcgacgagccgactggcgctctggactacaacaccggcaagcaggtgctgcagattctgcaggatcagagccgtaagaagggtgcgaccgtggtcattgtgacgcacaattccgccatcgcgccgattgccgaccgcgtgatccacatgcatgacgcgcgcgtcaaatcgatcgaagtgaacgagcacccgatggatatcaaggatctggagtggtaagcagtatgaccgatctcaatgatttcaccgaaacgaccaaccttacgcccgcgaccgactccgcagccgattccgccgcaaattcagcaaacgactcctataccgcgcccggcagaacgccccacgcgcacaaggccaagcgcaaccgccgacgcaacgggtcattccataagcgcatgctatggaaagacacccgcgtcaccatggccaaatccaagggtcgattcgcctccatcgtgagcctgatgacgcttggctcctttgcgctcgtaggcctgttcgtcaccggcccggacatgcaaataaccggcaccgacttctttaatcagaacaatctcgctgacataaccgtcatcagcgattatggcctgaccaaagctgacgaaaacattattcgcagcgcgccgaagtggccaaggcgatgaggggcggggccgtctccgagtccgcgccgatctactacgaggagatgtcgaaagtggccggcaaggagaacgacaaacagtcgattaccctgatcgccactgatgacgcctacaatttcggcgactacatcaccctgcgttcgcgcaccgggcacaagccgcaggtgctcaccgaccgtggtgcgatcatctccgaacgtatggcggggatgatggacgccaaggtaggcgacacgattaccgtcaccgattcgagcggtaccgagcgcaaggtgcgcgtggacggcatcaccgaaatgcatatcgggcatttcatgttcatgacttcgggtggctataagcacgtgttcggcgaacagtaccagtcgaacgcctatatggtgaggctcaagaaccatgagacctccaatgtggagtcgcgtagcgccaagctcataaagttggacggcgcgaagggcattgtgcagaacacgacttcgaagaaacaggtggccacaatcgtcgacttgccggatcagatcatggaagtgctgattctcgcggctgagctgctggccgtggtgatcctctacaatctgacgaatctcaacgtctccgaacgtatccgcgaactgccgaccatcaaggtgctcggcggactcggcgtgctggtctaccggcggttgaagacggtcgacatgctcggcgccctgaagtcggtggaatagcagcggaatagcaaatgggatcggctttgaagccgatcccattcaattattcgctcactgctttctgagccttctgcgctttctgctccttttggcaatcagggcatagtccgaagacctccagggtgtgggattcgacggtgaagccgtggccgtcggccactttgcgcagccaagcctcgctgggcggatcgatttccacggttttgccgcaccgcttgcacaccaagtggtggtgatgtccgtcgtcgccgcataggcggaacagctgctggccgtccaggcggatcgtgtcggcggcaccggcatcggccaaggcgttgagctggcggtacacggtggccaagccgattttcgagccttcgtcctccagcctgcggtgcaggtcctgagcggagatgaactcctcacagtcggccaaggcggcgcgaatcgcgtccttctgcttggtctggcgttcgatatgttcaaccatcgataaggtcacgccttctttttcaggtcgtcccagcagccggtggcctcaaggtcagcaaccgtggcatcagggttgtcggtgagcacggtgatgtggcccatcttgcggtcgtggcgcacttcggccttgccgtagtcgtgcacattccactccgggtgggtggcgatcagcgcgcgcgtcggctccacatgctggccgagtacgttgaccatcacggccggcgagagcagcttgggcttgggcatgggccagccggcgatgccgcggatgtgggcgtcgaactggtccatcgagcaggcctcgatggtgtagtggccggagttgtgcgggcgcggggcgagctcgttgacgatgacctgatcgtccttggtgatgaacagttcgatggccagcgtgccagccagttcgaagcccttggccaagcgaatcgccagttcatgcgcttcgcgagccacatgttcggacacttcggcgggggcgatggtcatgtgcaggatgttgttgcggtgctcgttacgcacgatggggaaggtgacgaagtccttgccgttgccggagaccaggatcgaagcctcgaatgcgaagtcgacgaagccttccaggatgctcggcgggaagccgccaccacggtcggaacgggagcggatcttctccaagtcggcgtcggaacgcagcacgagctgaccgtggccgtcgtagccgccggacacggtcttcagcacggccggataatgaatatcatccaatgcggcgtcaagctcatcgaagttgttgacagcgcgccacggtgcggtggcggtgccgtggtcgttgatgaactgcttctcgtgcacgcggtgctgggtcacgcgcagcaggtcggtgccctgcggggtggcggtgatgccgcgcacctcgtcgatggcatcggcgtccacgttctcgaactcgtaggtgagcacgtcggactgcacggccagatcatggatggcggttttgtcatcgtattcggcggtgatctggaagtcggccacctgaccggtcgggcagttcggcgtcgggtcaagcacgccgacgcggaagcccatgtagcgggcggacaaagccatcatgcggccgagctggccgccgccgatgatgccgatggtcgatcccggcatcagcatcgaaacacgaccgcctgtttcctcagacaagctgggcattggattcagccaccttttctttcagttcgttacggtaatcctcaagcttgtcggccagttcgggctcgaaggcggagagcatctgcacggcgagcaggccggcgttggtggcaccggagttgccgacggcggtggtggccaccggaatgccgccgggcatctgcacgatggacagcagcgaatcccagccggacagggcgtgggagcgcacgggcacgccgattacgggcagtgtggtctgcgcggcgatcatgcccggcaggtgggcggcaccgccggcaccggcgataatgaccttcaggccattggcgcgggcgttgtgcgcgaactcggccatgagctcgggcgtgcggtgcgcggagatgacctgcttgtggtaggcgacgccgaactggtcgagaatatcgcaggcgcgcttcatggtctcccagtcgctggccgatcccatgaccactgcgacttcgggcttggattcatttgccattatcatttactccctagttattgagaataaggcccactgtactcctgatagcggagttaagccacgcagcgaatcgttctcaatacataattctgtgaggcttacagctcaataacgatcttgccgaacatgtcgccggcgatcattctggcgaacgcctcgggggcggcgtccaacccgctgaccacggaatcgatcaccggatgcaggtcggcgtgctccacgaagcgcagcagccgggcgaaatcctcgcgcgaacccatggtgcagccctgcacgcgaatgtcctggaagaacagtcgcgtgagctccgcaccgggctggtcgccggtggtggcgccgcagatggcgatggtgccgccgggacgcaccgaccgcaccgaatggccccatgtggccgcccccacggactcgatcaccgcatcgaccttgcgcggcaaccgcgcaccggtctccagcgcggcgttcgcgccaagtttcagcgctttggcgcgcttgtccgcgtcacgcgaggtgacgaacacttccagaccggcggcatgggcgagctggatggccgcagtggacacgccgccgcccgcgccctggatgagcacggagtcgcccggcttgatgccggcggcctcgaacaacagcgagtaggcggtcagccagctggtgccgagtgcggccgcctcggccgtggtaaggtttgcgggcttggcgaacacgttggcggacggcacggaagtcttctcggccatcgtgccggggtatttctcggagaggatcgtacggcgctcgcccggggccacgcccgccccatcggtgccgacgaacgtgtacagcaccacttcgctgccggccttgagcccatgcttgccggggatgtcctcgtccagaatgcccacggcatcggtgcccaggatcatcggcgtctgttcggcggcgagacccacaccctgtagcgaccagacgtcgtgatggtttacggtcaccgcgcgcaccgaaacggtcgaccagaacgggcgggcctggggttcgggctgctcgcccaccgccaacgcggcaagcggatcgtcatggttgacggtggatgcgtatacggccttcattgcgcgctccttggtatcaaaaggaattaccgcattcattgtcccacatcgcgcagcgaacgaatcacccatttacggagatgttgggggcattgcttcgtcatgtggacctcggacaatgccgggcgttagcattcaacttcggaaagattagcgaagggagattcgagggtatgcgcaacgcgtcaggaaacggatttgattcaagcgattccttcgccgtctccggtgccgccgaggggaccgcgcgccttcacgacatccccccgagcattaccccttcccatggcgacgactcccatctgctgagccgcattgccagcccggccgatgtcaaggcccttgcccccgacgagctcgccgaactgtgccgcgagattcgcgccacgctgctggcatatggccaccaacacggcggtcatatcggttccaatctgggcatggtggaggccacggtggccctgcatcgcgtattcgattcgccgcgtgaccgtatcgtgttcgatgtatcccaccaaagctacgtgcataagatgcttacaggacgggccggcgcgtatatggatccgaaccgtttcggcgaggtgaccggcttcaccaaccccgacgaaagcgaacacgaccagttcgtgctcgggcacaccggcacttcgatctccttggcctgcggcctggcgaaaacccgcgacatggaggggccgggcagcggcatcggcaatgtggtcgccgtgatcggggacggttcgctcagttctggcgtggcgttcgaggggctgaacaacgcggccgagcaaggcggcaacctcatcatcgtgttcaacgacaacgagatgtcgatcgccggcgatttcggcggcatgtacggcccgctcgcccgtctgcgcgcatccggcggcaccgcccagccgaacctgttcaacgcgttcggcctggattaccggtacgtggaatccggcaacgacgtcgccgcgctggtctcggccttcgaagaggtgcgcggcatcgatcatccggtggtggtccatatccacacgctgaagggcgcgggatacgacggcgccgatcacgtggccggcgcaccctcggcctcggccggtaacgtccatgagctggatccggcagtctccgacaccggcgtgcgccccacgagcaacgtgctgcacagcgagccgtggcattcggatcactgcaacctgtccgatcacgaaccgcatgagggccagtgcgaggcctcgcattggcagaatccggatgccgcaatcggcaagccggacgatccgcgcaagcattacggcaaaatggcgatggccgcgctcgaaccgcgtttcgccaccgagccaggactcgtggtcatctcccccgccacgccgggctccaacggcatcacccacgaattccgcgaacgcgcgggttcgcattacgtggacacgggcatcaccgaatcgcatgccgtggcgtacgctgccggcatcgcacgggcgggtggcacgccggtggtggccaccacggcgtccttcttccagcgcgcgtacgaccagttcttccaggagatgagcctgaaccgttcgcgagtcacggtacttgattttctgggcggcttgtccggttcggacaatacgcattccggcgcatatgacgtgacgatgttctccaatattccaggggttacgatgctggtgccgacttcggctcgcgactatctggctgatttggcatgggctaccgcgccggccggttcggcggacgcccctgctggtccggcggtgattcgggtgccgggcgaggcgattctggcggcggaacgggatgcgacgctgctgccggtgacgggtgggcagattgctgaccgcccccagtcagcttcgctgccagcctccgccagctccgccagcgggggcatatctgccgcaacagtccgcgggaccgttagcgtaacggctcagcatgccggtgcgcgtcacatgctggattggcgggtcaatcagacgggctcgcaagtcgcgatcatcggactgggcaatgcgtatccgttggcggagcagacggccgccgcattgtctgacgattatggcatcacggcaacggttatcgacccgcgccagtgcacgtcgctggattcagacgtactggagtcgttgcgtgatggccaccagcaggtcatcacccttgaagacgggcagcttgaaggcggctggggcgagaaagtgaccgcatactatgcgaatcatcatgtctcggacggcagccgtaatcctcgtgtgctgaacttcggcgcagccaaggaatttaccgaccgcgtgtcgctgggcgaactgaacgaacgttatggactaacggtggagcaggtgacagaggcgatcactcgttgtttttgatggcgtctagggccgggattttaacggctttattggccgggccgaagccgaatagcaagccgatcagcgtggaaaacagcacggcgaacaggaacagccaccacggaatcaccgaataacgggtcacattctcgccaccaactatcgcctgccagagtatggtccagatagatgttccgccaccggtaccgtcgccggagcccccgccggcaccgctgaccataccgccagacatgccgccgctcatgccgccgctcatgccgcccgcatacaacgcgccgacaacgttgatgcccagcgatatcagtccgctcagcacgcagccgatcaatccgccgaagaatccgatcgcgccggcctccgcaagaaacatgacgcgaatgtcacgaacgtagcagccaagcgccttcataatgccgatctcgcgcgtgcgctcggttacggacataaccattgtgttggcgatgccgatggccgcaaccaacagcgaaaccgcaccgataccgcccagaatcagctgaatcgcgcgcgactgttcttccaacgacttacgcatgtcttcataggaggaggtctcgtagcccaacgctttgatctgtgattcgacttcgggcacggacttgaggtcggcggccttgaccagcacttgatcataggcggtggcttttttggcggcggctggatcgactttggcggccagttccttcaacgcctgcaaatccatgaccagaccgtcggaggtggcatagcccttgttgtagtcgcccgccacaatgccggaagcccgcacatcgagggtgacgttttccgactgacccgcggcgctgccgcttgcgccgcctgtgccgccgccaccgccgccgtacatgttcatgctgtactggtcgccctgataattggtgccggtggtcagactgatttgcgtggcgagcgggtcgaagaacggatcttcgtcctgatcttcctcgcactggccggtggcctggttaaacgtgcatgaggaatactgaccgccacgtgtgctggtgcgttgttcgccgttcttcagagtgtccatgaaaccataggcgaaccattcgccggcaagcacctggtcttttttgaccggtttctcgccaccgacgagcttgtagcccatctggtcgagctgggtcatgtcgatgcccatgatctgcacgtaatcatagatgtaacggccgcccgcgccggctctggccgtcacgttataagggaagttcatcatcggcgtcacgccggatacgccgctcatcgcgcggaaggattccacggccttgtcgtcgagcttggtatcgcccatcttggacgagccgccatcgtccatcggaccggcataaccgttggtgtacacggtgacgatggacagatcgcccatcgatttgagcatcttctcgttctgctcgttaatgccttggcccaaagagaccatgagcacaatcgagcagcagccgacgataacgcccagcacggtcagaatcgtacgggatttacgccgccataggttttgtctgcagagccgcagtatgtcgccgaatcgcatggtcgggcctttcaggccttgtgggatgagccggctggtgcgactgatgaggctggggtgactggtgtgataggagcggtgtctgccgcagcaccatccgtcacgccggtatcggtcttatcatccttgccttcggaccaatcatcccagtcctcatcaatatcgttcttcttggccttctgcttgcgccggcgacgcacgagcagcacaatcaccacgataatgaccacggcgatcacgacgatgaccacatacaccagcaccggcaatccctgattggcgttctggtccatgttcggatcggccatgccggaatcatccatcggctgcatatcggttacgggtatggtgagcgggaattccttggtcttggtctgtccgtcggaatcctcgtacgtgactttgagcgtggtcttcagctcgcctgacgcgtgcggtgtgaaggcgtaaccaatcgtgccggtggcgccggaagccacattgcccacgtactgggttttcatcgtggcatcgaaaccttcgccctccatcgtggcctcgacgttggcgatatcgcctttgcccttgttcacatattccatcgtgaccgtgttttcctggccggcgatcacctggtcgggcactacgggatcactgatttcgaaccggtcaggctgactgatcggcacggaaatcttgacgtcagactggcttgaggagcgggcgctggcgtccacatactcgtatcggaagttcacggtcacggactgggcaccgcttttcgcggaggcgagcgcctgcatcggcacgctttgcgtcatggcgtaaccggcccacagcgcgtcgacgtagaacgtgttcgtgcctcccgcgatggcgaagctctcgccgccgtccacggtgacgaccatgttcgtcaccgccacctgccccttgttctggaaggtgaagtcgagattgaatttggatccggcggccacggaatcacctccatacgcgaagttggtgatgatgatgttgggcaccggtccggcgatcggcgcggaatcgccgtcgcttccctgagacgtactgttcgtgccgcttgtgccgtctgtgccgtcgaccgcgtacgcctgatgcggaagggagatgacggcaagtgccagtgacagcgtggagagcaacgcgacgatgatggcgatggtgtggtgggagaggtgcttcatcggtcagttccttgggttctatgggcggacggcgtggacggtgtagttggtgtggttggggcggacggcgtggacggaacagttgggcgggaaaggtcggtgttgagccgatcgctggtgatgcggccatcgagcaaggtgacaatgcggtcggcgtatgaggccatctgcggatcgtgtgtgaccagcacgatggtctggttgaagtcatgggcgaatgcgcagatcatcgtcatgacctcggttttggttttggagtcaaggttgccggtcggctcatcggcgaacaccacctcgggcttggtcacaaacgcccgggcgatgccgacgcgctgctgttggccgcccgacatctggcgcgggtaatggctgagacgatggccgagcccgactcgtttgagtacgccacgcgccgcacgttcgcgctgttccttgggcacgccgcggaacatcagcggcattgccacgttttcgagcgcggtcagattgggcagcaggttgtacgactggaatacgaagccgagatgcttctggcggaaggccgccagctcacgctcgtcgagtttgctgacgggtacgccgccgattctcacgccgccgcgcgtcggtttttccatgccggccaactggttgagcagcgtggatttgccggagccggattcgccgaaaatgcagcagatctggccttgcgggatactgagattgacacgatcaagcgccaccaccgtctcatcctcgacggggtattccttgcgtaggtttcttacctcgatgattgctcgcggcacgggcccttcttccttcgttcgtcgccattggcggacgcgcgatagctggttattatccagcacatctcaagtcagtgtataaccgttatgcaggagccgcaccccttaagggtgttcccggatggtgatgatgagcatgtgacttctaatctcaaggtcgacagttcaggctccagacggacccagaccggcataatactcaaaagcccctggcccccacagacgatgagggaccaagggtttattgcatcgtgaccccggacgggctcgaaccgtcgaccttgagattagaagtcacatgctctatccagctgagctacggggccaaactcatgtaagtctagccgtaggggtgtaaaacacctcggcgtaacgtcggcttgcaccggtaccatcggcgatatggggacaacggagagcaacgtagatcacgccgcatcgggccagaccgtcgcaggcgatagtggtgagctcactttcacatacgcacagggtcgttttgccagtgaaggcagggattgggaaagcccggttgtgaccaacatggctgcatccgtctctgccgatgccggcaatgcccccgccggcagcatcaccaacaccggcaccaacaacaccttcaccagcgccaccgaatcgtcgcttgccaccctgctgtccaaccaatgcccgttcgttatcaaggccaccattttcgagggcaatggcaaaaacgccattcgcgaacgtcacacattcaccggctcggtgctgcgccagctcgaccaagccagcgccctgctgaacggtatcaacgaatccggccaatacccggccatagccctgcgcgaagcattggtcaacgcactggaacatcgcgattacacgtactccggccccacactgatcaatatcttcgattcccgcctggaaatcgtctcgctcggcggcctgaccgatggtttggaaatcaacgatctgctcaacggcgtatgccagccacgcaccccgcgtttggctgaattgttcgccgatttgggcctctgcgagaactgcggtaccggtattcaacgcattatggacgcctacgcgcagagcgcggtcagtccgcaactgcgcgtgggccccacttcggtggcgatggtgctgcccatcccggtctcggccgaggccgcatccttgcatcggaccgataccgatgcttccgccgcgcccagcaccactgacgaagcgcagcgcgccaaaatgtattcattccccacgattcagcgcatgacggataacgccgcagatgccttggccggcgcacgcatcatcggctgcgcgccattgcagacgctgattctcggcagtggattcggcgagcgcccggacggtgacgaccaggtcagtacccgcccgctcgatacggcgacgctggaaccgtcgcctcaaacgttggagcagttcacgctcaatttcctcgcgttccgcggcgtgaagctcagccgtaaaaccatgcagaaagcgcttggcctgaacaaggatcagatgacgcagctcttggaccagctggagttgagcggcaagatcgaacgtcatacgcacgccaagtccactacgtattcgctggcacatgcctcaggacggtaacgaccagagcggcaacaaagcggcaacgaccagagcaatacagcccaaggcacgataaagcagcagctcagttctcgaatacgcgatcgcgaatcatgcgaccggattcgtcgagcgcggtggagaaacggccgtagtcggacagaatcacgcccatgtacagcatgtccacgagcgcggtatcggccacgcgcgagaaaatcgcattgccatagatcgtgtgcgagtcacgacccgtcagcaacgtcacgtcggcccagctggccagcggcgcgccgatggcattggttatggcgatggttttcgcgccatgcgatttcgccaatcgcaacgctttgaccgtatccgccgaactgcccgaatgggagaaggcgacggccacagcgccgtggggcaggtgcccggcaccgatctgctgcaggtaagcgtcggtattgagacggcatgtcagtcccaggtagccgagcttggtgaacagatccatcgccggtgtcaacgagttctccacgccgaaaatatcgatgaactccgattcggcgagtagggcgaccgccttgcgataggccttggggtccaacgcactgtgcagctcatcgatcagcgccttcgcgacataggccgctttgccgggaatctcatcttcgccatcccacggattcagatcgaatccagccaacggattgaaggtcactttgtgctcggcggacggatggcgcaacacgtaccgcagttcacggtaaccgccgaaaccgagcttgcgggcgaaacgaatcaccgtcggctggctgacgtgggcgatgtcggccatctgaccgacggtcaggtcggccgcctcctcgatatgatcccgaatatactgggccacggcgcgctccgccggacgcagcgacggatacacgtggtcgatgcgctcacgtattcccaccgaggattgcacagccgcgctcctagtcgtccgtattttccattcctgtttcgagggtaccggctgtataccggcgaacagtcgacttggattgaccgcaacatgaacggtgagcgaactcttccgtttacctttccgctccattccctctacaatcaaaaccatggtgcggattagcgtgggaagccccacccatcacacaagcgggcggctgtacggcgtgttcttcgaggacatcaaccatggtgcggatggcgggctgaacgccaacatggtgaacaactacagttttgacggcgtctatctcgaccatcacacgtggcgtatggccggcgccgaacgatggcgtacacaggccgattccctgcgtttctgggatttcatcaactgttccgccgccagcctcggcagtgagatacgcgggattcacggccagcaggtgaccaccgactgccccgccccgccaattcacgcacatagccgatacgctcgcatcacgtccgatgttccttccgaaaccggccctgcatatctggaaaacctcggctataacggaggcggcgacaacgggggcgagcccgcgttctccatcgtcgccgaccacacctattccgtcagtctcgcggtacgtccggttcatgggcgggccaagctgtccgtcggcgtggtcgataggtacggtctgccgctcaccagcaccactcgattgtcgtatatcgtggatgcagatccgcttgacgatacggaagagaccggtctgaggcaggacgatggcgccaatgcgcaggattccggcgtttcgatcagtccggattcgtcggatggtgccatcgccatcggccgtgacggctggtaccggttcaacgccgacgtaaccggcctgaacaccgattacggcaagctgcgtatcaccattgacgccggcgaacgcaccacgttcgatctggatctggtgcagttcatggatgcggactattggggcgcgggcgacccgaaatggcgttacggcaagctgcgccgcgatctggtggaaaccattcaggcgttgcatccagcgtttctgcgattccccggcggctgcatcgtcgaaggtgtgacgcccggcaatgaatatcgctggaaggataccgtcggctccctggccgcgcgacgccaacagtattcgatgtggtcgttcaagatgccggatggttccagctattcgcagagctatcagatcggcttctacgagtatttctgcctgtgcgaggacctcaaggccaagccgctgcccactctgttcgccggcatcgcatgccagtcgcccggccgcgatccgcgccacatggatatcaattcggccactttccgcaacaatgtgattcaggactacctggacctcatcgaattcgcgaatggcgatccggagtccagctcgtgggccgcggtccggcgtgatatgggccatccagaaccgttcggcctggacatgatcggcgtgggcaacgaaaacttcggggctgactacgtggccaagtttgacatgatcagcgaggccattcacgaacgatacccggatatgctgtgtgtgatgagcgccggactgttccccttccagccgacgatgaaacgcagctgggaccatgcgcgagcgttggccgcaaccgattccggggcacatgattccgccaccggtgacgcgattatcgtcgacgaacattcttaccactcccccgaatggtttgcataccaagcgtcacgattcgacgcttacccgcgttgcggcgccggcgtctatttcggcgaatattcagccaacggctattttgccggccaaccgcagaccgaacagggcgcgaacacgtggaagtcggcactcggcgaggccgcgttcctgaccggttgcgagcgcaattccgacgtggtgcgcatgatctcctatgcaccgctgctcgcgcatatcccggctaaggggtgggcgcagaatcttatcgaactcaatccggcgcatgtgaaccccacggtgaattatgaggtggagcggctgttttccacgtatctgggcgacacgacatatgccgtgtccatcgagcagaccgcgtcacgccccgccaaacatctgtatgtcagtgccaccgggcatgacggggatgacgcctgccgttacatcaaaatcgtcaatacctccgattccccggtggatgtgacgttggaaatcgcgcgcggactggccgggctgggcgcctcgccatcgcgaccggtgcgtttggaggtgacgacgttaagcgccagtccgacggcgaaaaccactatcggataccgcggcgaggcttcgggggcgattgtgccggaacgtcgggcttacacattgccgtcgccgtcttcattgctggcgatgaagatcaagccgtacagcgtcacgctggtggcttcgcgctgattgacatcggccattaggccgattcctttgccgttagaatcaccctcaaggatgagggggaatcgtgcagattcagggaataataggggctatcccccatagcgaatacaagcacgggagggcaggatggaaaccacggcggccagaagaccgccggccaacgatgaaggagtatgcggtatgtttatcaatctgttccgcaggcagcgccctgcgctcgcccggctggcccgcaactccaacgcctatcgtcagccgatggttgcggccgtatcatcgtccgcagtcggagtatccagcatcacctctgcatccaccacagccaacacagacggcgtatccggcgtatccacgctggatgccaccatcggccgcattcatgacatcccgcagtcggccatgagccgactgaccggctcccccaccgtatacgcgcggtagaccaccccagtcggcttcgccgacagcccccgtcagcggggtggagatggctgggctcagagactcggctcgatgatccagctcaaggtcagcaatacggccaaaaacagaacgttgacggcggagtagacggccagataccggcctttcttgtgcgggtattggcgcacgacgttcttgtaagaaataagcgaggccatcgaggcgatgagcgtacccatgccgcccaaattggtgccaatgatcagatcgcgccattggtcgcagaagccggaaagcagaatcgtggtgggcacattgctgatgacctggctggagccgaccgccacctccagcggatggccgccgaccagcgagcgcgccagttcgtagaattcgggcacgcgcttcatgttgccgatgaagatgaagaacatgcagaaggtgagcggcagtccccaatccacgtatttgaatacgcgccgatcggtgaacaggaacacgacgaccacgatcacgcacatcacccacaggggaatcacgtcggagacggccagtaggcagacgatgaacagcagcgagtagacgatggtgcgccagccgccataaccggcgccgtagccggtgatacgaatctcgtcgggctggtgtttgttgcgctcgggagccagcacgccggtttcgaggtcgcccaggtcgccgaccggtttgccgccaaacaccacggaaatcacgatgaccagcaacacggccgccgtgccggaatacggtgccatgatgccgaggaattccatggtcggcatgccggtcagggctttgagatacaggttgtgcgcgttgccgatcggggtgagcatactgcccacgttcgcgccaatggtcatcagcgtgaccacgaggatggtcttatcctcttgcccagccatgatgagcacggccaccgcgaacggcacaaacgtgaccagcgcaacgtcattggtgatgaacatcgcggaaaagaacgtcaaagcgacaagcgtaatgaccagtccgcgcatggtgctgaccttctccagcaatcgcgaaccgatgatgcggaacacgccgatacgctggaatccgcacaccacaatcatcaggcagatgagctggctgatggtgctggcgtgaatgtagcttttgtaatcggcgtccggcggcacaatgaaacacgaaatcagggcgagtattgcggcgacgatgagaatcgtctcatttttggctacattgatcagccagcgtcgcatccattcctccgtgaataacccaatatcgcagctgttctattttacgcgcagaccggcataaggtacgtagtcgcgttgcgctggcggacatgagtttttggaccgatgccgcacatcagccgcgctcgtttttttatttggacaaggaaacattgagtttgcatgtcttccatacaatgaactgccgcgcaatgctgtgcccgtatatacggctgcatcattgtgtggcaggccagacacgaataccgtacgtggctggctcataccaatgggacatagtttcattcgaggaagaggagcgatgaagttgcgtattaccccagtattcccggtcaaacgtttcgccgccgtgtctgcacagaacgtgaagaacgtgcagttcgattacacgaacatgcccacgtacaacacgatcaccaagtagcgcgcactgccgcactgatcggcggcacttgccgcatacatgaatggccggtgtgctgcggattccttaccaagaatccgcagcacaccggccattatgatatatgccgcaatacaggggggcaatcagccctgcaccttaccgccttgcgcgctacggtatccgaagttcatcatctcgctgttgtaggcgaccacgccacggccgaccgccggcagaacgatcatgccaccatcgccatgatgcgcggcgacttcgtccaaagtggccgtcgcggcatcctcgacgttctcgccggcgaaacgcacacgatccgacacctgatgggcggcgaccaccttgatgaatgcctcgccgatgccggtgcaggacaccgccaccgtggactggttggcgaacgtgccgcaaccgggcagcggcgaatcgcctacacgaccgtgcatctggttggtgatgccgccagtggacgtgccggcggcgatattgccttcggcatcgcgcgccacggcgccgatggtgccatgcttctcccactcatcgccaccggactgagcctcggccaaggactgacgacgctgttcggtgatgaagtactcgttgctttcggtcgcgacgccccaatcggcgatctcggcatcggtcgggtccgcgaacagcacatgcttggtctgctctttgacggcacgcgccgcatcgatcgggttcttcacggtgcttacgccggtgaccgcaccgacctcgccatcgccggtcatcaggcaggcgtccatctgggcgatgccatcgctggtcagggcggcaccacggccggcgttgaattcgggagcgtcttccatgacgtggatggcggcgaccacagcctcatgcgccggcgctccggattccaacaactggtatccggcatcgagggcgcgctgcagatcaagttcgacctgggcgatgcgttcaggcgtgctgcgcttgccacgactgcccgctccggcgtgaatgataagcgtgatgccggtttcgctgcccgccagttcagtggtcaccggagaaacggaggatgtggtcatatcgtgtccctttctggagtcagatggatgtgctgacgccaacgtatcgttgcttccgcatgtatgatagccgttgatggccgcgaccggttccgcatttcgcatcatcggctcgcgatggcgtgactcgttactgcgccacctcgccactacgccaggggcaatgcgatgccggctcgatcggccaggtcacgcaacgaccacgtggtctgccccgttcgcccgacaacgctatgcgcatgccacagcgaactgatgatggcttcctcgcttattcattcgtcgaatgcacccatcgatgtgggtatgcagccatcaaaaaactcgacaaccgcaatgagccagtcacttggctacatctgtgctatcgtctcgccaatgattcgaatgccggtatcaatgtcagcagcatccgggcgcacaaagttgagacgaatatgggaatcatccatttcgtcaacgtcgaacacgctgcccggcatgaacgtgacgccttgggaacggcaggattccaatacatccagagagcgcacgccgtccggtaaggaaacccaaatatagtagccgcctgcaggcacggtccaatacacttcatccggcgcataccgctccaatgctgcgattgctgcatctcgtcgaatgcggtaagccttgatcaaaccgcgcaaatgttcggcgacgcggccttctttaagcagttccaggcagatgcgctgcgatgacgtgctcgtatgctggtcgaccatgcgccgcagagccgccagccggttaatcacatgcgggtcggccacaacccatcccgtgcgcaggcccgaagtgacggttttcgagaacgtcgacaaatacatcacgtatcccgcattctccatgcccttaagcggtatggggcgatgcgcgtcggatgatcccccgccgtaccacaaatcgccgtaagcatcgtcttccacgatcagacactgatagcgccgcgccacgtcgatgagttcgctgcgtcgttcgggcggcagcgtggtaccggtagggttttggaacgtcgggacggtgtaaatgagcttgggccggaatcgcgcgcaatagccgtccaacaggtctgtacgcataccgtgctcgtccactggaacgccgatgatgcgcgcatccgccgagcggaaggtctgcaatgccgggaagaacgtggattgttcgaccagcacgcagtcgccggggttgatgaacgcgcgcacgatgaggtcgatgccctgctcggagccggagagcaccatcacgttgcggacgccgcattgtacgcctcgtgcgcgcatatgttcggcaagcagcgcacgcaactcttcgaatccctcgataggtgattccggttggccgtcgaattcccgcgattcgaacgcctcgatgctcaccttgcgcagcagatcgtccgggatatccgccgggttcggcgaaccggtggcgaagtcaataatggtgtcgccgcgctgcgcccgctcggccgaggcgatgtcatggtaggtaaaccggttggaataatcagagaacaacaccgaccatggcggacgcacgacggttggctccgggccctgaaccgagcggctttcacgaatcgtatggaccgccgcagagctgctgccctggtccgtcgtcaagaaaccagtggaggtagcacgttctacgtcgccggaagaggaggcttgcgatgttcccatttctgccgacgatcgtgttgttcgcgttattgcattcccgaagtcactgtttgacgtgtgcggtgttcggcttgcggaggcagccggcagcacgaacgtgcctttgccgactttggaggagataagaccttcgtccttgagctgctgatacgcctgcaacaccgtggtgcgattgacttcgagacgcgaggacagctcgcgttcgggaggcaggcggtagccctcggccatcgcgccggagacgatctgttcacgcagctcggcagccagctgccggtacatcggcaccttgctgcgtcgattcagctcaagctgcatggcagatcgtctccttgattcgtcagtcggataccagtctaacggcagacgaatcgactacagcgacaggaagagctcgtggatgcgggtatcgtccgtgagttccgggtggaaggcggtggccaggatattgccttgacgcaagcccaccacgtggccatcgacttcggtttcgaccgtggcctcagggccgaccgacaccacgtacggtccgcggatgaataccagtgggaagtccgtgatacgctgcggatcatccgctgcaccaaaatcggcggtggcctggaaactaccgagctgacgaccataggcgttgcggcgtacgacggcgtcgagcgcgccaaagtagacattgtcgtcattgtcgagctttttagccagcagaatcatgccggcgcaagtgccgaataccggtttgcctgccttgatgtgggcggcgatcggctcgaacagtccggtcgaatgcaggagcttgccctgtgtagtggattcgccgccaggcagaatcacgcggtcgatggattcatcgaaatcctcggccgcgcgcagcagtttccacggcgcaccgagcttgtccagcaccgccgcatgttcggcgaatgcgccttgtacggccaggatgccggtcacgccgtgcttgacgttttcgacgtccgcggactcttctttggaaatatattcaacagctacaaccatgttgtcctctccggcttcgactcccgtcactcgccgcgagcggccatgatggtctgaatctcgtcctcgttgatgccgaccatggcttcgccgaggttttcggacagcttggcgagcagatcggcgtcctgccagttggcggtggccttgacgatggcggcggcgcgcttggccgggtcgccggacttgaagatgccggagcccacgaacacgccttcggcaccgagctccatcatcagggcggcgtcggccggggtggccacgccaccggcggcgaagttcacgacgggcagacggccgttgtcgtgcacgtacttggccaggtcgtagggcacggccagctgcttggcggcctcgtagacctcgtcgtcgcgcaaggccacgagctcgcggatctgcttgttcatggtgcgcatgtggcgcacggcctgaatcacgtcgccggtgccgggctcgcccttggtacgaatcatggcagcaccctcggcgatgcggcgcagcgcctcgcccaggttcttcgcgccgcacacgaacggcacgtcgaactggttcttgtcgatgtggtacacgtcgtcggccggggaaagcacttcggattcgtcgatgtagtcgatgtcgatggcctgcagaatgcgggcctcggcgatgtggccgatgcgcaccttggccatgaccggaatcgagacagcttcctgaatgcccttgatcatggccggatcgctcatacgggagacgccgccggcggcacgaatgtcagcggggatgcgctccagcgccatcaccgcgcacgcgccggcatcctgcgcgattttcgcctgttcgggcgtggtgacgtccatgatcacgccacccttgagcatctgggccagattacggttgagttccgcacgattctgcgtcatgagtttcccttcgttcgacgctgcttggtatcgcgcttcattattgaacggattggattggccccacccaaaccagtccaatttggatggggccaatctgcaacttctgcacccatccaatccggcaaccggttgtatggccttatgcatccggcacgtattcgaagatgcgcgcaatcagtgggaggtattagccgacggtgttgccgtagatttgggcttggaggtctttacgggcggtttccatgcgggtgatctggccgaggagggttatcttctcttcgccgtcgggcagctgggccatgcggcgtttggccaagccgatctggcgcatgaagcccatgtccagtagccgggtgagcagttcggtggcatagcgctgctcttccggcgtggcagggcgtagctgtactgcggcggcaccgccattcacgccaacacctcctcccgacacgttggcctgcaccggctgcgcaccgctaccgatgtcgtcgccaggcagtggcaacggcatgacggccagctcgttgatcacctgattcagcatcggcccgccggccttggtgaggttgtgcatccacagcccctgcggggtatcgtcggatggcagtccgccggcggccgcgatcgcctggaacagggtgcggaacaccgaagtcatgaaatggtcgatggtcagctgcccgaacatggtgcggtcgatggcgcgcggcacctgaatcagcacggccatgaactgctgttcggcgatgaatacggcgtcgtcgatcttgaaatatgcctgttcggcggcgtcacggcgctccaacgccttgcgcgtggccggattggcgtatgggttggtgccgggttccacacgcggctcgtcacgctcgaatcgacgtttgggcgtgtaggcgtcctcatcgcgtacatgcatctgccggcgcgcgttcatcacctcgcggcgcatcacctcaagatccacgccgatacggcccgcggacttgcgcgcgtaagcgtcccatagggagcggtcgcgaatctgcgccaccagcggggccacggctttcatcgcacccacttggccgggcgtgtaggtcaggtcgaaccggccgatggcggcgtcgatcacgaagtcatacaacggtttggcgcgggcgatcagcgagcgcaccgcctcgttgccccgttcgatgcgcaggtcgcacgggtcgagattgtcgtcggccacggccacgaaggtttgggagaggaaggccgaatcaaggccgaaggcatgcagcgcggctttctggccggcggcgtcaccatcgaacgtgaacacgatgcgcgagctcaacggctggtccttgaccttcaacggcccgaccagctggaccgcgcccagcgaatcgtcggcgatcaggcggcgcacaatcttggcgtgctcggcgccgaacgccgtaccgcacgtggcgatggcggtgtcaatgccggccaagtgcatggccatcacgtccgtatagccttcgacgatcaccacctgtcgcttcttgacgatggcggatttcgccaaatcgatgccgtaaagcacctgggttttgcggtagagctgcgtgtccggcgtgttgatgtatttggcggcgatctgatcgtcttcgtatagtttgcgcgcgccgaagccgagcgtgcggccggtcgaatcgcggataggccacgtcacgcggccgcggaaatagtcatagatgccgcgctggccttggcgggccaagcccgcgtcgaggatttccttctgcgtaaaccccttggaggccaagtggcgcacaagattatcccaaccttggggcgcgtagccgcaaccgaaacgttcgcagtcggcttgggagaagttgcggcctccgagcagcttgcgggcgggcagtgcttccttggtcaggatctgggagacgaagaagcgttgggcttcctcgcaggcttccagcagtcgggtgcgcttggagccggtgttctcgcggttcgggccgttgccgctgttctcgtagtgcagctcgatatggtacttgtcggcgagcagttccacggcttcgcggaagtcgatgttttcggattgttcgacgtatttgaatacgtcgccacccaagccgcagccgaagcagtgccacacgccgagtgaggggcgcacgttgaagctgccggttttctcgtcgtggaacgggcacaggcccacgaaggtgccggtgccggagggcttaagcgttacggtcgcagatacaatgtcatacaggtccgcggcggcgcgcaccttctcgacatcctctttcttaatcattccgaccataagtctctagagtaccgcctcacctgagacacggtaaatttttaccgtcggttatcatttcttccgcgaaactcccttcagtcgcctacagcgacagctcccctcacccgaggggagctggctcgcgcagcgagactgagggaagcacccgtccaacacgccctcagcacaagatggagtgcagggccagagcggagttgtcggtcaggcttgcgacctgatcgatggcgacgcgcaggcgctcgttgtcattggtggattcattccaatcggccaggaactggctttccaaagcgtcggatgggagcggcgaatcggccataagcacatcgaccaaatccgatacgatcttgagctcctcctgatggaatggctcgcgctcgcgaggcgccatgacgaagtacacggcgatgcccttcaacgccacgatctcgtaattcgtgtcctcgggaatcacgatgttcgcggaataccgggtcaacggcccgggcccatacgtgtcgcgcgtggcggtttccaccgaccagcagaagcgaccgatcaaatcggacgtgatgttcttgagctgtgccaacgattcgcgcgaaccattgaaatgtgcagggaacaaatgctctcggcgcaatcgcatgaacgcggccagcagcttgtcggcatcccacttcgccccataccatgcgcgcgtctgctcgatgatgtggtccagcatcttcggatcggcgagcacaatcggatcgaacgcgccggtggcgatggaatcctcgacatcatgcacggagtaggcgacatcatccgaaaggtccatgatctggcattccatgggcttggtggcctggggagcgccgattttgagccagcggaacaccggttcgtcatccgggtagacgcagaacttcttcgaccgctcccccttggggtgtcggtcggcttcggccaaggtccacgggtatttgacggccgcatccaaggccgcacgggtcaggttcacaccggccgaacgcccgtccgggtgaaagatcttgggttcgagccgggtcaggatacgcatggtctgtgcgttgccctcgaagccgccgatattgctggcgatgtcggcgagcgcacgctccccgttgtgcccgaacggcgggtgaccaaggtcgtgggccagacaggcgcagtcgaccacgtccggatcacagccgagcaatgcgccgatttggcgaccgatctgggcgacttccagcgtatgcgtcagtcgggtgcgggcgaaatcgtcggtaccggcaatcagaatctggcttttcgcgcccaaacgccgcaaagcggacgaatgaatcagtcgcgcgcgatcgcgttcgaaagccgtgcgcgacttggatttgggcggctcgggtgcccatcgctcctcgtcgaaggcgttgtagccctcatcgctcagcacctgttccccatccaacgttgtttccatatgccaagcataggcacacatatcggccgcagtaatcccgacttcccgaatatgtgccactgacgtcaactcaacggcacatattcgggagattggggccgatttcccgaatatgtgacgctcagcacatgtcagtggtacatattcgggaagaagggattacggggtgccaccgtatggcggtaatgcaccttatagcagcgtggcggggtcgagcttggcgaggtcggcggcgggcagtacttcggcggcatgctcgtaaaggcgcgggatgcggttgcgcaggcaggtgaagatctcgtagctgatggtgtcggcggcgcgggcccaatcgtcggcggtaggctcaacgtaatcctcgccgcggcccgggccgaacagttcgaccgtgtcgccctcgtgaacgccgagttcggcggcggatccgtgcaggtccacgatgaactggtccatgcacacgcggccgcacacgcggtagagcttcggaccttcagtggtcatgatgcgcaccgggccgcccggcttctccacgtgcttggcaccttccatatcgaaaccggaagcggagcggtggatgccatcggcgtagcccagcggcacaatagcggtcgaggtgttgttcggggtcaggtaggtgcggccataagagatgccatggccggcctccacatccttgaccgtgccgagctgcgcctgcaggcgcatggccggggtcagatgccagtcgcgcggggtgcccatcgcgggatcgggctcgtagccgtacaggccgatgccggggcgggtaagttcgaagtgaatctccgggcggtccaaagtggccgccgtgttggccaggtgacggatctccggcggaatgccggcctgttccatgcggcgcgtgaagtccttgaacgttgcgatctgctggtcggtggaggcgacgaattcgggcacatcgggcgaatcggccacggcgagatggctccactgacccacaatatgcaacacgccctctttggcgagcggcacgagtttggcgagcgcggcgtcgaatccagccggcgtgaaaccgttgcgaccgaagccggaatcgaccttgacgtgtacgcgggcgggcttgccgagcttgcgtgcggcggcggccacggcatcgatgccgggcagggagccgaccgatacgtcgatatcggcagcgatcagctcatcgaatggcacttcggtgccgttgtagacccaagtcagaatgcggcaacggtcggggccgatgccgagtttgcgcagcagcagtgcttcatgcgattgcgcggtgccgagccatgtcgcgccgccggcgagcgcggccagtgcggcgggcagcagtccgtggccgtatgcgtcggccttgaccacgcccatcaccgccgtgccggagttcgggccgccgaccacggagaccaggtgggccatgttgtcgcgcatggttttgaggttcacgatggcctgtgcggggtattggcggcgggtggccgcatagttggccttgccctgctcggacgagaatgcgatttcgggtgctgcgttcatgctcataggcacctattgttgcgcaggaatgtgacgtgtggtcacaatcgtttgttttcgcccggcagtcgtacactaatgaccgatatgcggtttctcggaagccgcctttgattcccggcgttgaggcgtgccgggatcccggaaatccgtccggtctagccccatatcttaagtttcatgagagaagaacatggatctgtttcgtaagaaaagcgtggatcagcttgtcgccgaatccactcccctgaagcgcacgatgcgcaccttcgatctgacgatgctcggtatcggcgcgatcatcggcaccggtatcttcgtgctcaccggcaagggcgcgctcaccgccggcccggccctgtccgtatcgttcctgctggccgccgtctgctgcggtttcgccggcctgtgctacgccgagttcgccgccatggcaccggtgtccggctcggcctactcctatgcctatctggcgttcggcgagctcatcgccttcgtgatcggctgggatctgattctggagtatgctctgcaggcggccaccgtgtccgccggctggtccggatacttcaacaagttgttggaaggcttcggactgcacctgccggtcgagctgaccgccgcctacggcaccaacccggacgtcaccacctacttcaacctgcccggtttcgtcatcgtgctgatcatcacgtgggtgctctcgatcggcatcaaccagaccaagcgcaccaatgacgtgatggtgctcatcaagctcgccatcatcgtgctgttcatcgtgtgcgccgtgtggtatgtcaagccgtccaactggcagccgttctccccgtacggcatctacactttccagcccggctccacccagccgtacggcattgtgccggccgcatccatcgtgttcttcagcttcatcggattcgacgccgtgtcctcttccgccgaggagaccatcaacccgaacaagacactgccgcgcggcatcctgctgtccctggccgtttccaccgtgctctacatcgtcatgaccatgatcatgaccggcgtggtgccctacaaggagttcgccaagtacatcgacgccccagtggccggcgtgattctggagaccggcatgaactggctcgcggtgatcgtgaacctaggcgccctcatcggcatgaccacggtgatgctcgtacagctgtacggccagtcccgtatctgctacgccatgagccgtgacggcctgttcccgaagttcttcggccacgtgcacgagaagtaccgcaccccgttcaagggcacctggttcttcggtctgctgaccgcgttcgccggcggcttcatcaacatcaacgtgctgttcgagctggtgaacatcggtacgctgtccgcgttcatcatcgtgtcggccggtattctatggatgcgcaagacccagccgaatgcgccccgcggcttccgcgcgccgggcgtgccggtcaccccgattctggccatcgtattctgcttcgtgctcatcgccggtctcaactgggagacctgggtgcgtttcgccatctggttcggtctgggcctgatcgtgtacttcggctacagccgcaagcgctccaagctcggccttgagcagaaggccggggctgacaccaaggtcgctgcgactgaggactgaggtctatcggctgaccgatagccgatggctgctttcgtgaaaaccgtacgctgagttactttcagcgtacggtttttgcgatatgaggccatgtcggagaccaccctggaccgtatggtcagaaaaagcgtcgaggaggccttgaacgcgatgcccgctaccagcggtgcatggtccgcttcgagcgcaacgtcctcgccagggtcaacccccgcaaccgcgaaatcagacggcgcacgcgcatggtcggcagcttccccgacgaacgcagcgcgttgatgctcgtctgcgcacgcgtgcgctatgtcacgtcgaacgagtggtcgacgcgccgctacctcgacatgtcaagactcggtgagaccgtatgggaagcgaaccgatcatcgccacagggacgggcgaagaccaaagtgcgcaagatatcgggcactaccccagcgcaagctctcccagggcatcaccgccggtgccgtgaaatacccccccccagcagcccggctcaccccagacaaaacgccgtggcgggacgggcctgcgacaggaaaggaagtaagcatcatgctcgacgcattcaccacagcgaaccccgcgccggggctcggacaaggcgccttggatgccgtggccatgaggacccccggccgcacccgctgcatcaacgccgaaaacccggacggcggcaagggccgcgcggccatggcggccagcgcgttgggcccctcccgcaagggaagcccctgcatcagcacggtgaggtccggggaatcggtgacattgatggacgtcgagggccccggcgtgattcgtcacatctggatgacggtaaccgaccgcacctcccccaccggccccgacgtgctacgcaacctgatcctggaattctactgggacggcgaggactccccctcggtgcaatgcccgatcggcgacttcttctgctgcggacacgcccagtcctgcaccatcaactcaattcccgtcatggtcaacccgaaccggggcttcaactgctacttcgccatgccgttcgaacacgcgcgcatcgtgctgcgcaacgaccacaacgaggacgtgcccgcgttcttctaccaaatcgactacaccgaatacgaccggctgccggccgacacgatgcgcttccacgcgcagtggcgccgccaacgcgtcaccgaactcgcccacgactacgtggtgctcgatggcgtcgaaggacacggcacctacgtcggcacctacctggcgctcaccgcgctcgaaagccgctggtggggcgaaggcgaattcaagttctacatcgacggcgacggcaaataccccacctggtgcagcaccggcgccgaggactacttcggcggcgcctggagcttcgccgaattcgacgaacacggccgcatgtacgagcgcaccttcaccggcccatacctcggcttcccgttctactcgcagaacctcgccggacgcgaaagcgcctactgggacactgccacccccgtgacccgcggcctataccgttggcacatccccgacccgatctacttcgagcgagacctgcgcgtcgaatggcagcagatcggcaccgaggaagccggcaacttcgaacgacaggacgacgtggccacggtcgcctactggtaccaaagcgaaccacacaagccattcgccccaatcggcgaccgcgcgttccgccggccacggtgacttcctcgatgcctgtcggccgatggggctccatcggccgacaggcatcgccatgtcttctccattcacctgcgcggtgaatggattggcaacggtgtgttaccccgggattcgactggacgccgccgcacgacgacagcatgacagccgcaagcaccgccacgacgcccccgacccaacgtgttcttctcacacactgattctaccgtcagaaaccgatgacggtgcagaaacgagcacatcagccggcagccacactcaccactcgtggcgctgataggcgattctggtggtgtcgaccggccggtcgagcagctggatcaggccgcaacgggcgaagccggagctttcgagcacgtgctgcatggccttgttattggggtgggtgtcggcgcgcacgttgccgtagtgcttcagggcccacctgatgcagtcgcgggccgcgtggcgcaccagaccggatgcggcgatgcggtggatggtcacataggtgtcgttgtccagccaggcgccgtcgattttggcgtaggtcggatccttgcccgggcacagggcgaactgggccagaatgcgttcgtggccattgcaggtgtcgaccagcagcatcgtacgctggttggcgatgtcgtcttcaatcaccgattcacgcggaaattcgttgccccactgggtggggttgccgttggcggccatcaacgcgcgtgcgcgtgcgtagattttctgcatctgcggcagatcgcgcatggtggcgtggcggaaacggcggcctgtcgccttgtttgcagcgttcgactgagtcacttctcacctctccgacatgccgggttgccggcacggtgaccggcgactaactgacggccaacctaccatgccgtaggcacaagaaatcccgtccgcgttgcatgacggacactaataaacaatggcttccgtccgcaggagccggacagtccagccgagttgaggacagccaccctcagtcggcttcgcccccggctcccgccagcgggagccgaatcagaattgaatcgaatcagacgaatcagacgaccttgcgctcgaacgggtcggagctgatgccttcctcaaggatctgcttggcccattccttggcggcgaacaggctgtggtcgcgatagttgccgcagctcttctcggtggtggcgggcacgtcatcccatgtggccttgtatgcgatgaactccaacgattccttcaacgccttggccacatcctcggtggagtgggtgccccaggtcagcaggtggaagccggtgcggcagccgaacggcgagcagtcgatgtagccgggaatgcgttcacgcagcagcacggcgatggtgtgttcgatggtgtgcaggccgccggtggggatggcctgctcgttcggctgggtcaggcgcagatcgtaattggagatcacgtcgccgtgagggcccgtttcggtgtcgatgtaacgcacgtacggcgccttgaccttggtgtgatcaagctggaatgattcgacgacgggcttttcggccttgtcttctgccatgctgttgcctttctacttgctgagtgttcggtcatgaagtatcgaacagtcatcgtagtcgcgccagcccaagaacgcccgcaaatactccgcggttcgctataggagattgttatgacgcactcccggcattgaacgaggcgatggtttgcatgaagcgctggccgtagaggtcgagcttgtgttgaccgacgccgttgaccgccagaaattgcgcgttggtaaccggcttgatgcgggccatgtcgcgcaaggtcttgtcggagaacacgatgtacggcggcttgccgatttcctgggcgatggtgcgtcgcagttcgcgtagcttctggaacagcgattcctcgtcatcgtccgggatatacgagcccagcgcatcgccgggaacattggcggaatcggcagtatcagccactcccccgctccgaccggaaccggccgccgccgacttgcgttccacctgtttgatctcatagtggaagtcgggagcggcggtttcggccgcccgcgcaccgaacatgacgattggcatacgcccttcggcgattgacaggtacccgtccgtggccatctggctcaacacgtcgcgcacgcgagcctcgttcacgtccttgagcatgccgaaggtgggcatccgctccgggttcagccatgccagatcctgtgcccgcgaaccgcgcaggatcttgacgatcttgccggaaccgacgcgctgccccacgtcatgcacgcaacggctgatcgcctgcgccacgcgggtcacgtcgatggtctcgaacgtgctttcgcagttcgagcaggcaccgcatctgccggactgcgaagagtccgccgcaatgtcttcacccgccgcggaaccagcattcggcgacaattcctgaccgaaataccgggtcatataccggtgcaggcagtcggtggtgcggcagtagccgaccataccgtccagcagccggcgcttggactggcgaacgatctcctgctcttcgggagtcaatcgctcgttctcataatcgttatccagcaaccgacgccgggtgacgatgtctgactcattccacagcagcgtgcatcggctgggctcgccgtcacggcccgcgcggccggcctcctgatagtaggcctcaatggattcgggcagattgtggtggatgacgtaacgcacgttggacttatcgatgcccatgccgaaggcgttggtggccacgaccaccggcaccttgtcggtgatgaagtcgcgctgggccacctcacgcgcgtccggcgacatgccgccatggtaggcgacggccggatgccccatctggttcagcgtgtcggcgagcgcttcggtggtcttgcgggtggcgcagtagacgatgccggattcgtccggatggtcggccacataccgcgccacccatgcggccttgtatttggtctccagtttgaccacatcaaaatacaggttcggccggtcgaatccggtgacggtgacggccggattccgcaatcccagcagtcccacgatgtcccgacgcacccgttcggtggcggtggcggtgaacgcacccaccggtggacgctgcggcagcccggcgatgaaatcgccgatacctaagtacgacgagcggaagtcctgaccccactgggagacgcagtgggcttcgtccacggcgatcagcgagatcggcgtacgggcggcaaagtcgcggaatcgcccggtttccaagcgttccggggccacgtacagcagtttgatctgcccggcggcggcttgggcgaacaccatcgcctgctcgtcgggagtttgagtggtgttgatgaacgcggccggcagaccgaggtcgttcagcgcatcgacctggtcgcgcatcagggaaatcaagggagatatgaccaaagtcgcacccgggctgagcgcggcgggaatctggtagcacacggacttgcctgcgccggtgggcatcacgcccaagacatcgcgtccggcaagcaaagcctcgacaattccttgctgtccgggcctaaacgagtcatagccgaagtatcgtgtgagcgcctccagcgccgcctgatgtgctgtcataaacgaccagtgtaggccgaccgcggatggatttcatcgtataacggaatacctcgtaccgatgtacgtagcccttccgtattattatgcgtcgaggaacgctattcccggcatatcacacgatatgccgctttgagagaactaagacggggcattttatggccaacaatacattttccttttcctctcctgacgatcaggagacggcggtgctgcagcctgtggccgccgatgggctgttcgcagccgcggccacaggtaccgccacgccacagcaaagcgacaatggcaccaataaccatgccgacaatacagcctatgtgggtgaacatgttatggcatctaccaccgctaaatcacatggcaaggccgcacggattgccatcataaccatatttgcagtgttgcttgccgcattaatagcctatttcttcgtcggacgttggtacttccaagacaaggctgcgcccggtgttcatttgggcaatgtctctgtcatgggccagacccgcgaagaacttgcgaatactgtgaagcagcagctgaataacaccacagtgacgttcaccgccgaaggcaacagcgtcaaagcctcgctgaaggaccttggcgtcaccgtcgacacggataaaaccgtagatgcgctgttgaacgcgaagaccggcgacgtggccaagctcaatattttcgatcagccgcatatcgctctgaccgccaccagagacaaagagactgccgaacaattcgtcaccgccggcctggtcgatgaggccgaccgagcgcagattgccaccgttgtctacaacaagagcaccaagcagttcgattacaccgcgggtcaggatggcaagggcccggatatcaatgttgtcaatgctgcagtcaaggaggccgtcgcgaccccgggcgaaaatgcgacggtgccggtcaagctacagactgcaaagaatccgattgatgacgcgagcgcacagcaaacacagtttgacgccaatgccaagcttggcctcaaactgaccgtggacaacggcgtgaacaagagcgtcaccatcccggccgataccattgcctcattcctcaagcccacggtgaataaggcgggtggcaccatgagtctggtagtcgaccgcgatgccatcaccaagtacgtcaccagtgacagcgtaaccaaggaactgactgttcccaaggtgacacgcgaggtctacatcacgccgaaagacgaaggcggcgtggaaattggtgccgataagacactcggtgtggatggtattgaagtgactggtgccggggacgcccccgaacgtctggctaccgccatcgagcagaaccagtccactgattccactgtggctgtgaaagacagcccatatgatgtcaagcaggtcgaggtgcctcataacttcgatacggcaaatggcgataagtgggttcatgttgatctgacgaaccagactgccactgcatatcagggcaccacggtggtcaagaagttcaacatcgcttctggcaagcccaccgccgatggttccatgctgtccgataccggcacgttctacgtgtatctcaagtacgaatcgcagaccatggttggcgaaggctacaaccagccaggcacgccgtgggtttcctactataacggcggcgaggccctgcacggtgttcctgcatacatgtggggcgagcaccccatctatgtgcagcagggtatcccaggctcgcacggctgcatcaacatgcaggtggccgacgccaagtggatgtacgactttgccaccatcggcactcgtgtggtcgttgatggcaccacaccgacttccggtcaggcgttgcgcccggctggtgcggatgccaccggatggcagggcggcaacgccagctgattcgatccatgtttaatcgataacggaaaatccccgacccttgtgggccggggattttttgtaggtaccaatcgatagcgagtccgccgataagcgtggtggcaccgtcaatacggtgccaccagtaccgtcagtacggtcagatacgatccaatgcctgcttgagatcggcgataaggtcgtcggcgttctcgataccgaccgaaatacgcaccagattggcgggcacctgcagggtggtgccggccacggaggcgtgggtcatggcggcgggcacctcgatgaggctttccacaccgccgagcgattcggccagtgtgaagatctgcgtgtggtccacgaagtgcttggccgcctcggcaccggccgcgagctgcacggagacgatgccgccgaagccgccgtgcatctggcgggcggcgatttcatgacccgggtgggactcgaggcccgggtaccagacgcgctcaatcacatcagagggctgggattcgagccattcggccaccttcagggcgttggcactgtggcgcttgacgcgcagatccagggtcttcaggccgcggatgtccagccaggagtcgaacggggagggcactgcgccggcggcgttctgcaggaaggcgaccttctcacgggtctcctcgtcgttgaccaccacggcaccgccgaccacgtcggagtggccgccgatgtacttggtggtggagtagaccaccacatcggcgccatcggccagcgggtgctgaagggcgggcgaggcgaaggtgttgtcgaccgcgaccttggtgccgtactcgtgggcaacttcggcggtggccgcgatgtcggtgatgttgagcagcgggttggacggggtctcgacccacacatactggtagtgcttggaggccaatgcggtttccacggctttcagatcggtgatgtccaccacgtcgaggcccacaccccacggcacgaacaccttggagagcaggcggtaggtgccaccgtacacatcgttgccgagcaggatgttgtcgccgggcttgatggtggagcgcagcagcacgtcgatggcggccaagcccgaggagaagctcagcgcgtacttgccgccttccacggcggcgagctgctcgtcgaagctggtgcgagtggggttgatggagcgagagtagtcgtggcctcccctgaggcccaacacgccatcctgcttgaaagtggaggtggcgaagatcggcgtgacgaccgcaccggtggtcgggtcgggctcctggccggcgtggatggcgcgagtggcgatgtcggtattggcgaacttggcgttgtattcagcggacatgatattgggttcctttcgggattgttccgtattcgaaggtaaaacaggtgcggttagttagtgcggatgttggtattgattcttttgatagctagttatggagtccatccgcagctccctcatcagagggagttccgttaaggtactgctcggcgagggagggcttgctggtgcgttccacgatgtcgccgtagccgttggcacgcatccagtcgtcattgaagatcttctccagataactgcggccggaatcaggggcgagcaccaccacaatctggttctcgtccaaatcattggcaagcgcgtacttgatggcgctggccacggccatgccggacgagccgccgaccagcaacgcctcctcgccggccagacggcgggtcatttcaaaggcttcggcgtcggatacgcgcacgatgtcgtcggtgatgttccggtcgaaagccttggggtagaagtcctcccccacgccctcgatgtcgtactggtggacttcgtcgcgtgaggaagcggagtagatggagccttccgggtcggagccgatgaccttgaccgcgccgttggaggcttccttgaggtacttgccggtgccggagatggtgccgccggtgccaatgccggccacgaagtgcgtgaccttgtggtccgtagcctcccagatctcggggccggtggtgtagtagtggctcagcgggccgttcgggttgtcgtactggttcgggcggaagccgccgggaatcgtgttggccagtcgttcggcgacctggtagtaggagcgcgggtcgtccgggccggcgtcggtcggtgtgacgatgacttcggcaccgtaggcgcgcagcaccgcgcgcttggattcggaaaccttgtccggcagggtgaaaatcgtgcggtagccgcgctgctgggcgaccagggccaggccgacgccggtgttgcccgaggtgggctcgacgatcacgccgccgggcttcagctggccggactgttcggcggcgtcgatgatgcgctcggcgatgcggtccttggaggagccgccggggttgaagtattcgactttgacggcgatggtggctttgacgccggccgcctgcgggatgtggttgagcttgacgagcggggtgttgccgatgagttctgcgaggctgttgtggatggtcatgtgaagtccttcgttgctggggttgtgggggttttgctgcgttgcgttcgtgaaccgacgttcccagacgaatggactgtggctttggtttgaaaatcgagtattcccgctcactgtacggtgaatccgaaaagtgaaccggtttttcatgttaaccacggctcgcgcattacacgattacgcttgtgccatcggatacatgaaaagtatgcggcagattcgccgcgattcgaatgctccatctcaagttatgcgtcactgaccgctcgcccaggggcgtcggttagcgacaacaacatgagataatctgcatgcctcacaccatagcacaacccgcgacaagcgcgtgtcgccggcggactgaggggagtacgacggcacccgtaactcccctcagcctcactgcattcgacagctcccctcagggaggggagccaaaaagatctataacgaggctgcctcgatgagctgacgggtgtaatcggattgggggttgccgagcacttcggcggtgggacccgtctcttcgacgcgcccgtcgtgaagcacgaggatgcggttggcgatgtgctgcaccacgccgagatcgtgggagaccatgatgatggcggtgctcggccgggcctcacggatagcggcgaaggtgtcgaggatctggatgcgcgcggccacgtcgatggcgctcattggttcgtcggcgaggattaccttgggctcgttgatgatggcgcgggcgatgaccacgcgctgcgcctggccaccagacaggtcgattgggtaccggttcaggaagtccgccggttcaagacccgccatggtcagagccgcgaccacccgctcgtcgatatcggtgttgttcagatcacgtcgctgcagactcagcggttcagccaccgatttggcgacttgccaacgcgggtcgagtgatgagaacgggtcctggaacaccagtcccgattcgcggcgcagggtcgcgaatcccggcgattttcggccgccgacaatggattggctctcgtattccacgctgccggagtccgcggattccaagcccagcataatgcgggtcagcgtggatttgccggatccggagccgccgatcacggccagacattcgccggcgtggacgtcggcggagacgtcgaagaggacttggtggcgtgcggtgcgcggtccgaaggatttggtgatggagtgggcggagaggagtggcacactgctgttactcatgcgaatcctccttgggggtgtggagggtgagggtttgggcggcggcgaccaagcgttgggcttgcggcgtggtcggtgcagcaagcaggtcggcggtgggtccggattcgacgatgcggccggcgtccagcacgtagcagcgggtggtggcacgcgcgagtacggagaaatcatgggtgatgaacagcatggatgcgccggcgtcgtccaccaacgaggtcagcaggtccacgatctgacgttgcgtgatggagtcgagcgcggtggtgggttcgtccgcgatgatgaatcgcggtgaggtgatcagcgccgtggcgatgcccacgcgctgctgttggccgccggacagttcgtgcgggtatgtgccggccacgtcacggtccagtccgaccttgtccagcatggtattcactcgctcagcacgttcggccttggtcagatcgtaatgcagtctcaacggcaacgcaatctgctgcgccacggtcatcaccgggttcagcgcatgggccggattctggaataccgtacccacataccggccgcgcagatcggcaagcgtatgctcgtcggcgtacgcagcggaatcgtggcccgaggtggcaaccctgcgttcaccggcaacatggtgcctatctgccgcgccgcgttcttcgtcagatcctgagtcatcttcctgcccatgccgcgactcggcggtttctccggacaggatggcggtttctcccatcgtgatggtgccggacagcacggcctcgcgcggcaacaggccgagcaatgacttggcgatcatcgatttgccggagccggaggaaccgatcaggccgacccgttcgccgtccgcgatggacagatcgacatccgtgacaatcggtttgccgccgatagcaatattcagcccgtgaatttcaacgctcatcatccgtctccttcggcgctgccactgcggactgcgccgcagtgtcaccggctcccctagccaccggcacaaccgcaccgggcacagtcatctgccgcaacgcgggattagccaccgggtcggtggcgtcgcgcaacgcgtcgccgaacaggttcagcgcgaccaccaccagggtgacgatcagaccgggccacaccaccgtcaacggaaacacgttgatgagtttgaccgaggtggccagcgaatggccccagctcggcacccccgcgccgacgcccacgcccagataggtcaggcccgcctcggccagcaccgaggtgcccgccgacatcgacgattgcaccatcagcaccggcgtgatgttcggcacgatgtgtctgaccagtacgccgaacccgctggcgccgttcgcccgggccgactgcacgtatcccgagcgggcggcgagcagggcggccggacgggcgacgcgcgccagatgcagcccgtagccgatggagcacgcgccgatcaccacggccgcggatgcgccgaacggcacggcgagcagcagggcgatgagcacggtggggatggagatcagcgcgtcgaccacggcgaccgacgccgaagcgagcgccgaagaacgggcgaccatcagcccgaccagtaggatgccgatggcagccgagcagacaacggtcagcagggcgatggcaaggttcgtacgcgatccggccatcagccagctcagcacgtccgcgccggtgccgtcggtgcccagccaatgcgcggacgacggcttgtcccacacgtggtagccgtcggtggccagcagcgactgcggggtccagaacaacgacaccagggcgacgaccatccacaaccccagcacgatcagcgagtagcggccggtgccacgggaccagatggtgcccagaaccacgcccgaacgacgccatcgaccattgcgatcaaccatcattcctcctttccggcggccagacgcgggtcaagcagcgcgtgcagcagatccaccgccaggccgatcagcaggaagaacgcggcgagcaggaacagctcgctttgcacggccaccagatcgcggttgccgacatcgcccaccagcagggcgcccagaccgggcagggcgaacaggttctccaccaccatcacgccggtgatcatcgaggcgaacgccagccccaccaccgagacgagttgcggagccgccaaccgcaatcccacgcgcaccaacgcctgggtgcgggtcatgccgcaggacatggccatatcgatcggacctccctcatcggcgatgccttccagaatggagcgcgtgtaacgcatgatgcccgcaccggacacgaatccggtggcaagcgccggcaggatcagggacgagaccgcccgcccgggagcgccccacccagcggcggggaacccctgcgagggcagcagaccgacaaggcccacgccccgtgcgaacaggaggatgagcagcaggccgctccacagggccggcacggcgccgcccacgatggacagcacgcgcaggaaaccgcgcacggccggcgaccgggagatcacggcggcggcgcccatggacaagccgagggtgagcgcgatggccaggctcatcacgatcagcgggaacgtgatcgtcgcacgttggccgacctgggaggtcaccgcccgcccggtcagcgccgacacgccgaggtcgccgtgcaacagccctccggcccagtcgagatactgcacgacatacggccgatcaaggccgaattcggcgcgcagggccgccacacgcgccggcgatgcgttcatgccggccatcacgaccgccacgtcgcccggcaggatgcgcagcatcgcgaacaccagcaccgaaatgccgaacagcgccgccgcgaacagcagcaagcgttgcatcaagaaccgcataacgcctcccttatcgattccctcgccaccgcccgtggcgtcaccggccggatgggccgtccacggtcgggcgcgcagcggaatcgctcccgcgccgcgcccgagcgatgggttccgggactacttggtgtaggtgatccgccagaggggcagcacggtctggctcaggttctgcgggaagccgtccacgcccttggcgtaggcgatggtgaccttccagctgaacagccagtcggccggcgcgtcctcggagacgatcttcgcggccttggccagatacttcgaggcctcgtcatcggaggtggcctccagcgccttggcgtacagggcctgcacgtccttgttgtcgtagtggaagtagtagctcggcgtggtccatccgtagaagtcgtggctttcggcatggtccacgagcgaaagatcgtagttgccgttggcgtgcacgtcctgcagccaagtggagaactccacgtagttgatcttcaggtcgatgccgatgggcttgagctggctcttgagctggtcgccgagctcggtgccgtacacgttggcgtaggtgagggtcaggtccagcggcttcgactcggagtatccggcctgctccatgagcttcttggccttggccacgtcatgcgggtacaggccgctcagatcctcgtaaccgggatcgaccttggggatcggaccgccgaggggggcatccacgccgccgcgcgaggcgatgatctgcttatggtcgatggcgtatcggatggcctggcggacacgcttgtcggagagcttgtcgttggccatgttgaaggcgagcacgaacttgtcggaaccgtcaccggacttgaccacatagttcggatccttgcggaacggatcggcaagggtggcggagatgggcgaaagcacctgcacgtcgccgctcttgagggcgttgatgctggcgttctcgtccggcaggaaccggacgatcacgttctcggtcctcgccttgtgctcggtgccccaatacttggggttcgccttgagcacgatcttgtcgttcgggtcgaaggagaccacggtgtacggacccgagcccaacgcgccgttcttctgatcccaggtggcgtccttgtcgtagaccaggccgggacggctggtgaggtaccacagcatgttcgagttgggcgcggagagggtgagcctgaccgtgttggcgtccacggcctcggccttgtccaggctcttgacctgctcgtagtcgtagtacttctgggccttgagctcgttgatggaccacgccacatcctcggcgtcgagcttgtcgccgttggagaagttcatcttctcgttgaggtggaacgtgtaggtcaggccatccttggagatctcccagctcttggccagaccggggtggaccttgttgtccgagccgcgcgagacgaggccctcgtacacgttgccgatgaggatctgctcaagggccgaacccgactggtggcggatgtcaagattgaccggggcgagtttgaggccgacggccacggtatcggatcggctggccgagccggaggcgttcgcgtccttgcccttgcctttccctccgaagacggtgacgcccacgatgagcgccgcggccacgacgaccgcgatcagcgtccacagccaccatttcgggccgccgttcttcttgtctgatgatttcgcgcgcgcgttcaggctcgcgtcggtgctggcggcttgattcgcgccgtcgatgttcctgtcttcggttgcgccggactcgccgtgcacaccattgttctgggacatggatactccctgatgtattcgggcatgcttacgcccgaatatggtttcgttgttatcttgcgtggttgaccgcccattcgggtcgatcaccacgttctactatatccccggacacgccggaggcaatggctatactggattgcggcgccgacggagggtccgcggcgaccacaacacgcggcgcatcgtcgggcaacgacgcgggaagcgctggcgtgggcacacgtgcggccttggcataaggccgggaggcagctatggcacatattcttctgggcgtcaccggcagcatcgccgcgttcaaggcctgtcatctggcatccgattggaccaaggccggccacgaggtgcgggttatcgaaaccacagcggccgaaggcttcgtcactcccctgacattcacctcactgacccatcaacccacccgtaccacgatgttccccgcttatccggccgcgcacggcgacgtgacggccaatccgaccgtgccaacgaccatcaatcatgtggccgatgcggcctgggccaatctgctggtggtggccccggcgagcgccgacgtcatcgcccgcatcgcctgtggattggcgaacgatacgctgacgtccaccattctggcctatgaggggccgaagatcctatgcccggcgatgaacgtgcatatgtacaacaatccggccacgcagcgcaatctgaaaacctgcgccgaattgggctggcagattgtggagccggaggaaggcaatctggcttgcggcgacgtgggacgaggccgtatggaagagccggcgcgcatcgaggaagtggccgctcggctgctggcggatgcgcaggatgaccaggctccctcatcttccccgctcaaggggctgcgcgtgctagtcactgccgggccaacgcaggagccgctagacccggtccgctatctgacgaaccattccaccggcaagatggggtatgcgattgcctcggccgcagccgaatttggtgccgacgtaacgttggtctccggtccagtcgccttgaccgcgcccgatgcggtggatgtggtgcgcgtcacgaccgcgcaggatatgttcgatgcggtggccgacgccttcccggcggcggatatcacgattatggccgccgccgtgggcgatttccgcgtggccgagattgcgccggagaaaatcaagaaggccggccgcagcagcatcaccgtggagctggtttccaacccggatattctggcgtgggccggcgaacgcaagcgcgacgacggctcgcagatcctgtgcggattcgcgatggagaccgagcatctgattcgtaatgcggagaagaagctgacgtccaagcattgcgacatgctggtggccaacaatctgcgcgacgccggtgccgggttcggcaccgacaccaacgttgtcaccgtgctcacgtccggagcggaggatgccggcaccccgaagatcgagcattgggacaagatggacaaaaccgtgcttgcgcaacgactgttgctgcggctcgcagcgttgcgttccggcggcgcgagcaatgtcgatgacgagaacaaggaggcctgacccatgctgatggcggtcgatatcggcaatacgaatatcgtgatcggttttctggagggcgaccgcatcgtcggctcctaccgcatcaccaccaaggcgacgcacacctcagacgaatacggtctgatgatcacgcagttcctggctttgagcgattacacggccgacgatgtggacgatgtgatcgtctgctcggtggtgccgaaggtgatgtattccttccgcgcctcgctgatcaaattcctcggattggaaccgatggtggtgggccctggcgtcaagaccggcatgaacattcgtctcgacgaccccaaaaccttgggctctgactgcatcgccgactgcgccggcgcctaccacacctatggcggcccggtgctggtggccgacttcggcaccgccaccacgttcaactatgtggacggttccggcacgattcgctccggcttcatcaccacgggcatccgcaccggggccgaggcgttgtgggggcagaccgcccagctgccggaagtggagatcacgcaaccgcagtcgattctggccaccaatacgcgcactgctatgcaggccggactgtattacacgttcctcggtggcattgagcgcacgattcagcagttccgcaaggaaatcgatgagccgttccaagtggtagccacgggagggctcagccgcattttcaaaaacgacaccgacatgatcgacgtctacgattcagacctgatcttcaaaggcatggcatacatctactcgcgcaatgtgaagtaacgcggtgtgcaggcatcggccgcgcatagcgcagtcaattccgtccctccccgaaaaacctactcaaaaccctacttaatcgtaaagccctgattgaggccgtattctcggaggtctttctgccatcgggccaggccgccggagagactgactttcttgccaggcttctccaatggttcgagcgggttgccttcctcgtccttcatgcccatctcaatggcttcctgtcgctgctgataggcgtggaaactgccggaccactcgtatgcctggcccaccgtcgatttgaagtcactgcgcgcatacacttcgaatggcagatactggtatccgaccgacacatcctcggcggcctccgacagtacccggttgaacttctgcccgccgaaatacgggatttcaatgccacggtcattggtaatcgtggttttatccagaaaatcagcggaattcagggtggcgtaatcggccgggaaggcaccgccgtctacacgcgcgctaatgccttgggcgtcatgcgccacaaagtccacgaaacgataggccgcatccggcttacgggtcagttgcaacacggtcagcgccgagccgccattttcggcgttggcaggctgcccaccataggtgggcatgggagccacgcgccacagaccggccgcgcccggcacattggacagcagcagcgacggcatccaagccccagagaacacggaggcgatggtgccggtgcccactctgcttttccaccgatccgaccatgtggcggaggtggtgtcaacaagcccctcatcgatcattttctgccagaattcggtgaaccgttgggtgccggcatcctcatccaaatcgatggtcacggttttgccgtcggccgacgtgtggaacggctgaccaccggcgagccagaccatcgcgtcatagaaactgccgtcgcccgagtcggcggcgatatacgcgccgatctccttgagcttttcggcggcctcgtaatagtcatcccaagtcttgatcttggtggcgtccacgccggcttggcggaacacgtcttcgttgtagaagaagcccatcgggcccgaatccatgggcagtccataggtacggccggcgagctgcacggacgaccatgtgccgagggtaaagaagttggaataatccgagccgattttgtcggtcagatcaagcaattggccggagaccgcgtactgcaacagtgcatagtattcgatttgagccacgtccggcgtgccgtaaccgtcttgaatggcggtattaagattgccgtagccggagatattggtccatttcacgcggatgtccggattggctttttcgaaacggcggatgacctcccccatgctcggttcccagctccatacgctgatctccgtacggttgtcgtccgtggcctgcccgcacgaggccagggatacggaaaggatggcagtcactgctatggttgccattcttttgattcgctgtccgatcactcgcatggtgacgagtgtactaggcggggcttaaaacggtaaaagccccgtgacgggattcgtcacggggctttgtgtatcgaacggggtcgcgccggcggccccttcgcgattgcgaatcaccacgtgcggcgcgttgacgccgaacaaacgttcacccaacagtacgagcgggtaatcgccctccaaagctgcgatatcgtcaaccgtcatcatcagagggcttaagatgagcccatccgcgctgtgcgtgcccatcgatgcgatgctttccagcttgcgggcacgattgttggtggtggattccacgatgacgccatagccatgttgccgggcctcggccagaatatcctcggcgagttcggagaaatacacctgccgcagatcgggaatgaccagcttgagcaaccaggtgcgcccggaacgcaggtttctggccgacgagttgactttgtatccgagcctgtcgatggcttccgcaatacgcgcggccatcgcctcgctcatatatggctgtttgttcagaaaattagacaccgaggctaccgaaacaccggcctcatgggccacgtccgccatcgtcactctgtttttgcctcgcacggtgaccaccctacccgactttgctggagatacgaaaacgactcccctgctacgatgagcagcaagggagccgttgggtaattaggcgctatgcgcgttttacagcttgacgacgagtacgccgttgggctggatggcggccgtgtgctcggactcgttgacctgggccagcgaggcgaccagcggttcgccttccacgtccacgaccgcaacatcgtgggtgcggttgaacaggaacacgaagtggttctcgccagtttcgtccgcacgctcgacgcgcagcacttcaccgcgatcgtcctcagccgaagtctcgatgccgagttcctccagcagcacgggcaggctcttggccaaaccctcacggccgagacgggcaccgacgtatgcggccttgccgtcgccgaagtcgttgacggtgatggcgggagcgccgtcgaaaccggtccacttatccgccttgaaggaggcgaccacgtgagcggtatcggccacggaggtgatcacgtcggcgaaatcgtgcgccacggttccgttgtccaagtcaaggtggtccatggcaccggggaaatcgttgcccatcggggcgaattcctcaacgcgcacacccaccacgtcacggatggaaccggggtagccacccagccagacgtgatccttgtcgtccaccagaccggtgtagtaggtcacgaacagcttgccgccgttcgccacatactcgcgcacgcggcgcgtggtctcttcggacaggatggtcaggctcggcagcacgacggcttcgtactcgtcccaagggccgcgaaccggcaccacgtctgcggtcagaccgttgtccgccagcgcgcggaaccacgcgaacggctcgctacaatggcgcacctcctgagtaggcgtggcggtgtgttccgtagcccattgggactcgtaatcgaagacgacggcgaccttggacttgaccagcttggtgctcagcaggccctcgtcagcaagcttgttgaggtcggcacccagctcgcacacatcgcggaagatctgggagtcggggcccgcgtgaggaaccatcgaagagtgccacttctcggcaccggccttggactggcgccactggaagtagcagatggcgtcggagcccatggccaagtgagccagggagtcgcgcaccaattcgccgggttcgacgcgatagttgatcgggcgccaattgacggcggaggtggagtgctccatgaggaaccacggattcttgcgggcgatgccgtcgcacagggaggccgagtaagccagctcgtcgaagtgagcttcgccaggcgtgaagtagtgatcgttggacacgaagtccacgtcgtaaccccacttgtcgtaatcgatgacggcaccgccggcggagaccatgaagttggtggtctgcggcttgggggcgatctcgagcagggcatcgcgctcggccttgtaaaagtcgagcagggcgtcggagctgaagcgcttccagtcaagcagcttgcccgggttcatgaagttgccgtcgccgatgaagcgcggcgggatgatctcggaaaaattgttcatgcgctgcgcccagaatgcggtgccccaggcgtcgttgacggcgtcgatggtgccgtacttcttctcgcaccacttctggaaggcgcgctcggcgtcttcggagtagtcgaagcggttgtggcagccgtactcgttgctcacatgccaagagaccacataggggttgtccttgtagtgctcggccatcttgcggcacaagctgagcgcgtagtcaaggaagaccgggctggtggcgcgccagtgctggcgggcaccgggctggcagacgtcgccgcggtagtcgacccagaggatctccgggtgggcctgggtcatccacatcggcggggatgcggtgccggaggcgagatcgacggcgatgccggccttgccgagcttgtcgatgacgcggtcgagccaatcgaagtcgtacacgccttcttcgggctcaagcttggcccaggagaagatggctacggagacgaggttgacgccggcctgctgcatgagggctacatcttcgtcccacacttcctcaggccattggtcggggttgtaatcgccgccgtaccagatgcggggcttgttgcccgcaagcggctgcggccacttgaactctttacgttccatgatgattcagctcctttattgaattttatcgataatctgcgtccgcgggaataaacagcccacagggctgtttgcctaacggctcagctcgtcagaggggggcttggcactattttacctccctctgatgaggaaggttgtctcggcggagccgggacggagggagggaccccgccgcgaggcggtgaagacaccgcgtcggcggagccgactccatcactccttgacggcgcctgcggcgagtccggactgccagtacttctgcaggcacaggaacgcgatcaccagggggatgatcgtgatcagggagcccgtgatcaccaggttctggatcgcctggccgcccgcggtcgaggcctggtccttccactggttcaggccgatggtcagcgggtaccagtccgcgtccttgagcatgatcaacggcaggaagtagttgttccacgtcgccacgatcgtgaacaacgccgtcgtcacgatgttcccgatactggccaacaacacgctgggggcgagcacgtcgatgtccgtgcccaggaaatcgttcaacgaacccaccaggccgtacttcgcgccatacacgaaaccccagatcaacgtcgacaccaccgccggcaccgcgtagggcaggaacgtcgagatacggaagaacctcgtgccatgcagcttcatcgaatccaacgccagggccatcaaagccgacaggcacagcatgatcggcacctgcacgcacgtgaacagggccacacgaccaacactgctccagaactggccatcacccaacaggcgcgcgtagttctcgaagccgacgaacttggtgccgccgatcatctgcttcttgaagaacgaaatataaacggcgtacacgatcggcacgatgaacacgaacacgaacaccaccgcaaaaggccacatgaatttccatccacgccaatcggccttgtgcttattcacacgagccttgcccgaatgcacgggcgcagctgcgatatcggctgaagccattcccaacccctctccttcgaaggttgaccaaaatgtttgcgttatcatcataacaccatttgtaacattgtccaatcgtgttgagtaccgtgttgaattaagggtttctcagtcactctgctacaatggtcacgaagacaacgatgttatcgttaccgtaagcgcccctaagataagcgttgtaaacgaaacaccgacattaatgagtcaagcgagggtgaaatgtcgaggccaacacaggtgtccatgcaagacatagcgaaagccgccggcgtttcgccacagacagtgtcccgcgtggcgaatggcagcgatgcggtgaaacccgaaacacgccagcgtgtcgaagctgcaatgaaacgccttgggtatcgtccgaattatgcggcccgagccctaaagcacggccgcttccaggatatcggcgtggtgatgttcaacaccaccgcgttcggcaacgcccgcatccttgattctattgtggccaacgcggccgatgacgattattcagtcaccatccagaccatgcgccacggtgcggaacgcacgctttccgccgccatcgatcgcatgcagcgtcagccggtggatggtgtcatcgtagtgctggaggaacgcatctccgatttcgtcggatacaagcctccgcgagaacttccagtcgtgctcatctgcgaatccgccgccgaccactgccccaccgttgacgccgaccagtatggctgctcgaccgctatcgtcgattacctgatgagcaaggggcacaagaccgtctaccacattgccggaccgtccacctcgcgcgccgccgaaagccgcgcccgcggttggcgagaagcgttggaacaaatgggagcacgcgtaccgagcatgtacatcggcgattggtgcgcggattcaggctaccaggccggcgtggcgttggcccacgaccccgactgcacggccatctacgccgccaacgaccaaatggcatacggcgcaatgctcgggttgcagtcagcgggcaagcgcgtgcccgaggatgtcagcatcgtgggcgtcgatgattcgctggtagatatggttccgcgcttgaacctgacgaccatgaagctgcgctttgacgacattggcgccaccgccttctccatggtccgccgtcaatgcgaaggcgagaagataccggtcggcgtcaaaaccgtaatcccgccggaactgatcgaacgcggttccgtgcgcgacatcagctgacgagcggcatgtgctggcatccactggtacctgtcagtgattcacctgccagtgatccataggcaattccgcaccgaccaatcgactcggttgtgcaatattctgcacatttccaactatgtgcagaatattgcacactttactatactgtgatatattttgcacatgattgtcatggatatcgccgaatacgcgcggcttatcaaggatgaaaggcaacgccagggcatcagtcagaccgacatggcccaacggctgggcgtgtcacgtcgctggctgatcgaatttgaacacgcccgagtccccaatcccggattctccaccattctcagcgctctgactgagcttggcttgtcgctggatgtctgcaaaaccccgcagcccgccgaactctatgaatggtgacaccatgagcgaaaacactctcaatgcatttctcggcgaaacacccatcggccagtttcgaagaacaaacgatggcagcattattttccaatatcacgattcctatcgttggtcgcaatcacccacaccaatatcgctttccatgcccattaccgcagccgaatattcaggcgacatcccgcgtaatttccttgaggccctggtcccggaatcccctcaggcccgagatgaagccatgcgattgcatcatgcccgatcgacaagcgcatttgatctgttgcaagccatcggattcgatgccaccggcgcattacggctgtccgccgacccgcacttgcccatagatgacgattcgcttattccaatcagcgattcgcagatcgcgaatcgactacgcgcagccgcccccacaggcatccagtccgcaagcgtagacgagcattggtcggtcgcgggacagcagggcaagatcgcactgaggaaccgcaatggatcatggttctccaccactggaatcgcgcggacgactcatatcatcaagcccggcataccgacccttccacaccaagcattcaacgaacacatcaccatgcgcattgtggaggcgatgggaatacccgtggcccacacctcttttcacatctttgatggggtcccagccatcatcagcgagcggtatgaccgtatagtgtccgccaatggtacggtgacggccctgcaccaagaagactttacccaagcgctgggcattccctcatcgctgaaatacgaggaacacaacggcccaacgtccaatgcatatgcggaaatgttgcgcaagcacggtctgcccgatcaggccgaaagcaatatccgagccttcaccgacggcatcctcgccagttatctcgtcggggcaacagacagccacgccaagaactactcgctattgctcgatggcgcgtccgtgcggcttgccccgctctatgaccttgcttcggtgttcccttatttggggcatggcaagcagatcataaatgccactttggcgatgaacatcggcggacgccgagatcttcttcaattacgccgcaaacatctggaacgattcgcacagcggatgggattagatgaggaatccgtgattttacgattccacaccttggtggataggctgccggaggcattcgacagcaccgtgcaacccgctcacgacgttatcgcgagcattggtgcgcaggaattcatcgatagctatcgcaagcgcatcatgatggtgtacgacgatgcaatgagctggatggccagtcgaaagggacagtgattcggacgggcggggattggtctcgccatccccccctaagaaatcagatcttaagcggcacacgggaaacgaattcgcgcttctcgcctgttattggatcggtgaatcgtagcacacgcgccactaattgcagcggctggctgaaatcgtcgtaggggcgtgtctggatgcgcgggtagaagtcgtcgcccacgatgggcaggccgagcgaattcatgtggacgcgcaattggtgggttttgccggtgcgcgggtggagtgtgtagcggcagatggggtgatttcccggatggggaccaccctccggcgcttcgcgccacctcccgccagcgggagggaaacagaggtcaccgcgctcgatgagggtttcggcgttggccaaacccggttcctcgaatgcggccatcgtgccgtgttccttggtgatgtgcgatcggcgcagcaatgggaacgggcgtggcggttcgacctgcatgatcgtgccgaatcgtgggccgctgatcggccggcagggtgccaggcattcatagatcttgacggcctgccggttctggaacagcatctgatacgcgccgcggcaggccgaatcccgcacgaacaccaatacgccggcggtcatgcggtccaatcggtgcgctggcgtgatgtccggctcccccagccgctcacgcaatcggatcagcgcggtctgccgataccacatgccgcgtggcatggtggccagaaaatgcggcttgtccaccacgatgatccgctcgtcctcatacagcacgtccatctcaaacggaatatgaggctcgtcaatcacataccgatgtggcttactcaacggtcacggacttggcgaggttacggggcttgtcgacgtcatagcctttgagcttggccatgtccatggcgaacagctgcagcggcaccacgtcaaccagcgggctcatcagcgttgggcaggcggggcgccagaacaccacgtcagcgtaccgttccacatccgggtcgccctgctcggccacggcgatgatgtacgcgccacgagccttgacctcctcgataccagagatcaccttggcgtgcaacacattgcggccgcgctgcggcggcacgatgaacaccacgggctcaccctcgtccaccagcgcgatcggtccatgcttgagctcgccggccgcgaagccctcggtgaacgtgtaggcgatttccttgagcttcaacgcgccctcaagcgccaccgggtagcccacgtggcggccgaggaacaagaaggagttggcgttcaccatgcgctcggcggccgcctggatggtcttgggctgggtgtcgagcacccactgaatcttgcgcggcatgtctttcagggagtcgagcatctgatgaatctcatcgcggaacatcgcgcccttgacctgcgccagatacaggcccagcaggtaggcggcggtaatctgcgccacgaacgccttggtggatgccacggcaacttccgggccggcgtgtgtgtagagcacggcgtcggattcgcgcggaatggaggcaccctgcgtgttgcagatggccagcaccttggacccctgttcgcgcgcgtggcgcagggccatcagcgtatccatggtttcgccggactgagaaatggccaccacgagcgtacgcggggtcagaatcgggtcacggtaacggaattcgtgcgcgagttcgatttccacggggatacgcacccagtgttcgatggcgtatttggctacctggccggcgtagctggcggtgccacaggccacgacgatgattttgtcgatggccttgaagtcgtgttcgtcgatacgcacttcatcaagggtgatgtcgccattcgtgtcgaagcggccaagcagggtgcgctgcactgcggcagggtcttcgtgaatctccttgtccataaaggaatcccagccgcccttttcggcggccgaagcatcccaatccacggtgtaggtcttcgggttttcgaccacgttgccgttgaaatcggcgacgatgaccttgtcggcggacacgcatacggcctgatcctggtcgacttccatggcgcgcttggtgtaggccacgaatgcggcgacgtcggaaccgaggaagttctccccctcgccaaggcccacgaccagtggcgaatcatggcgggctccgaccacgatgtccggctggcggcagtcggtggccagaatggtgaacgcgccttcaagcatgcgggccatacggcgcacagccttgaacaagtctggcttgccttcgtccgcgataatcttgtccacgatcttgccgagcagcttagcggccacctcagtgtcggtggcggaggcgaatcggtagccttcggcttgcaggtcgaaacgcagctgagaggcgttttcgatgatgccgttatggatgatggccaccttgccgtccatgctggtgtgcgggtgggcattcacgtcgctcggctcgccattggtggcccagcgcgtgtggccgatgcccaccgtggcgagcggcatcggcttgcgctcgatgtcttcgaccaggttcttcaaacggccggccttcttgcgcacgaccaccttatccatgccgggcgcggtcagcgccacaccggccgagtcatagcctcggtattccagacgttccaggccttgcaggcagacctccaaaggcttgccgcatgccgtttcaatatttcccgcgtatccaacgattccacacatggctcaccagcctagcggacgattattgcgcaaagcgaatccaacccgccgcctttgcaggattggaacatgccccttcgtgaaaagcgtacgctgagttcatcagcgtacgcttttggagctgcaacaacgagccttcctacagcacgtgctgtaggcggagtcgtaaagcggggagcccagtgggctccccgtaggcgacgccgaagcatgacagtgctgaggtaatataacagccttcctacagcacgtgctgtaggcggagccgtaaagcggggagcccggtgggctccccgtaggcgacgccgaagcacgacagtgctgaggtaatataacagccttcctacagcacatgctgtaggaagtccttaaacctaggctcggtggggtggtcgatgatgtcggggccgcccttttctacgactacgccgccgtccatgaacacgatctggtcggcgacttcgcgggcgaagccgatttcgtgggtcacgcacaccatggtcatgccttccttggccaaggaacgcatgacgttgagcacttcgcccaccagttcggggtcaagggcggaggtcggctcatcgaagagcatgatctccggcttcatggccagagcacgggcaatggccacgcgctgctgctgaccacccgacagctgggaggggtaatagtccatgcgatcgcccagaccgacgcgctgaagctcggccacggccaggtcacgggcggctttcttggactggtgctgcacgtggatcggggcttccatcacgttctccagcgcggtcatgtgtgggaacaggttgaagcgctggaacaccatgccgaggcgagagcgctgtgcggcgatctccttatcgtccagggtctgcagcatgtcctggccgtttttggtcacgtgcttgtagccgatgagttcgccgtacacctcgatggaaccgccggtcagggtttccagctggttgatcagacgcaggaacgtggacttgccggaaccggagggccccagaatcacggtcacagtaccgggcataacggttagatcgatgcccttgagcacatgcagcggcccaaacgccttgtgcacctgcacggccttgacagcaggaatcacggaaccgtcagccgccttgcgcacgaccggggcaacactggtgatgtcattcgtagtcataatcgcgctcccgccttatgcattcaatccgacaaatgtggtctggttgagcttgtccacgtcatccttcggttcaccgtcggtcttacccggcaatggcgtctgcttgcccttggtgcccaccggtcgggcattgaagcccttgccgaagtgcgcctcaaggcgggactgcacaaccatcagaatggaggtgatcagcaggtaccagaagcaggccacgagaagcagcggaatcggcttgtagatacggttggcgatggcgttggtggcaaactgcaactcgagggtgaacggcacggcggtgaccagcgaggtggtcttcagcatgccgatggtctcgttgccggtgggcgggatgatgatgcgcatggcctgcggcagcacgatgcggcgcatgatgagcgtgcggttcatgcccagcgccttggccgcctcggtctggccggggtccacggcttcaaggccggcacgcacgatttcggacaggtaggcggcctcgttcagggccagaccaatccatgcggcgttgaatgcggtgaccaccacgttggagtcgatgctccagaactccaccgaggtgaacggaatgccgaggctgatcttaggaatcagcacggcgaacagaccccagaaaatgagctgcgtgtacacaggcgtgccgcggaagaaccagatgaagaaccagctgacgccgcgcagcaccggattgatggatttgcgcatgatggcaagaatcaccgacaggatgatcgccacgaccatggagatcacggtaagctccaaggtatagcgaatgccttcaagcacgttctcgttgaacaggtacttccagacggtgggccaatccagtcgcggattggtaatcaagccttgaatgagcatcgcggcgagcagtaccacgatcactgcggccacaatcgggccggggcgcttgaccggcaacgccttgatgcggttggggatgttcagcccctcaccgtcgacttctttcttcgccataatctggttccttggatgtgttaggcagcctgaactgcaagttgcaactagcgttgaaccttagtgcacgaatggggcgactgtgttacaaacagtgcgccccattcgaattttcgcgacagcttgtcgactattcgacggccgggttgatttcggccttgtccagtgcgccggattcgacgccccagtgctggagaatcttagtgtaggtgccgtcgtccatgagcttttgcatggccttctgcacggcttcggcggtctgggaatcgcccttcttgatggcgatggcgttcggcacttcatcgaagtccttgccgagctgttccagctgaccatcggtctgggcgatggcgtagccgacaaccggggaatcggcgaagaagacgtcggccttgccggtcaccacagcggtggtggcgtcggtctgctgcttggaggactggatggtgatgtctttcttgccgtccgccttgcactgcttggcggtcttgttgatggcctcttcctcgacggtgccggtctcgacggcaacgttcagaccgcacaggtcgttctcatcgacgttcttggggttgcctgtggccactgcatagcccatgcctgcggtgaagtaggagacgaagtcgacggattccatgcgctccttggtgatggtgaaggcggcgatgcccagatcgtacttggagccgatggccggaatgatcgtatcgaagttggaggagacgatttcggtctcgagaccgaagatgttgcccatggcgcgggcgagatccatgtcgtagccgatctgggtcttgccgtcggcgtcgaggaattcggccggggcgtaggaggggttggtgccgatggtgagcttgccgtccttggtcacggattcaggcagcagtgcggcgatggtgtcatccttctccacggagctgacatcgtagctggtgatggtggcggcatcggagcccttggcggaatccgtaccggcatcggccttgtcggaggtgccgcaagcggcggtggcgaacagcatggccgagctcagtgcaatggccataatggacttcagtttggtggactgcataatcgtttcttcttctctcttacgccgcttcaacggcaacgatcaacggttaagcatatttatacactacagtgcatacatatacaaaaagactcccgccgcagggcaacgggagtcttcatagtaaccgaaactactcgacggacgggttgatctcggccttgtcgacggcgccggaagagacgccccacgtgtcgaggatcttcttgtacgtgccatcatccatcagcttctggatggccttctgcacggcttcggcggtcttggaatcgcccttcttaacggccacggcctcaggggtcacaccaacgtcctcgccgagggcctcgagcgtatcaccggtctgcttgatggcgtagccggcaaccggcgtatcggcgtagaagatatcagccttaccggaagccacggcggtagtcacatcggtctgcagcttggaggactggatgtcgatggcatccttaccgtccgccttgcactgctcgttatccttgttgacttcctcttcctgggtggtaccggtctgcacagccaccttcacgccgcacaggttcgaggagtcgaccttgttcgggttgcccttctgcaccacgaacgtggaaccggccttgaagtaggtcacgaagtccacagcctccatgcgttccttggtcacggtgaaggaggagatgccgatgtcgtacttggagccgacggacgggataatcgaatcgaacgtggaggagacggtgttttccttcagtccgaacactgcggccagcgccttggacaggtcgacatcaaagccgaccggggtcttgccgtcctcggccaggaactcggccggggcataggaagtatcggcgccgacggtcagcgtgccgtcgccggccacggaatcgggcagcagtgcggcaatctcgtcgtccttctggatgctgctggtgtcgaagccttgaatcgaagtgctggacgagtccttggatgaatcgccgctcttggatgcggtgtcggtgctgtcagtcgtgccacaggccgccacggcgatcagcatggccgcgctcagggcggcggccgcagcggattgtattcccttgcttagagacattggatttcctctctccggatagtcagctgggcgggtatgtttcccagatggttccagagcgtaggagtgcaatgctacggaagcgttaatcgtgggcgaaatgacccacaacgcggacatcctacccttggctcccctccggaggggagccaagaggcgggactagtggcgcatgttggcgtagcgcatggcgcgtagggcttcgcgcttgtcctgctcttcgcgcagggcctggcgcttatcgaattccttcttgcctcgggccagcgcgatctccgccttgacgcgaccgtccttgaagtacaggctcagcggcacaatcgtgtatcccttggcctcgatgccgcgggcgagcttggtgatctgcagtcggtgcagcagcagcttgcgcttgcgcttgggcgcatggttgttccatgtgccgttcaggtattcggggatgttcgcgccctccagccacatctcgccacggcggtcgatggagatgaacgcctcggacagcgatgcgcggccttcgcgcaacgacttgacctcggtgccggtcagggccagccctgcctcgtacttgtcttcgatggcatagtcatgccgggccttcttgttctggacgatgagtttctcaccggtttccttgggcatgtctcctcctttcgtgggcaataactcgtgagtagcaactcgtgggtagcaactcgtgggtagcaacgcaacatccgacgatatcacggaccggcctcgaatacgaaaagggttcctcttcaagaggaacccttcaaccgcatatatcggccgaaccaaccggtcagtggacgaaccagtactgacccaaattggtcaaggtgcggttgtgcatgttccacggaccaccccagttcatttcggagatctggaatgtgccgtcgccatacacggcttcgactacggcaacatggccataggtaccgtcggcaccatcctgaccaggcaggaaggagagcgccgcaccgacctgagggttgtggtccacgcgcaagccgtacgagggggcgttgcgccaccagtcgccgccattgccgagataggacggcgtgccaatgcccatctgcctacggcgttcatacgcccagtacgtgcactggccggcggcataggcgttgccgtaatcaccgttcgacgtgccttggccgccgacgctgggggcgggagcgggggcgggagccggcgccggagccggagcgggcgccggagcgggggtcaccggagtggacggcgtgccgccctggttaccggtatccaccctgttggcggcgtcctgctgctccttctggaactgacgattgtaggaatcgacctgggaagcgatcagtacggtctgggccgcctgcttggcggattgggaatccagactgtcgatcatggaagacagttcgtcacgccttgcttcgccttcctggcgcagcttatccaaagcgtcacgttcgctttgcgcggtttcggcggcggtctgtgcggaagcggccttctcatcggcctgggtcttgagcacagcgatctgcttttcgatggccgccaagcgctcgccacgattcttcgacgtgctcagtgaggtcgcggcggaggaagccgcattcgcctcgttgcgggacaacgcgtcccgggactgcatggagttgacgaagtcctgtgtgctggtggcacccgtcaccacgctcatcacgtcggaagcattcgagccgtgcatctcgtcacgggccagctgggccacggcggcgtgcgcgtcatcgtagtccttgccggtctgcttgatccgctcctcaagcgtctccttgtctttctgcgcggcggaaagacgtccggatgcggcatcggcctcgtcctgagcggtggcggcatcctcgttggcctgcgtgaccttgttctgggcggcgacaatcttgttgttggtcagatcgtccagctcaagtaccttattcgccaggtcctggctggcaccggccagctgctgcttgagttcggcctcgcgctgtaccgacgcggcgtgctggttctgcgcattgatcaggtcggaataggtgtctgcctgggcaggctgtgccgagctgaacgccagacctcccacacaggctgcggcggccaccagtgccgccagtgcgggcttgatcacacgtacgttcgtcatatgtgaatagtcctttcgctcacttaagccaataccataacatgcgaacctgagaggcttgcacacgatgtcatcacatttctcgcgggtaagccggtcgcgttacgccctcaaataacgccgcaacgagatggttgaagcgatgatggacagcagtatcgcgcccacaaccaggaacggcgatatcaccagtaccgtgagctgattcacataaggaatccaggtaacggatttcgccagccagccggtgacgaacacgttgacgatggccgaaagcatcaggcacgagagcaccgagccgatcagcgaggcgatggtgccctccagaatgaacggcagacgaatcgtccagttcgaggcacccacgtacctcatgatttcggtttcggttcgtctggatgcggcggacatacgaatggtggttccggtcagcaggatggcgaccaccaccatcacgccggcgagcacagccgtaaccgccgtggctcggttgagcacggcgaacaccgggtcgaagatctggcgctgatcggtaacgtcttccacaccctccttgccggagagcacttcggagaccacctgatatttggtggggtccttgagcttgagccagagggagtcctgcatatcgtccgcggtcagcgtacggccttggaattcaccgttcgggtactgcttggtgaaggtgttgtcgtagaaatcctgcttgctgacatagtcgatgttggagaccacgtcgttgagttcatcgcgaatggttttctgcagtgccgtgatctcattggctgagggcgatttgccggaagcgcagttcgcggactggctggtgccgtcgggacatagccacaccacgacctcgaccttgtcgtaccagtcgcccttggctttggtgatctgcgcctgagtaagcaccgaagcgccgatgaacaggaatgagatgaaggtgaccagcgtcagcgacagcagcatcgacaggttacgggtgaggttggcccacgtttcggacagaatgaatcgtgctcgcatgatgatcccccttactccttcgcgccctcagcgggttgatcgtcggatgtttggcctgcggcggactgctcgtcggcggactgctcgtcagcaggctgctcggcggcggactgctcgttggccggcggtgcgggcggttccggcggtgcgggcggctccggcggggccggcggctcggcggcggatgacacggacgtatcggcaaccgcggcggtcgcggcggactcgtccttgaacgggtcgaacacctgggtgctttccagggcggcggcctgctcatccaacggaatgcccttgccccaggtcagcgtgtcttccagcggcgcaaacgtctcgccatagcggccggtgcggccggaatgcacggaattggccaaacgggcgatgccttcagacggctcgtcactgccctcgatggccttggtcgccgccgccagcacatgatgggcggtgtcggacttggcttcgacttcggcatccgggaagaacagggcggaatcgtaggagccatgagcctcgtcacgcacgatcttgccgttgtgcagttcgaccacgcgcttgcgcatcgagttgacgatctcttcgttatgcgtggccatgacgatggtggtgccggtgcggttgatggcgtccagcacttccatgatgcccagcgaagtggtcgggtcgaggttgccggtgggctcgtcggccagcagaatctgcgggtgattcacgtaggcgcgggcgatggccacacgctgctgctcgccaccggagagctcatgcggatagttcttttccttgccggtgaggcccacggtattcagcaccttgggcaccaacgatttgatggtggaccgccgcgtgccgatcacctcaagggcgaacgccacgttctcccatacggttttgttattgagcagcttgtaatcctggaacacgaagcccagcgaacggcggtactgcggcacttgacggttggtgatgcgccgcagatcgttgccggccacgcgaatctcgccgctggtggcctcctcctcgcgcaacagcaggctcaagagcgtggtcttgccggagccggacgcacccacaaggaacacgaaatcaccgcgttcgatatcgaggttgatgtcgtcaagcgccggtcgggtgcctttgggatagatcttggacacattgtccagtgagatcagtgccataatgctgtttactcctcggtttcggcggcgcggcgctgttcatggcgccagcggatgccggcctcgatgaacgcgttgatgtcgccgtcgaacacggcctgggtctggctggtttcgtagccggtgcgcaggtccttgaccatctggtaggggtgcagcacgtaggagcgcatctgatcgccccagctggccttgatgtcgccggcgagctccttcttcttcttggcctcctcctcgtggcgcagcacgagcagtcgggactggagcacggccatggcggaggcacggttctgaatctgcgaacgctcatcctgcatggtcaccacgatgccggtgggaaggtgggtgatgcgcacggccgagtacgtggtgttcacgccctggccgccggggccggaggaacagtaggtgtccacgcggatgtccgtatccggaatgtcgatatggtcggtggcctcgaccagcggcaccacttccacggcggcgaagctggtctggcggcggccctggttgtcgaacggggagatacgtaccagacggtgggtgccgccctccacggacagtcggccgtaagcgtagggggcgtccacctggaaggtggcggacttgatgccggcctcttcggcgtaggaggtgtccatgaccttggccttgaagccgttacgctcgcagtagcgcaggtacatgcgcaacagcatctgcgcgaagtcggccgcgtcgacgccgccggcaccggagcggatggtcaccacggcggaacgttcgtcgtattcgccatcgagcagggtctgaatctccatctggtcgagatccttctgaatctcgccgatttcgctttgcgcctcgcccagagagtcctggtcgccctcctcgtggccgagttcaacgagcgtttccacatcgtcgatgcgctgggaggcggagttcagacgcttcagctgcgattccgcggcggacagccggctggtgatcttctgggcgttttccggatcatcccacaggcccggggccgcggcctgcgtttcgagatccttgatatcggccttgagccggtcgacgtccagcgccttggcgatggattcgtatttggcgcgggcttcgccgatcgcctgggtaaagtcaaattctgccatcgtggtttaccttactgttgattctttgagattctttgggaagtcacgtccttgttgacagccttcgcacattcctctggcgttggcgggcattgccgcgccacacacgcatccgcctgcaatccatgctgccagaaggttccgggcctgccttgccgatagccggccgggcgacctcacaaatccctcgcatcagacgtgttcaactgcgggcacgaatatgcgaaggcaacgtcaaagccccgcgtaaatcgccgggatgatcagggagccgagcatggccacagctatgacgacacacaccacacgcacgatggtgcggcggcggttctcacgctgctgtcggccgtcctgatagttactcacgagaccaatagtgtactcaccgcttacgaccgcaggacttgccgccgacgccagccctgccggcgggcccccacggccctttcctttgcgctttcagcgccgccagatggtgtttcatggccaccagcatgatgtgcgaatcctcaaggcccaagtggcgttcgttgtgggcggaatcaagcgcgccctgacgtttggcgtaggcgtcgagcgtgttgtctccgtaaggatgctcgttggtgggtaccgcgccggggtcccactgccggctcatcggcagggtatcgatgatggtgatgcgcccggcacggtagctttccgcgtatccggcgacgttcagcatgaaccagctatgttcgaaggtggcgttatgcgccacgtacggctgctgggtaagccgcgcgagcaggccggcctgggcttggggccattcgtcgaagagtcggtacccggcctcgctgctgcggccgcgtacatcgatgccggtgagtttggcgatgagggcgttgccgagcgccgcgttttccggcggcacgccaaaagcgagacgggactggccgtaggcgtcgccggcggcgtaatagccctgctcataggcgtatgtctcaggttcgccggccgggcgcggactggccatgttcatgaactcgaagccgacgtcgatgatgtagtcacgcgccggatcgatgccggtggtttcgatgtcgatgcccatcaccgcgtccacgtcgcggccgggcagataggcgtcgcgccagtcgggcttgggatggtggccggtagcgttgccagacgaggcggcaccacccggcgaagtcgcgccggagagattggcgcgggccatcgccgcatcgcccgcacgctcctggaagcgctgggccttacgtcgttcggcgcgtgcgtcaagaatcgccgccgtacggtcttggatatcgtccaaggcgactgttgtggggaacttgacatcgctgttttcggcagcagtgtttccggcagatgcgtcaccggtttcaccgctcagattcagcatgccttggtcatcgttcgatgggcggctgccggagtacggcctgagcacggcaacggtagtcctcccccgccgttcgcgactgaccacccataggtgttgctgttcgcccagatgcaacagcgtgttgatgttgtcgttgagccgacgattggcgtaggcgagcgcgcgaggcagacgataggagccgatgaatcgatcgtaatcggtcatgaatgtgctgttgcattgggcgatgattgattccagatgctcgcgtgtggcgtaatcgatcttcaatgcgtcgtggatagcttgtggcgtcagttccggttggtccaacctgagctgaggctgtgctgcggtttcgccatattgctcaccatctgcagcaagcgccagcaatacgctgatgccatgcatcaggtccagcgaacgcacccagtcccagtcaatggtggtgccgtcggcgtctttgggcatggacgccgcccattggggaatgtctcccttggcggcgtccagccatgtgcggtcgatcatagtgcgaagccgagttcttcggcggcctcggtgggtaccgggtcgtcgcaccaataatcctcgaggttttcggtggtggtcagcgaacggatttcggcgcgatcgatatacagttcgccgctcaaatgatcggtctcgtgctggaagatgcgtgcgggccagccgtgcaacggctcgctgtggtgcttgccgtcttcatcatcccattcggcggtgatgtcgagccaacgcttgcgcacggcctggtatccgtcgaagctcaggcagccttcgtagaacgaggcggttttgtcgctggtgggtttgtagctcggattgatgatcacgtggaaggggaattccgcgatttcgcgcggatcatcctcgtcgtcgcgcacgtggtcttcgaccacggcgagcgcgagccccaagccgatctgggtggcggcgagccccacgccgggcgcctccagcatggtggtgtgcatcgtatcgatgagtttggcgagcgtacgcttggaaagctggccatggtaggccaccgtccgttggcgcaacaccggttcgccggcctgcacgatgggcaggagcttctccttgccgccggttttgatgagttgttcgacatcacggttgagttcgaggtcgactttggcgttctttccaaacattgcttttccttagggaagggtgctacagcgcgagttcttcggcgacgatcttggcgaggcgggtgcagacttcgtcggcgtaggcctgggtggcggcttcggccatcacgcgtacgagcggttcggtgccggaggggcgcagcagcacacggccggtgtctcccagcagttcctcctcgcgggccacggcatcctggatgcgcttgttggtggcggcggctttcttgtccacgttcggcacgttgatgagggtctgcggcagctgcgggaagtcggcggcgagctccttcaggctcttgccggacttgacgacctcgttgcacagggtcagtgcggtcagggtgccgtcgccggtggtggcgaattcgcggttgatcacgtggccggactgctcgccgccaagcgagtaatcgcccttgagcatttcctcaagcacgtaacgatcgcccacggcggtttccacggtcttgatgcccatgtctttcagggcgagcttcagaccgaggttgctcatcacggtgaccacgagggtgtcgtggttgagcttgccttcgcgctgcttggcacgggccagaatgcccatgatctggtcgccgttgatcatgttgccgtcttcgtccacggcgaggcaacggtcggcgtcgccgtcgaaggccacgcccatcacggcatcggtggccttgaccatggcctgcagctgctcggggtgggtggaaccggcgttcttgttgatgttgtagccgtccggcgaggcgttgatcacgattacatccgcaccggcacggcgcagggcttcgggagccaccacggaagtggcgccgttggcgcagtcggccacgatcttcaggcccttgagcggcttgggctgggttttgtcatcgttcagcggagcgatggtggccaccagatgatcgatgtacaggttggtggcggtggtctggtcgtggctcacgcggcccacgccggcaccggtcgggcggtcccagtcctggccgagcacggcctcgatgtcgtcttccttctggtcgggcagcttgaagccgccgcgtgcgaagaacttgatgccgttgtcgggcatcgggttgtgggaggcggagatcacggcacccatttcgacgttgagcacggaggtcaggtaggccacgccaggagtggggatgatgccggcatcgatcacgtcgaagccgccggcggccatgcccgcggacagggcggaagccagaaaatcaccggacacacgggtgtcacggcccacgagcgcgcggcggcgtccctcaggctgatcgtcttgggtgccggcgtcgccgagcacacgcacggcggcatcgcccaaatccaacgccagacgtgcggtcaaatccctattggccagtcctcgaacaccatcggttccaaacatcttcggcatatgaagttccactccttgtatcgcgttacccgcaccatcgtagtcgttgtgctccaccctaggacccgactcggcaaaaaaccgccacggaatctgctctaggaccagacaatggcattcccgagccacaccgaaccctacccaatcagacgaatcagcgaatcaggcgcgtcggccttgaatcactccacgggtgcagtgtatgccagctgtgccacgaacagcccatcatctctcgtgacgatttgcgcacggccgggaacggcacgcttcggcttgaccttgccgataagctgcccctcgttgggatcgccggacagcaaaataccggtcatgcccaaatcctggaacgattgcagcagaggatcatacatggctcggctggcaccaccggtacgccgggtaatcacgacgtgcaggcccaaatccgacgcttgcgccaaatatggtgccaacggcttcagcggattgccgcgactggtggcgaccaaatcgtagtcgtcgacgagtacgtacacttccgatccggtccaccatgaacggttgcgcagctgttccggggtcaagtccggccccggcatgcgggtcttgaggtaatccgcgaggtcgaggaactgttccgtggcagtgtcgtcattggtgatgtacgccccgagatgcgagtccggtatctgtgcgagattggctcggcggtaatcgaccatgaagatcttcgccttaccatccgggtagcctcgcacaatctcgtgcacgagaagtcgcaacagtgaggatttgccggatttggcgtcaccgaatgcgtagaagtgcggctctttctgcagatcgagcacgaccggtgccagcgcgttctcattaataccgaggacgacccttcctctggtcagcaattcggcggccttcggttgcttcataaccgcggaaatcatcggttcgtaaggaagcttcgtgggtagcaagcgcagctttggaccgggcttgcccttccacgcggcatgcaccttgttgacaagatcggcaatgccatccgacacggtggctgcctcgtgattgctgtcaatacgcggcaaaacggcaagcgtatgcagtttcgccgggctgagtccacggcctggcgcgcccttaggcacggtcgtcgcgatcctgcggtcgatttgggaatcgccgggatcgccgagacgcagttcgagcttggtgccgatgaggtcgccgatgttggctcggatttccatccaacggttggcgctaagaattacgtgaacgccgaaagtcaggcctcgcgccacgatttgctgcacctttggttccagctcatcgtaatcgccgcggaacacaccccatccgtcaatcaccaggaacacatcgccgtaaccatcatccacttggccggctgccctgcgcctgcgataagtatccatgccgtcgatgcgctgttctttgaagaaccgctcgcgagcgtcgataatgccggaaacctcggcgagcgtacggcgtactttctcttcctcattgcccgcggcaacaccgctgacatggtcgagtccttccagcgtggtgaacgtaccaccgccgcagtcgatgacgaagaactgcacctccaatggcgtgtgagacaacgacaacgaggtgacgatggatcgcagcatcatgctcttaccgctgagcgggccgccgacgaccgcaacatggccgccagcgccggacaggtcaagcgccatgacgtcgcgcttctgttcacgcggcttgtcttccaacgcacaaggtgccatcagcgcgccgcgcttacgccacgatggcgaaatcaggccatattgcgcagtgacggtgaggtccggcatgaactcgtccaaggtgttcggcacgaccagaggcggcagccacaccacgtgcgccggcctgcccttgcctcgcatctggtcgacggcgtactggaacgtcgtggtgtctccatccaagcccttgggtacgccggacacgtacgcagcacggaatctggtgatggttccggccggtgttttgaggtaaccgatacccggcaggcttggcagttcgtatgcgtcggggatacccagcactgcgcgggattcggacgcggagaacgttttgaggccaacacgatacgacaaatgttcgtcaaggccgcgcaacttgccctgttcgagtctctgagaagcgatgagcaggtgtacgccgagcgaacgtccaacagcaccgatacgcacgaaggactgtacgatgtcgggttttgccttaaggagttcggagaactcgtcgaccactaccagcagcgacggcagtggatcgaggtccgtgcgcccgccgttgacgcgcgcatcctcgtattcggtgatgttcgccagattaccggcgtcgcgcagcagttcctgacgccggttgatttcgccgtccagcgcatcttccatacgatccacgagggaggcctcgtctccaaggttggtgatgatggacgagatgtgcggcatgccgcccatgcccgcgaatgtggcaccacccttgaagtcgatgagcacgaagttgagctggtcgggcgaatggctgagcgccaaagacagcaccaatgtgcgcaacacctcggatttgcccgagcccgtggcaccgacgagcacaccgtgcgggcccatgccgtgctggcccatttccttgatgtcgagatatgcggtgctggtgtcgtcgtgcagtccgataggcacacgaagacgttccttgcccgtacggtaggcccacagtttggcaaggtcaatatgacgaatatcgtcaatacccagcaatgccggcaattcgttggatttcttgtgcccggcagacgaagcggcctgtgcggattccgcatcctccacttcgtccggggcgctggcgagccgctgagcgatggcgagggcttctcgcaccgtaagcgcatccggcttgatgtcgaatggcttgatggtcgtggagaacagctccacggtgccttcctcatgggtttcgagcacattgaggccctcttcaaccgttgtctgagagaacagcacacgcagtacattgtcttcttcaaggtcgccccattcgtcgggcaggtcgatcacggtgacgccgtcaagaccatccgaagcgaatagctgagtttccttggcgagttgctcccggtcaaacccgtcgttgaccaccagcacatgtggcacgatttcatagtcgctaccggtataccggttacggtcaagcgcctgcgatcccacgagcaggtcaaccgcgtgtatgttcgaggtgaccatataacgcccatgccccactgtggaggcaagtgcctccgccggttcttgggcgagttcgtcgttcaatcccgccgcttggggcagcaaccgcacccaatcccactggccgatgcgagcctcggaagccaatacgacgatacgcaggcaatccggggcatgccaggtagccgcttggcacaacaccgcgcgcgcaagcgcctccgtacgctcaagatcgcccagcagctccactcgtttgaactgccgcatgttgacaacgtatggcatattgcgcaacgattcgtgcgccagcatgaaccggtgagcggccgatgccgaaactgggtctagttgtgccaatggcggcagctcaggcgcttcgagcgtgatgcacagaggctcatcatgcacgccgaagcgcagttgcatgaagtccccatcggattggatacgctcccatcggcgtgcgggttcctgcgcgatggcggtaagcgattgcggtgccggagcattccacaacgccgcgttacgctgtttgcgcccggctgtgcgcactgttttacgcaagcccgacaagtaggtaaggtattcgcggcgtgacgaggtgaggttcgccatgcgctgggagcgttgacggaagccgttgaccaccacgaatcccagcgaggagaccatgaacatgccaccggtgagcatgccggtcaggccggaattggtcatgagcatcatcaccatggcgctggcggtacccagcaacggtaccagcgaggtcagcagcgtattgacgccgtcgctgggctcaagttcaggcggctgctggagcacgacccgcccttttggagccttaggcccttcaagcctgttctgttgagtttcggaagtcatgaacgccgccccctgcttttcgccatgatgatgctacagcccatatcgccgagtgagatacgcgcacctgattgaatggcatgtcgttgctgagcaacgagatcgatttcctcgccgtcttcattgacgacgcgggtgccattagtgctgttaaggtcggtaatccacatatgtccggcggtgatttccaaacgcacgtgattacgcgataccgtgccggtgcgatcgggaacagccaacaccatatcaccgttctgttgcggtgatgggttacgcccgagcaccacattggagggaatgaccaacggctcgcgcgagccgtcttcgaagtaaatggtgatttgcttgggtggcacgggcggcactgtgccggggcgcgcaggcaaggcattgccaaccggattggcagccggggtgggcaacgcgacatgcttcgccctcttcgtggaaggctgcgacacgggaagcggcatgggtttcgccgcagatactgagggaacggagggcacggaaacggcagaagccctcggtgcggcgggaaccgcacgaacgttggggactggggaaacagccggcaccgatgacatcgacggcactgcaagtggtgccgcgggcgtctttgggatcactggagcgggtaccggtgccgaagcagatgcggatactacagatgctaaggccccggaggtagtcgactcgtgcatcgtggaggaggaaatcgtatggaaccgaagctcctgtgatggcatcgcagtcgtgacttgcttgtggatatccacctcggcgagtctggcgaccttatccgcccatccctgcttaagttcagatcgggagaacaacggcgaacatatcataatcaacaatccgatgacgaataccatcgaagagaccgtaagcaccagatatttgacgaaggctctactgagtcccgctggcagtattccattacggtggtcgttctggcattcaacacgcactgtacgcacaccaagtgctactttgcccggggtttcgccgcgcacggcctcccatacggcaagcacaagaaccatttccacggctatcatcacgcataccaccagattgtgagacagcaccatggccactacggtgcccagcgccacgcagcatacgtcgatcagtgaagcaacgcattgtttgccggccgaggccgcacgatatccggtaatggtacgttccttacgcgaaacgactgatgttgctgcggccgctaccatgacatactcctgagaaactcaagtgcgccacctgcgaggaacgaggctgtcggtatcagcatcatggagatgaagcacaacgcatcgccgattcgcgatagcgccagagaatggaacccattgtgctgcaccaccatgctgaatcccaacaccagtcccaacgcggcgaacgtgaccatacaaatcaaggggatcattgcctccccttcgggaattgcctgagtggcgtgcccaacccagagcaggggaatcgcaataccggccgcgcgcatcacatatcgttcgaatggtcgcccggattgacgcggcttcagttcgaagaacagcatcagcagcatactcagcaccagaaagccgatacggtcatacaggctgtggtagtcggtccactgtgccaatgcggcatatcccaatacactcagcaccacgcatagcgtgaaccccgtggagtattgtgccaggaacgaatccatatcctgccgaacatccttgcgggtcagcactcgcgcttcctcgggaatgcttccgcgcaccgtccatcgccgggtcatgtaggtccgccattccaccagataacgatcgggcacatgcaccacgatgttcggcatcatctggataccgcagacgcttgcggcaaccaccatgccggcaagcaactgcactgacagatcaaacagtacggttgccgcgctggccaaggccaatggcaatgccacgaacgacaccgcgctcaccacaccacgcaccattggctcgcgcacgcatacggacatcaacgccatatccgccaccgcgatgcctgatgcgcagaacacggccacggttgccggattacccgactcaagcaatgtggagacggtagcgcccgcgcatatggaaaaacatgctccggctactaccaaccacaccgccatcacacggttatgccatacgatttggcggcggcaacggctattacataccaatgccgccacaatgaacacggcaacgagaacgaacgtcacccaccgagacgagcctgccatgcgcatggcaggagtcagacgcatgaacagcaacgaggtcatcgccgcaaacagtacggcgacaatcaacgccaccctgttgaggtcgcgtcgagttaccccctcgtgctcgctgtgcatatgtcgttccttctgccgcctcttctctcaagacgccattatatgggtttgcggcccggtgtgtgctcttccgtctaattacggccggcttgtgcctcgaaagcatgcagcttgcgcataccggcatcgagttcgctacgacctttggccgcctcgttgtcttcatcgtcggtgtccgtaacatagtcgcgcacatataccatgctagcttcgaggtagccacgcacttcacgggcctcgggcgatttgtcgatgccggcgtagatgtcgtcttcgcaggtcttgcccatatcgatgcgctgttgcagcacctgccaggcacggccgtactcacctttgcgccgcttctcctcgatgtccttgcttttttcggcgatggtggcgtcgacctttgccttctccttttcgaatcgggcacgttgctctttgatctggttggataaatcgtccatctgcttcatgaacgcttcaaattccggggatgccatggttgctccttttgctgttcttccgggtatgcgtatacgtccgaatagggattaacggccgccgaacgtaccgccgcctgaacctccgctggagcttcccccaactgcaacaactgaaccacccgtggaaccggatccactgccaaaggtcatcttcacgccttcggagacgttcaccaactgctgcatggtgccaatgcagttcgcgaatccgctaaatgcggtgtacaggttgttcaggcagttgacgatatccataccccactggatggcctgtgtgacttcggcggcagccgtcactgcgaccagcaccggacccgcaccggggatgatcagttcgccggcgataagcttcagcaaggatatgatttcgtcgatggtgtcgagaataaggtcgaatgcagcctctgcgttctgcgcgagcgcattcaatgcctgcgacatttcggtgcagggctggcaaccttgacctgccacctcacctacggcattgttgcgttcaacaaatttatcggcggaggcaccagaccatgacgtctcattcacattgctggacatatcttggatggctccttgtacgccggaaagcgaagccgacaatgcatcccacttggcggcagtgtcttggagctcgtcccagtcaccgaagaatggcttcttcacccactcatcaacaatgctcacgccaaagagatacttagagacgaagtccacaacggtcacggccatgcgcacacgggatattcctatgctgattttgccgcttaactcatgcgctgcttttcttaccgcattgttctttatgtctttagcaagctgatcggaggccgattggacactggcagatactcgtcctaaaggaaaagcatcaagatgcagcatattatcggcagcatccctcttataatcgatatgcttcaatatctctcttgggactgcaccggtattcgacagaccaactttctgcccaagcacgtcgataagttttccagcctgcttggtgtcggcgaactcacctacatgctggtaaaaccgtaaatcacgtttgatgtcgccgaggtcatccggcacatcgacagtaatgggaccgaactgaagatcgttgttgtagtcatcatcgttgctgtcagccattatgcgatgctccttacgttaccggtgttgatttcagtttgctcgggcaatgtcatgacatccctgtcggcgtagagcgcctgcagttcttccaccgagcgtccaagagggtcattgcgggagatttccgcccagacgctcgcctcggcctcctgctgcatcttctcgtaagcggccgccgagtctccgatgcgtacggaggcatcataatcgccgtcgttgtcgaagtcgatggcggcgtactgggaatcgccatcttcgaatacgctcacgcgggaatcatctccactgtccggagtgagggtgatgtcgtcacgaccgtcattgtcggcgtcaaccgtaaacgagttgcccttattcgcagtgttgttgtcgctacccgggggcaacggcacggtggacgagtcctgcttggacagggtgaccgatccatcgtcgtttatagaagcatgcgtaccgccctcggtgaggttcacggaatagtcgtcggtcgcatcgccatcggtgtccagaccaacggtattcgtggtgtccggtcgggtgactccaggaacatctggctgatgagttccagttccgggattggtgtttcccgttccgggagtagacgttccaggattccatggagttactggcacagtggtgttctgatcatcaccggaagcgtccacagaaccagtattctgccccgcattcacatcttgatcgtgacctggctgcgctgctgatggggtctgcggcgtcgccgacgattgaggagcctgttgcaccggctggtactggccggaatccgtgccggagccagctccaccgcccgagccagagccaccgccagaaccgcccgaaccggcaccgcctccgaaaccaccgcccccgccaccggtgcctccgggcattccaggatcaacagatgactcattgttgttcttgttctggttgtctcgaatttcttctagcagctggatgattttgttgagcagttccttattcgactgttccgtggctttggtgtctttggcggtgccttctactgcgctggaaatcgaattcagcatcgattcgatattgcccaaatagctgacggtggaatctttggcaatgccatagaacggcttaacaaaactcagcagaattccgaaattcggacttcctgaactgacaaattggcttttcgcgctggcgaattgagaggccgcctgattgaaggaatcagataccgtgcccaaatcatcagggtctacctgcataagcgatgcagccataacgcatcattgcctttccccctagttccttgtactcttcacaattggttaccccattgtgttctccattgtgccatatgtacagcgttcgtcaatgtttcctacagattcaatcggcgattcctaaccgaattctggggaggcatgccatcataggcgtgttcgccgtaggtcaagccacctgaatacagccacatcccgtaatgcgcgccacgcggatcggacgacaaaggaaaacgaggatcacactgatc

SEQ ID NO: 1095 - DNA, 2619 bp, Unknown
  R13_10m  MAG No. k141_12625
acaaggacgcgcccgtgtgcccttacgttcagctccgctcacgaatgaaatcgaagatcacgtcgaagacctgctggctccagaaatcgtactcatgttcggcgccgtcgactagcaccagctgcgcgtccacgccgtgcttgaccagccggtcgcgcatcttgacggattgatggtaggggaccacggtgtcggcggtaccgtgcaacaggagcatcggcggatactgttggtcatcccgcacctgcaggtaggggctcatgtcagccgcgcgctgacggacctcggcattgatgccggtctcatgggtcgcgcccaccacggccgcgaacgggccgaaataatacagccggaatggattggtctcatcgtcgaatgcgtcgactgcttcaagcatgtcggtgggcgggaagcagctgaccacgtacttcaccgcatcgctctcatcggcattggtgccgtcctcataccgcggatcgtcggcggtcaaccccaccagcagcgacgtgttgccgccggacgacgtgccccagataccgagacggtcggggtccacgtgccattggcgcgcgtttgccctgagatagcggatggctgctttgacgtcctcgagatatgcggggaacatgtcatggggatcgctcgaggcatcgcgatgattcaccgtggccaccacaaagccttcgcgggccaaagccgagagctgcgggatctcgtagtcgcgatgcggcgtggtccaggcgctgccttgcacgaatatcacggtggggtagcggcggtcatcgtcatcgccggtggattgtggtgagatgatatccatcaccaggttatcggccccggtcttgtacgccacgttgcgggtcagcgtggccaatccggcaagcgtgggattgtgcgggatatggatggcattgtttgcgccggcattggcatcggtgactttggctgaatcggtagtgttcatggaatccccctagctctgttgctatagaggtcatcatacaagaaataggcatgattacggcacaacgatgtctcggtcacagcgaagacatgaaggcgcgaagacgcgcccggcagcgcgcgctgcctgcctgcgagttgccttcaagtgcacttcaagcgataaggtgacataagccgcggcaatggagattgctgcccggcaacgaggcggacagtgcccgttcgccgattcgcgataacagaaatgagacactatgaagactcaggaaatcggacaatccggcatgattgcgtcacgagtggcgctgggcgtgatgcgcatggacgcgttggatgccgccgatgcggcacgtaccgtggccgtggcccatgattccggcatcgactatttcgacacggcggaatgcatacacagatgctcgacgctgaaatccaattcaatatggcgagcgatcccgcagccgattgcaccggtggcatcctgccttattcacggctgaagcatatgaccattcaggcatggtgcccattccaatccggcacggaatacggtccgttcgtcggcaacgagcatttccccgagctgaacgccgaattgacccgtcttgccggcaatccgttggtgtgagcgagagatgacgagaccaatgccgttgaggcgcgtgttcagcgtgcatacatctcaacggcggtcaatgctgtgtcaatgccaacattcagtgcctccgggcgtgcaccatctggcgaaagctgatgtgtatgtccatacagcagcctgcggccgttaaacggcaacgccttgccgctgaacttcgccacatcatcgggccaactgtatgtcagatcctcccgatacgggtaatgcgaaagattgaccgtaccgagtccctcaatctcaaccgtatcgtgcggctccaaactttcgaacaggttgagtgcggggcggtcttcccgccaccagtcatcatggttgccgatcacaccatgcagatgcttgcaattgagcgctcgcaggcagttcttcagatgggtcagcgatgtgcggaaaccgatatcacccagaatccacagctcgtcatccgggccgaccacagcgttgatatgatccacaatcgccttgtcatgcgcatccgtatcggcgacctgacgaaacgtcagacccgcgccgaacgtctcctccttggcccaatcctcggcggtcttgcgatcatgcgcgccgcacctcctcatagcgcgagtgcgtcggatcgaacgtcgtgaaccctcgcaacaccgtgaccagtggatgcccgaaatgcgtgtcggtcgtgaaatacctcatgacagtcgccttcccttttcggcgtgtagcaatgatttcccatcctaggcgcagccggcacctgtcggttcgtgttgccataatgaggcgcattgcaggggaacccgtgaacgcaagctgccggccatcgtggcggcgaacgggttgagaaaggcgctgtgcctgaaccttggaaccttttggccaacaccatcgaagggagaaacgatgacttttgacgccgtcgcattcggcccgatcactctgaaccacctgccgccattcgcccagcgcctacgacatgcagtacacgtggaaacccgaatgggatgtgtgaggagttcgatggatga

SEQ ID NO: 1096 - DNA, 54322 bp, Unknown
  R13_10m  MAG No. k141_12817
cttgccctgaccggtcaatgcggtcttggaaccgatattgaccaccgagcccttgctggccttgagcgccggcacgcactgatggaccagctcgtagtagtgggtcaggttgccgtgaatcgactcctcgaactgacgccacgacgtggtctcgagcgcgagattgtcgttccttccggcgttgttgaccacgccatcgatatggccgtgcttctccatgaccgacttgacgatgggggcgatgtcgtcggtgttgttcaggtcgatcagatacgtgtcatacgagtcggtgattcgttcaatgtcctgtcggaattcgtcgccggcaccgtcatcacggttcagcaccacaggaatggcgccttcttcggccagtcgcagcgttatgcccttgccgatgcctttgaagcctccggtgacaatgatcaccttgtctttaagatgcaggtccatctcaggtcctcccgaccggtcagtccttgtgcaggtacttcatgcattcgtcgagcttcatctccgtgccgttgcccggagcgagcggcgcgacgtatcgtccgttcttgatgacggtcggatgtacgaagtactcatgctggttgtccacgtattcgacgacgcggtcctccatctcgccagagacggacacgtaatcgaacatcgcaagctggctgatggcttcacacaggccgacaccgcccgcgtgagggcagaccttgacgccgaacttcttggcgagcaggtattcgaggacgatttcctgggggccggcgactcgggtcgcgtcaatctgcatgaccttgaagctgccggcctgcaggtactgcttgtacatgactcggttctgcatctgttcgccggtggccaccggaatcggatcgatggccttctggattgcggcatgtccaagcacgtcatccgggcaggtcggttcctcaacccacgcgagatcgtagtcattgaatttgccgatccattcgatggcctgtggcacatcccagacctggttggcgtcgacggcgatggcgatgtccgggccgaccgcttcacgggcgagcttgagcctgcgcaggtcatcctcgaggttctggccgaccttgagcttgatctgcttgaagcccatgacctcggtctcctgcttggccaggcggaccatcttctcgtcggaatagccgagccatccagctgcggttgaatatcccgggtagccgacttccttgaggtgggcgatgcgttccgccttgccttcctgggcggcacgcagaatctcgagggcttcctgcggagtgagggcatcggtcagatagcggaagtcgagagtcgcaacgagctcttcaggctccatctcggaaaggagcagccagagcggcttgccggcgcgcttggctttgaggtcccacagagccgaaagcacggcgccaatggccatatgctcgacgcccttctcagggccgagccagcgcagctgcgaatcgcgcacgaacagatcccatgcgagacgcatgttgtcgagcagttcctcgacgttacgtccgataagggtttcggacatggagtcgatggctcggacgacgacatcattgccgcggccgatggtgaagacgaatccgttgccggaatcaccagcatccgtgctgatgacaacataggcggaggaataatccggatcagggttcatggcgtcggagccggagaaggtggccgacgtcgggaatcggaaatcataggtggtgactttggtaataacgctcacgatgcgcttccttctttggaaaatggttaatctcaaaaagggaggacggccattcggccgccctccctagcagtggcgggccggatgtcagtcggcgtcggtggtgaccttgaagccgttgtcctttgcgtaggtcttgagcttctgctgagccttggccatagcgccgaccatgtcaccgccaaccttcatttcaggagtgatgacatccttatatacgactccaacctgagacatgaacggaagatactcccaatcagtattgaccttgtccatggactcgaagtagacggagttcacgtcagtattgacaaagtatccatctgtttccttcatgttgcggatgtcttcgctatcttggtaagcggaagctgccatgaagtagttgccatggttgttatcctgccaagactgaattgcttccttgtcggaatcgagccaattgatgaaggcaagggctgcagcctgcttgtccttagggcatgccgcggaaacactcatcatggagccgacggaagaagacttgaaatcatcggcagaatcgccgaatgcaggtggcagcgttacctgaatcagacccttaagagatggattctgtcccttgtaggagttgccttgccagttctgagaaatataagtggcataggtaccctcattcgtggcacggttgaacgcatcggtccagcctggagcggcctccatgaccccatcctgaaggcacttttgcaggaattcaatgaactccttggtagtgccagaagtcatgctcaggctgatgtcatcgacagaattgaccttccaagggcgtgcaccagccgaacgcagcaaatccgtaaagcaggagatatcgttattgatgaggacgcccatgtacttgctgggatcttccttgtgaagtttgacgccttcttcatagaattcctgccaagtggttggcaccttgagattatgctcgtcgagaatgtccttacgcacatacatggccaaaggagtggcgtcagtcggcacgccccacaggccaccagcataatgcacctggctccaagcggtctttgcataaagcttgctccacgccttttcgatatcatcgttggcgaaattcagcagagctccagaaatagcgtactgttcgaatcggtcagcactcatctgcacgacatccggaacatctttattggcagcaacgacattctggaacttggtgaaatggtcgcttgccgcgccggtgttggtgaatttaattttgatgtgcgggtacttcttctggaaagcttcaatcggtcctgccatctgcttcccggagaatccccatacgttcagctcgatttttttggaagtatcggtgagagcgttgttaatgtcttctacagtgactgcagttttagtgtccttggcaccagtacttgagccacaagccgcaacgctggctaccatagtaagcgccgccagcgcactgacgattttggtcatcttcttcatgattactcctttgtgtgtcatgaatcactgtcttattgttgttcttcaaatggatgtggatgccgcacggtcattagagcaacgaatgggtgatcgccaataaccgtgcggcgaggattcactgcttgactgcaccagccgaaaggccagactgccagtacttctgcaggaacatgaatgcgatgatcaacggggcaactgcaatgaggcatccggtgacaatgtagttgttcggaatctgaccgtccgcggtaccttcggcacccatcttcaaccacatgttcaaaccgaccgtcatcgggtagtcgttggtgtccgagagcatgatcagcggcaggaagtagttgttccagacaccgaccagcgtgaacagcagtacggtgacgaaacctggagacaacagcgggaaggcaaccttccagaagatggtccacgaatttgcaccatcgagcttagccgcttcaaggagagaagtaggcaccgatgtttgcgcataaataatcatcaggtacagtccgaacggcgtggccagctgtggaataatcactgcccatggggtaccaaccagaccaatcttcgagtacatgaggaacagcgggacagagatgaccgtggccggaatggacatgaatgccaaggtgatcgccaacagactattacgtccggggaaccgcattgtggcaatggcgtagcctgcaagtgtggcgatgatagtggcaccaaatccggcgacaactgcatacatcactgtgttaagcaaccaccgtgcgtatgtaccatgctgatatgcaagagtttcctgaacattctgccagaacacattcttgtcatcgaaccacagaccaaaggagctaaacatgccctcgttggtctttgtcgcagagaagaacacccacagcaacggcacgagacagtagatgaccatcaggcccatgataatgtgcagcagccagttaagcacacgctgcttgccggtcagctttggagctgcctcacgctgctgcatacgcttatagcgttggctcgccttgagcgccagcttggcgtctctgcgctgcagcgacttggaacgtggttttgcgattgcttcactcatcacttgttctcccacttattgccaatgaccttcacgactgcgacaagacccataacgatgacaccaatcaccaaggagaccgctgcagcatagttgaggttctggccgttgaacgcaaggttatatgcgtagagattcggcgtgtagttactggtgatcacattcggcgcggaattcatcaagatgctcggttcgttgaacaactgaagcgtgccgatcaccgagaagagcacggtcatcataatggatcccttaatctgcggaatctttaccgaccatgcgatacgcagctcggatgcgccatcgatacgagcggattcgtacagctcgttcggaataccgatcagtgcagaataataaatcagcatgttgtagccaagagaacaccaagtgcagatgtttgcgatggcgaacagcatgagcttttcagaaagcatgttcggcgcagtggccccgatcatagacgcaatctggccgacaaggccatacttgtcgccgtagatatatccccacatcagtgctgcgatgacgcctgggacggcataaggcaggaacagcaggattcgcggcactgcgatatgacggattctctgggaatccagaatgagcgccgccacaagggaaaggatcaaattgagaggaatctgaatcgccgcataaatcagcactcttctgaaaccgctccacagcgcttcatccttaaatgcagctatgaagttgtcgaagcctgcgaatgtggtgccgccaagaagggactgcttgaagaagctgagataaagcgcgtagaacatcgggatgatcatgccgaataggaagaccaccacgtatggaagacaatataacatgcctatgtactcgcgcttcggcttgcgcatcccggaagtatccggtttcgccgttgcatttgtcatagtttttctctttcttcttaacccgtctgaatgagcccgccaacaacatcgttgccattgccgtttcattcatcggtacgttcaatatacaaggttttacaaaaaagagcaaataaaacttcgttgcgcgtggcgaaattttctttatcttgttttttcgccttaaaagggctttattgcaacgatatgcacaaatcgtactcatcgaagaaacagcagccaatccatgtctacaacacccatttccgctatatagacagcaatacgccgataaaaaagctgttttagagtagcgaaaatttcgctactctatatataacgcttttttgcagcgtcgcatacgaaaagagaagagtcatggccacaatcaaaacaacaaacagaccgaaggtctccgacatcgcccaagcggcgggagtatcccccgctaccgtgtccaaggtcatcaacggccgtgatggagtctccgacgagacccgcgatagggtggaactgctcctcgaagaagccggattccgcaaaaaacttcccacaacaaaaaccatacggtcaatcgaactggtcgtcagcgaaatgaccaacaacggcaccgtggaaatggtcaaggagacagcttcatacgccagagattttggcctcggcatcaccgtaagctgcgccggaccggattccggagaatacgcaacaagaaacgaggccagcagctgcctccgtaacgccatcgaacgcaacccactaggcgtcatacttctcttatcgaatatctcatcggccgaggaatcgctgctgcagacgaggaacatcccatatgtgattgtcgatccggtcggccaggtctccgctgacgcattgggagtgggcattgataactggaccgggggaatgctcgccacgcaatatttcatatcattggggcatcgacgaatcgccgtcatcactggccctactaattcacaatcctcgcaggcgcgactgagcggatacatggcggcgctgcagaaaaacggcatcagcgcggatccgcatctcatcaaggttggcgactacgtgtctgacaaggcatacaaggcggcatgcgatctcctggaaatgagggagcaggaccgaccgaccgccatcttcgcgttcaacgatctcggcgcgatcaacgtctatcgcgccgcccgacagcacgacatcagtctgcccgaacaattatcgatcatcggtttcgacgatgtctatcctgcggcaagcatgtgtccatccctgacgaccatcaggcagccattcgacctcatcgccagacaatgcatcaacctgattctcgaagcgcgggaaggaaaggtggaacagaattacttcatttttcccacgcagcttgtcgaacgcgaaagctgcgtatcgccagcacgtccgtaactcagcaacggaacacagaatcagcttccacgaagcacccatgcatatgcaatccgtctctggcacaagcatttacttctgtttaccagatgaaaatacaatatcgtgcgattacggggggcgcagccctagcctcagctggaggtcaggaaggtttcgttgcctcgggtgaagtcgaggacggcaccggcgagttggacctcgtctgccagttcggggtcggcagccagaagctgctcggcacgggtgcgggcgtcggcgatcatgtcggcgtccttgaccacgcgcaggagcttcaggctggacttgccgccggattgggcgtcgccgagcacatcgccggcaccgcggaattccaagtcggcttgggcgatttcggcaccgtcgagcgagtggtgaatcacttcgagccgttgctcggccggggagccgggttccgcacgggaaacaaggaacgcccacgagttggtgccgccacgccccacgcggccgcgcagctgatgcaactgagagaggccgtatcggtcggcatcaaagatcacgatgcagctggcctgtttcacatccacaccgacttcgatcaccgtggtggacaccagaatcggagtctcgccgccggcaaaatcggccatgacctgggttttgacgtcatccttgtcgcggccggtcagagtcgcaaaccgaatgccttggaattgcgggagtttctgcaaccggtcggcgatttcggccaccgcatgcaatggcgggcgagccacggtttcgccgttttcgtcgaaggtttcgtaggggtcgtcgatgccgatggcgtcggccgccgcgcgcgttgcacggccgcccgcagctgtgcgggcactggaaccagatgctgcggcgcgtccgcgggcagaaccggctgctgccgaaacgccggaaccgccttcgttcccctcatcatccgcatcaatgcgcgggcacacgatataggcccgctcccccgcgtcgactcgcgcgcgaatgtgcgcgaacatacggcccatggtggcggcgtcggcctcattgaccaccacggtgcgaatcggtttgcggccgccaggcaattcggtgagccaggaaatatcgagatcgccaaaccaagtcatggcggcggtgcgcgggatgggcgtggcggtcatcaccaatagatgcggcgtggtgccgtcatcggttttggcgttgagactttcgcgctgttccacaccgaaccggtgctgctcgtcgattaccaccaaggccaagtgcggggcttggaaggtcttggaaaacgccgcgtgcgtggccacgataatgcccggctcgccactggcggccgcagcaagtgctttacgtcgcgcagcaagcttcatgccgcccgtcaacaacgtgactggaatcgctggcttgagttgctccaccatccggccaatggtttcggcatgctgctcggccagcacctgagtcggggcaacaagcacggcctgatagccggcgtctacggcttggagcatggcagcgagcgccactacggttttgccggagcccacctcgccttgcagcagacgctgcattggccagtcatgagccaaatcggcggcaatatcatgaataacctgctgctgccctgcagtgagggagaacggcagggatgcgatgaactgatcgcgcagactgtcggttaccaacgggcaagagtgagccgcggatttatgggcgtgcgacctggctttaagcagcgaggtctgcgaaacgaaagcctcctcatagcgcagggtttcgatggcctccttgaaccgggtcgtggaggccggatcatgaatggccaggaacgcctcagcccgatgcatgaggttcttggccttgcgcaccgattcgggcagcacatctgggatggattgggagagcgcctcagcaccggattcggcggtcgtgccggaattctcttccccgttttggacggcgatggtgtcggtcgtgggagccacaatgccggctgacccagcgccagcgagttgcccgtcaggcgtggatgacgtgcgggcccccatcatccacagcaatcccagaatcgtctcatgaatatgttcggacgagatacgcgaactggcgtgatataccgggcggggccggcagacgcgggtaagcgcctcttgcacggtatcggcgtcgtatttcagcgcggccccggaagaggcagccgcggccggcggatacgcggactgcacactggcatacggatcggtacttcccgcaaacgcaccattgccggatgccgcaccccgagcgtaaccctcaagccccgctcctgctccggccgacccgggcgcgacagtgaggatttcggggtgcgtgaattgcagctgccccatgtattcgctgggcataccggagaccaccacagacgtgccggcgcgcagccgcatgctgacccaatccacatacgatttacgatacgaaaagaacgtgagccgggccgtgctgccgggtacgcgacgagaccgggcgaagtcggcgtcatcgaccgtcgcctcgagtcggtagccgcggcgagcgttcatcggcaccacgcgcatgtctcgtatcacggcggcaaatgccatctgctggccgggtgcggcctcgcggatggcgcgaagcggcaccggttcggtgacgcggaagggatagtaggtcagggcgtcgccgacagtgacgattcccagcgatttgagcgcggacacgcgacgcttgttggtgaccagcgaagcgagagtggtgtccatagtgatgctcatattggcctattctattcgcacggcctctttaggccgcagaaacaacaaaacccgctgagccgaagctcaaacgggttttgctccacgttagtacgcgattcacgcggccacgcgctgaaccttgccggccttgaggcacttgacgcacacgcgcagacgagtgttctcgccatcaatcgtggtgcgtacagactgcaggttcgggcggaagctacgcttggtacgacggtgcgaatgggaaacggtgaaaccggtctgcggtcccttgccgcacactgcgcaacgagctgccatgatggactcccttaaccttgatgtgtcaagtctttcacgcattcgaccgccggtttcacccgacatgccgaacacacaacttcacaaatatatagcccaataccgacaaccgcaactcttgcgtgtatcatgggcgaacttcggcggttcgcgagcggttcgagcgtaacttgcgagtgggccatcagcggttcgcgagcggttcggcattggttcgccagcggtccgcaagtagttcgccagcagttcgccagcggtccgcaagtagttcgccagcagttcgccagcagttcgccagcggcgaattacgctgcaaatcgtagcgtttacccgataaaacacgccggactgcctattccgcatccaacaaactctcatataatctcggtataagagacggcaagggacgaaggggtcctcgtgcaacttacgacgaaggaggctgtcatgttgaatctcaggcgaggtatcggcactcacgagcccagcgtgatttcactgggtcaagtctgggtggacatcatgctcaatgtggacgaggtgccggcacagggcggattcgccgtggccgatcatccgaagccctccattggcggcagctatcgcgtactgcaggcggccagccgcatgggcgtgccgaccgagcacgccggcattctgggcaacggcctgtgggcgcatttcatccgccagtcattccaggacaacggcatcacgcatatcggccaggatcgtcttgatgaggattccggtttccgcgtggtgctgagctccggcgcgccgaagaagacgttcatcgcttcctatggcgccgaggctcatggcgacgcggacacgttcaacacgctggagccgcagcccaaagacgtggtgcacatcagcggcaacacactgatggaccacacggccaccggcgtggacggattcctactcaaggccggtaccgacccggctgcacgcgactacacgctggtgatcaatcccaccaatacgttgcgcctggtcaatgaccacatgctcgaggatctggtgcttgcgcgcccggtctggtcctgcaaccgtcaggaggccatgacgctggccgagcgcctgggcgcgccgatcgacgacagcaaggtcaccatcggcggtggactcgacgacttcatgcaccagttgtgtgacggcttgggcactacactgcgcgcgccgctggtggtgcgtgtcggcgcccgcggcgcttggattcgtgagccaggtggcgagacgattcatatcgagggatacccgaccaaggccgtacacacccgttcggcgggcggttgccacaccggcgtgatgtgcgcgatgctggcaaagggccatagtctggccgaatcggtaaagatcgccaacgcggcggcatccatcgccatccagcgcagcctcaacggcgtgccgcaatgccccgattacgacgaggccatcgcgctgatcggcgaatagtttccggacgattgagtggatttcctcatctgggggaatccacgatcggctcccttcagtccgcttcgcggccagctcccctcagcgaggggagctatttttttgctctggctccccttagaaaggggcccggcattattcacccgccgttcaactttggcggttttctaccctagtccgcgcttctacgatagattgagttgaatactgtcgaggagtacatatgactgatcccgcaaatgtccacgaaccggtgccgcaaagcgccaaactgaccgcccgcgagaagaagtggatcatctacgacgtcggcaactcggcattcgtgctgctgtccaccgccgtcatccccatttacgccaaatcgctgatgccggcggatggcaacatcgtgtccgcctggggctacgcgcaaaccattgcctccttggtcatagcgctgctcatgccgttgctcggctccatcgccgacgtgcaaggcatgaaaatcaagttcttccttggcttcttcggcaccggcgtggtcacctgctgcgcaatggccctgcccctgacctggctgccgttcctggtcgtctacattctggcgaccatcggcctgaacggctcgctgacgttctatgattcgatgctcatcgacaccacctcgaacgagcgcatggacaaggtctcctcgcacggctacggctggggctacatcggttccaccgtgccgttcatcttctgcatcgcgctgatcttcggcggcccgtcgctcttcgactggtccacggtggcttgcacgcgcgcctcgttcatcatcaccgccatctggtgggtggcgttcaccatcccgctgcttaccagctaccgccaggtgcactaccgtgccacccgcgaccagctgggctcggccgtgcgcggcacgttcagcgaactggcgggcacgttcggcaaaatcgtgaagaacaagccgttgtggatgttcatgatcgcgttcttcttctacatcgacgccgtgaacacggtgatttcgatgagtacctcctacggtgccgagcttggcatcgactccacccagctggtggtggcactgctcgtcacgcagttcgtggccttcccctgcgcgattctctacggccgtctggccggccggctcggctgcaaagtgatgatcacggcggcggtcgtagcatacatgtgcatcgtgctcttcgccgcgttcttcatgaaatcggccgtggagttctggattctggcgattctggtcggcatgttccaaggcggcatccaggcgctctcccgctcgtactacggcaagatcatccccaaggaccacgccaacgagtactacggcttctacgatatcttcggcaaaagtgcatctatccttggttcgttcatggtggcgaccgtgacgacgatcaccggaaacccctcgctaggcgttctctcgattggggttctgctggttctggctcttgtgtttttggtgcttcagaaggatccggaaagggcctgattcttacacaaaacgagtgtgtaacgacgatttgtgtaagattttgtgtaacgataagcgtttttgtgtaagtctgtgtaaccttgccatatgcggtgttgcagaagcctcacaaacggcggaatctcaatgtttcccgcacctttccaccgttccggaaccgtaaaggtgtgaccttcgtcacttttctcgttttcttgccgatctccgtcgattttgccgtgaagcgccctgatatctagttgccaacgttgcgaggattgcaggccaccgaaggcggccgcctcggacggaaggttggtaaggaacgatgaagatcaggatgaacgccgagcaggtcagcggccttttcgagttcgcgatgctgcaggatctcgacccggcggcgttggagccacagaaggtctcccgcgattccgccgagctgaagctggtggacggcaagccggtcttcagggtgagggtgacggccctcgaccgcgagagcgggcgcgagatggacgcggtttcgctgaaggtcaagaacaagccagcggcgaagatcggacgcaccttcgacctgaaactggccggtcaggtgacggtcacgccttacgtgaccagcgccaaccgtctgggatggagcatcgtggccgacgccttggcggagaagtgacatggcgtgggcggttctggctgttttgatcatcgggcaggtgctctgccccatcgccctgatgtggatgctggccgccatcgacggcggctggccgcccttcgggcctcgttacacggtggtgaaactggatggacaagcagataggaaggctgaacgcgcggatcccattggaggaactgacagcgttcaggacgtggtgcgcggcgcacgacatgacggtgagccgcgtgctgacgggacttatccacacgttcaacgttcgtcagcggaagatggacgaagcggaaacggagaagctgcgccagaacatcgagaaggcggcgcatctgaaggccgaagcgttcaaggagcagggatgtcagatggtgcgggattccgcgtcgagcttgagcggcgggctgccgctgccggttttagacgatgagcgctgatgatttgaggcgatggcgggcggtcttcactgcgtggggactcccgccttcttcgttggagggactggtgatagatggagatgagaacgatgacgatggctgctgcggcccggtgggcgggtgtgagcccgcgcatgctgagcctgttcttgaccgggcgcgtggtcgattcgctgagtgagatagacgtcgatgcggaagggctggctcctgagttggtcgattcgatgccgggccaaaacaccggcatgatggggaggagtagccgcaccgcaggtgccagacgcgggggtctgggggtgccggctgtgcagcgcccccagtgggtcgatgaggaggcgaagcgatgagttacgaaactgccgagtggtggactgttgagcaggccaccgaggtgagcgggctttccaagtggtgcgtccgcaagctttgccgtgaaggcgttttccgcacgagacagccgggacggtggtggcagatcgattcgtcgagcttcgtggcgtggctgttggagagctaccgatgacggagcgtggaagtgctgtagcggccggtggcccggcgcgagagcagacgcgggaggccgtgcctgacgaggctgggtgcgataggcgcactggacgccgcgaggtccggccgccgacggaggaaggcggacggcagccgagccggtgtctgcgtgcctgcgtgactgccgaagccgaggcgcgagccgaggcggtgcctgcgaggcggtgccgaaggtctagctggcaagcggggcacttccatgcgaccccgcgcagcgggacgaagttggggcttagtattaccccaacttcggtaacttgtaacaatggtcgataaacgttgaaatctcgcgatttacttcagtaacttttgttacaggagtcgggaatctgtaacttggcttcggtaacttcggtagcaacttcagtgacaaggagggcgaaggatgggcgtgaaatccgggcgggactggattctgaccgtttcggcggagaagcactcgcttgaggaagtgcaggctgcattagccaggtatcggtgggtcggacagttggaggaaggcaaggagcacggcttccgccattaccagatcgcgattctgaacgacaatccgatcaggttcgagacgctgcggaagaaattcggcgatgcgcacatcgaaccccgacaagggtcgcgtagggatctttacgcgtactgcacgaagcgcgatacgcgagtcaatggaccatggaacggtggagactgggcggatcccgatacggtgctgaaacgcgggaccgaacaaggaaagcgcagcgaccttgccgccgtccgcgacgccgttgaggcgggacaaggtttcaagcagattctgcttgattccgaactgagcggctcaagcgcccacgcgatgcagtggcttcgcgaggccgtggaagcccgaagggcggtcgaggcatcgggcaggatagccgagaaaacggtgatatatggttgcgagtcggcgttgagctcgaagctgcgcaacgacgtttacgacctcttcgagccggacgagatttacgaggtcgattccgtcagtcggttcgaccagtacgacggcgaacgggtgatggtcttccccgaattcgattggcgggcatggcccgtcgatttcatcacgcggctttgcgaccggtatccggtgaggctccctgcgcgataccagaaccaccagctaatggcggacacggtggtgttcctgagccacgagccggccacgtcgctctatcagggattcctcggcgaaggcagggtaaagctgtttagtctgattgaccagatcgttgagctgttccgggacgagacgtatttcgacctttccccgaaacgaatgttgcgggagaaacccgaagttttcgagccgcttttcgcgggacagcgaccatggaccattcgcatggaaggcaacaggcgcgttctcgtccttgactcggctccgttgcctcagcttgagggggagccggacgaggacgaagcggatggcgcggattgcctgtagccgttttttagcccgatttgcgcttgagatgatggggcgtatcgagatcggttttcactggcatcgaccggacagggtatcgcaggttcccgtgaacctgcatgcggtttcgaggcattgggactataggcaaaacgcgaccgtatacgacaagggtgggcacgccttgcgacgcacccaccctttttccagtggcagattcgaaaaccgactagccggttagcggcggaccttgcccgccacgaggaaaccggcggccaacacgaccagcaggaccagcatgccggcgacgccaatcacggacgcgccggtcttggacagatcggactgttcgtcgttcttggactcggacttcttgtcatccgcagccggcttgtcattagcaggcttgttgttggacggcttgttgtcggacggcttgttgttggacggcttgttgttggacggcttgttgttgccgccattatccggcttgctcggttcgaccggcttcgagggaacggtctcggccttcttcaacccggcctgggcgtccaccagcgccttcacggcggcgtccacatcggcctgcgaggcgtcctgcttggctgcgacggccttcgcgtcggccagcgccttggcgaacggagtccacgagtcggcggtgtagtccttctcggccagcttgcccgcggcatcgaccgcggcggtcagcttggacttgtcaaccggggccggggccggagcgtcgccgacggtcaccggggtccacgcctgcaccgtaccgttctcgtcctgcacgctgatcttgtgctcgccggcaggcagatcggccgggatcaccgcgtcgaagtagtacttgccggtggacgcttccttctgcacctgcacgaacggggagccgttcggaccggccagcgcctgcggctcggagtagatgtacgcgtaccagaacaggctgttcgcgtccgccttcgccttcgcctcgtccttcaggttgtcgacgtacacgcgggccttctgtccgggctccgcgtggccgtttgcgacatccagcttcgtgtcggtctttgagggcagcgcctccgccggcgtggccgtaggctcggccttcgtcgtgaaatcggggacaaacttcaacgcagggttcgtaccggcaatactcagatctggatgtaaaaccaacgtcttgttttccactttgatgttgggatccttgtagatgggctgcgcgtacaacacgacctgccggatatccaccggggtcttcgcttgcccgccctcatgcagcaggtcgtccgacttttctccaacggcattttggttgggcacttcaaacccttcaatagattgcttcgcgttgttcgtgtatgcggtgccgggcgtcagaccgatcagcgggaagtcgaaactgccggaggcttgaccattccattcatccttggtgtacctgtagaaatgctggccggacgccttggcgaacgtcgcgttcatgtccccccaagtgttagtccaaccgggcttatcaggcatgggagcactgcggtagacgcccttgtattccctatcgttgtggacaccgtaaatcgcgtcatatgagctggcggtcagatcatcatcggaaacatcggaacccgaattgcaatcaatgctatagaggggagagccccaaacaggctcgccatttatccacgcccgttccatcggggtgatgtcagtgatgcgctgcacttcaacgctgaagcacacatccttgatctgactcacctgtgctggatcgatcgaatagtcgaacgacacgttcgccgtatgcgcgcccacatccgacaccctcacgttggacaacgtgatcggattgtacttatacgtgacatccgccgcgttcgcggtggcgacgcccccgagcaatgtgcacgcggctacggccaacgcggccatggccttaccgaaacgcctcatggcattcccttctcctagagattcttcaccgcaagagacgaagcgggtctcctgctcctcaaaaacgctaccccccccccgcggacttagcgccccaactctcgtcttgctagtagtcgaagcccgtttcggggatggcgtcggccatcatgtggccgtagcgctggagcgtgaaggcggcgtccttgtggccgagttcccgcgcgacgatgggcaacggcacccctgcttggattctgctcgaggccgcgtagtgcctgagcgagtgatgggtccagcccttacgggtcttgctgttgacgcggttgatgggccattcgccgtggatctgcgccacgtagtcgtagatcagggcggactgcttcatgtagttggatggatgctggtagccgcctgtgccctcgggaatcgatgcgtcatacggccagttggggtctatggcgaactcgctcttggaggggatgcccctgctgaccgaggggaacagcaataggttcatgaacgcgtcgatctcctcctgcatggaaggcttgccggtacggggcatggtggtccagagttcgtctaggtgacgccagtagagccagccgagtggcgtgaaacccgcttgccagagggtgcgggcctcctcgtccgtggcggtccagagactgacttgggggtccgcgaagcggggcatgaccccggcgatctgggtgcggtgcgtcccgagcccgaaaccgttccagttgggtaggaaggcgggcatgtggacgattctatcgtggtcgtacttcggggtggtcaggcgcatctgtcccgccccgcctcgtgtgatctgctcgcacacgtgggtttccccacgccaagcggattcctcgcgtgactggccgagctggtagcgcagggcgacctgctctctggtgagaatgtgtctgactcgcagggcgaggacctcgccgatgcgcagtccgccaccggcccccaatgcggtgatgagtcccacgcggcggcagatcatggccttgcggttcatgaaggccagtcgggtggcgtggcgattggcgtcatccttgatttcctccggtttttgataatccgggtagatggtctcgaacgggactccgttcctgaagcaggtgtcgtccggctgggtgaggccaaggcccggagcgaaggacatgcggcgcgcggaccgtttgtgggtggcggattcgggattccagacggtcacggccgggtcgtccagcggattctgctgaagcgtgccgtaggcggtgatgatgaacgaggcgacgagtttggaggacgggatgtcgcctctggcgacgtagtccctgcgtttttcgttgcggctggatctgatgacgatgcagtcggcgtaatggtcggccggacgatgggtccagttttcggcctgttcgaagacgcccttgatgatgcgcttgacgagtattgggaactcgacgccgctgacttggatggcgcggatggatctttgcccgatggcggtgatggactgttcgccgatttccggcttgatgaagcgctggtagacgtagacgtagttggcggccgtctgctcggcgatctggggcttcttggcgtccatccacgaatggaagcactcatcgaaagtcggagggcgcacgccggactccgaatccggaacgtagtcgcccagtatctcggcggccttggccttggcgctgtcgaggctgtctccgccactggtctgccgacgcttgccggtaaccgggtcggtccatatcacgcgccatctcgggaatttctcggtaggcggcaacgcgctcgctctgccgttcaggattttgatgcttttccgtgccataccaaccgccatctgtgtaacatgaatgtgtaacacagccagaataacacagcaaaagccttgtatttcaacgattctagctattcttatgatagttttatcaagaccgcctcgatcatcggcaccttcctagtggccaccaccacgtccctgaccggcaacgcctcgttcggcgtgctgtccatcgccgtcctgctcgtcgcggcgctcgtcttcctgctcctgcaaaaggacccgacgcgggagtgatttgccggccctcggcaactctgcgccgcgggcgacatctcgcaacccctgcaacgggccctaatagcaatggaccatcgccacttgatcacttacgctcgcgataatccttgatcagctgaatggcgacggccgcaacgccgcacagcacaccgccaatcggccacggcagccagaacatcgccccgtccgcggcgctcgacccgacggccgaccaatcgccgcgcaatgccgcagggttcaaaaacagcaggcacaagccagtcgccgtggctatcatcatgatgatgccgcataccgcgccggtcagtttggcgtagaaatcctgctcgcccgcatgctccttgcggtcgtcctcggccgctttgttgtatgcgttgatattgagcagactgtatctcatgccgcagtagacaaacccgaaaacaccggacgcacagagcagcagaaaaattgcgttgggccagccatcggagacgccgagcatgtcatcggcatacaccgtcaccgcaatgccaatcagaatagccgagatgccaccgacgatgccgattaccagcagccgcaattctcggctgcggtcctccccggtgtagaaatcttctacgtatgggtgacgccgtttgaagtcaatacgcgacagacctcctggaatcagcatcgccagccccgcaatcacacccacgcagacgcacagaaacgtcagaaaatcgttgagcggcgtcgctccgagaatggaattgccggaatcgaacaggttgccgatgccaaccccggcgacaatcgcagcaacaccgccggcaatcagcagcgcgaatcggcggcgatgttcatcgtagccagtgatatcctgcgcaagctccgcgataggagcgattatgcccgccgttttggaagaagcggctaaaggcgatgccgtctcagccgaggagtcaacattcgacgaaccggccgcagaagccgacgcggcaggccgactcacatcgccaagtaccagatcatcaagcgtgcagccgaacaggtcgcagatcataagcagcttgtccatctcgggataggccttttcggattcccatttcgaaatggcctgacgcgagacgccaagcaacatggccaatcgttcctgggtcaggttgcgttgcgcacgtaggtactgcaggttagcgcgaaaactcattggaatgtcccttcatacgtaatctttatcatgtcatgttcggccgatgggctcactatggcatgccgtccatgtcacccgccaccatctttgggttgcaatcgccggttattcgagcgcaaccacaagttgcatcggcggaattccgccattccgttgacctgagcagctttaacatcgcactccacgagaccgaagcttttccagccatgcgagggcagcttgtctcacctgccaccacgaatccgcttcgacccacgtacacatctgtgtacagcagcgctcgcaatcggttacctacgacccatatgatttgctgagcgaccgcaaaacacgcaatagccgagacaacaccgtcagcgttaaagcttaaggcgactacttgcccaatagtccggaaatctggctgatgatgtcagcgggcagtcctgcttgttcggcaatggatccgaggtccagattggcaccctgctcctgaattgcgccagcgacctgactgatctggtcggcggagatgttttcctccgccagcgcctgcagctcgtcaagtcggtcggcgttcaaatggtcgccaacgacctgttgatttcacccaactgatcggcattgaaatgctcaccgattaccgccggcaaatcaccaatcgaaccgagattgaaatccccgccaagcacattgcctagattgtctgcggcaaaatttttcaggctatcgagcagtcccacatgtgccgctggtactgcttgttcagcaactgctgcagagcatcgcacagaccctgcatcaatcgccgctcttcggcagacaagtcccgcgtgaaaccaatctctgcctttgcgctcatcagctggggagctcacggtcacactcatgcgtcgcagaccacgagcctcacgcgcctcctcattccacatctgtgttaacaacatgtgttaatcgcatgcatcgccaccatgattccccaatgatttcaagggttccccggtctcactattgtttcttccctaaaacggcctcaatcatcggcaccttcctggtagccaccaccacgtccctgaccggcaacgcctcgttcggcgtgctctccatcgccgtcctgctcgttgtggcgctcgtcttcctgctgctccagaaggatccgacgcgcgcaaacgtgctgagacatcgccggtgaaccaagttctgcctttttaccgacgccagctcgcataagcaggaatcaaacgtcggcgctgggacacagaacgggaatccgccgacgttcagagtatctgatgtcggtgccgggccatgttttggacgccaccgacacaagtaccactcttggcgacggtggtggggcatccgctgtcccaccaccgtcgccaatcgttctcagcggcgttgacaatccattatctgtcctttcaacgccgccaaacgtccacagcgtcggcgacggtccggattttgacgcaccaccgatgcaaaaccattgcaggctccgtacggaacatcagccgcgaccaccgaacgagcaccagatgcggcatcagccgcgacaccagccgcacttatcgacgcgcccttaccgcgtcatcacgtccatcaatacaatgactcatcggcatatccggctgcagcccaataatcgtcggccgatagcgagcgattgaaaccggtggcatgatcgcttccgaggtcgccctcgccaccgaaatcgacatcgaaatcagtaccagcatcggaagtaccgccggacataccggcaacggacctgacttcggttttcagcaggtatttctccgcgaaattcagcgtggtgcacaccatcgcaaacccctttccatgcgcgttgccctggcggaccaagacgtccttgtgtaagtaagtatggcggctccccttccgcaccgccatatccactatggaagcgcgccgcggcacacgacacaagccccgggacatatgaagaagttatggccggttcaaagcacccgtattacagcccaaacggcaccgcgcgcagcgggattgcacgacggccggacgccactcataatcggaaaccgctcacagccaaatgccacccgaggccagacgccatataaggaaccgtggcacggcagatatagaaaatgcccgccatcatagactgacgagcgtgatatcgggtgggcgatgtaggaatcgaacctacgaccccttcggtgtgaacgaagtgcgctagccgctgcgccaatcgcccgagcttgtgatgaaaaaaccggcaacattctgccggcgattcatcgagtgggcgatacaagattcgaacttgtgaccccttccgtgtcagggaagtgcgctaccactgcgccaaccgcccgggtcatcctcaggctgaatcaatcatcctgaaccagccatccgagagcggacaacgggactcgaacccgcggtctcaaccttggcaaggttgcgctttaccaactaagctatgtccgcatgtgttaccttcacgggcaacaggtgacaaagatacgccaatctcaggaaaaagccaagcccccgcgtgtcccaccggttttccaacgattatcgggtgccgtcgtgcacataactcgcggtggccgtatacagcagccaggcgatgggcatggccagcataaacagcgggtagaaccaagcgatgggcacatctggcacggccatggccgtggaaatcaggaacgcatgacgataaccgatcagctggccgaagaggccaaggccctgatcggcgaccgtgccgaagtgaagttcctgaactacgccgacgtgccgttcttcaaccaggacgaggaattcccgaacccgacagccgccgtggccgccgccttcctggcgctcgttgcggagtaatcccgcctgaatcttggttacgttccgcctcaaggcggacggcggaccagctgcatcagcaatgtgccgaacccctctgattgactccaatcagaggggtcgctgcgtttcaaggggctgatttggccttctccggaggtctactcccgtttcaaggggctggtggctgagtagacacgggccaaaaacggcgtaatgacgttagcccggagccgtttatacttgtggtttcccggatgaggagcccctcgaaacggagatagacctccggaacagcccaaatcagcccctcgaaacggagttagacggttgggatgtcggaaagaacactcatgccggcccaagaacccccactatgtcagatatcgctgcccagcacgcaatactgaccgtacagcacgacccgtccttcatgaaatcaggcacggtatgggcttcatccctcaacgcgcgataatggcggtatgacgcaacgacaactgatgcgggccacagtcgaaacgcccatcggccggatgatgatggcctcggacggcgagggcctgaccgagctctgtcttgaagactggtggtgggccaccgaccaccaagccgttctcgactcgaaccgcgaacccgatcgtgaacccgatgtgttccgtatgacccgcgaatggctgaccgcctatttcgacggcgaacgccccggctcggatcaggtgccgccgttgcatcccgccggcacgccattccaacatgaagtgtggaatctggtggccgagattccctatggcatgacggtaagttacggcgaactcgccgccgaattggccgaacgacgcggtggcggccgcatggccgcgcaggcggtcggaggcgcagtgaagcgcaatccggttactatcatcgtgccctgtcaccgcgtagtcggctcgggccgcgcatttggcggctacggcggccgactcgacatcaaggccgaactgctcgaccacgaaggcgtggatctggcccgcttcgatctgccgaacctttgacggccccagcggtccgcctcgtcaaaaggattgagtggttacccctcccgccggcgggaagtggcacgtaacgccggagggtggtcggctggctggcatcgcaacccccgctacccgacaattttcgacaagctgacgggaatcctcccacgaattgttcgccgtcggtgcagtcttgctcgatcgcgccggccaaaaccgtacaatccctacaatggaatgtatatggttaattgctgcgcgcagccgcacggccgcacgcaatcgcaagaccacatggcccaaggggatatgcaatatcaacggaagcaggaggtgcgtatgaccggcattatcgattacgcgcacaccgaaacgcgctccttcgccgacttgccgttcaacgaaatcgacgccttgatcatctccacgctcatctatgaggatgtggccagtatctgtccgacgttgatgctggatgagacgcagtcaggctcgttcgccgcacgcattcgcgctttcgagcccaagcatccactgatctggctgaagggtatctggcatcccgagcttgaatcggtaagccttgacgaggccaaccgcgagctgcatcgttcgccgaaaacgcatgccgacgacaagccgcacgaagcccaaatggtttcagtggtcaatccggacctgacccacgacctgttccaggccgcaggcgagaacccccgctacgccaacgttcgcctgggcgcggtggtcgagcacatcaatcagggcgagcaaacccaattcgccgccgccaccttccaactgcccgacggccacaagcgccggaagccgacctacaaaggcacgttggttatttccttccgcggtaccgatgattcgctcatcggatggaaggaagatttcaatatggctttccagtatccggtgccggcgcaacgttcagccagcgcctatctggatacggtggcgcgactgtgggagggtccgattattctggtcggccattccaagggaggcaatctggcgatttacgcggccatgaacgccgaccccaaggtgcgcaagcgcattcagcatgtctattcactggacggccccggtttcccgccggagattgtgaccagccccgcctaccgcaccatccagccgaaggtgacgaaaatcgtgccaagttcgtcgattgtgggcatgattttcgagaccccggagccttgccgcgtggtctcttccgattcggatggcattatgcagcattccgccttcacctggctattggatggcgaccagttcatcaccgagccggatttgagttccagctcgcagttgtttaacgaggagctgaaccattggatcgccacgcttacgcccgaacagcgcgagcgtgcggtggacgcgctgttcaccgtgctgcacgccaacggcgccaccagcttcagcgaggtgatgagcaacttccccgcttcgattccggcgatgcttggcgcgtatgtagggctgacccccgcagaccggcgtcatttggttgaggccctggcgatactgttcaaggcgtccacggccaaacgcaggccgacgcccgccccggcttccgcgccgagttctgcgaccgccaaaggaacagccgaaaccccagcaggaactgcgacaggaacagatagcgcggccccggccagcgccgataccgacaccgacactgacaccgcagcttcgccctcagcggaggacgcaactgaaatcgccgattagctcatagacatgtccacaaataatagttatactgcccaataagttattagacagcgtgaccatatcacgctggtgcatcaggaggaagagatgccacgtccacgccatgattccgaggtgctgcccgccaaagaacgcctagagaacgctttctgggaattgctcgccgaccgcgactaccgcaagatcaccgtcaccgatgtggtgcgtgaggctggcgtgaaccgtaattcgttctattatcacttctccagcctgcccgaattggccgattcagccatcctgcatcaggtcgaatcgattccaatcaaccgcacccccgacccaaatggcaatcccgaggaacaatggcgagaccgcgtcaccgccacgctctccgacccggagcagcggcagcgcctcgaccgcctggccctgttggccggcccgcacagcacgcttgaactgaccgaatcgctgcgcgacttctgccgtctgcaaatgctcagcacattgcaacgcgaccccaagaaccttgacctgaaaaccgatctcatggtcgagttcaccgtgggcggcatgctcgccgtgctgcaacgttggcccgaattgagcgacgccatcgaaatcaaagacctgcttaaagaagatgtggccgtgctggccatgggcatatacctggccatgagccaaaaggacatgcttaattactggaatcgcatcttcgtgcacaatgcgcaggattcggccgcccccggcatgccggccgccgccacgcatgccgcgccatcccccatctcaccgtcgaacggccccgcaggattccccgggtacaccgcttgaccgaaaaccagtgagtctggattgtttccgtcgaatgaacccccgcgtgaggtttctcacaaggcgcaatcagcctctcatgctggcgtttccagccctcacacaggaagatggaagcatgagcgaaacatcgaacaaaacccgtctggaacatgactgcatcggccagatggaggtgccggcgaacgtctactggggcattcacacccagcgcgctatcggcaacttcccggtctccggcatcaccgatagccaacatcccgagctgattcgcgcctatgccacggtcaagcgcgcctgcgccatcgccaatgaggaattaggcctgatcgacccggccaaggccgaggccattcgcgccgcctgcctggaaatcgaggccggcaaactggccgatcagttcccggtcgatgtgatgcagggcggtgccggcacctcgtcgaacatgaacatgaacgaggtgatcgccaaccgtgcgctggaaatcgccggccaccagcgcggcgattacacatacatccatccgaacgacgacgtcaacgagtcgcagtccacgaacgacacctacccggccgcctgcaaactcgcgcttatcgacgcgatcgggccgctcgccgagtccaccaagaaactcgccaaggccttccacgatctggccgacaaacatatcaatgacgtgacgattggccgcacgcagctgcaggacgccgtaccaatgacctatggtcaggaattccatgcgtttgccacgctgttgaagtctgatttggctgcattcgatcgcgtggtgccgctgctggcccagctcaacctcggtgccaccgccatcggcaccggcatttgcgcggatctgcgattccgcaagtccgccatcaagcatctggcgcagatcaccggcttgccggtcaccgccgcgcccgatccggtggccgccatgacggatatgggcgcgtacgtggccacgtcggccgccatcaagagccttgccgtgcacctgaagaaggccgccgacgatttgcgactgctcaattccgggccgcgctgcgggttcaacgatctcaacgtgccggctcgccaggccggatcatcgatcatgccggccaaagtgaacccggtgatccccgaatgcgtcaaccagtgctgcttcacgatcttcggcatggacgtgactgtgaactgggctgtggccgagggccagttgcagctgaacgccttcgacccggtgatggtgcatgagctgctgaccggcatggcgttgctgacgcgcgccatggagacgttccgcgtcaattgcgtggagggcatcgagatccacgtcggtctgggacgctcgtatgcccagtcctcgccgtcgatcgccgccgcactcaaccactacatcggctatgagcatgcggccgacatcgccgccgaagccgtgcgcaccggtcgcaccgtgcgtgaggtggccggcgaacgcaccgacctgcccgccgagcagctggacgagattctcgatccgattcgactggcccgtggcctcggccaaacctgccgcgagcatcgggactaggcgtcacggcgacgtcatcaccacgacgatgctgcaccgcggtgccgcggtggtgccggtggtgccgacggcacgccaccggtatcgcaccatcggcaccaccgcaacggccaaaacccgacgtgggcccgcatgtttacgacttcaccagaaatggtcgatacagtagggcatatgaccgaatatgcacaagacatcgcacgctggtttcaggtgaacgccggcaaactcatctggctggccgtcgtgctggccgtcgtgttcgcggccgaccgcgtgatcagccgcgtgctgcgcagggttctggatagttcgcagattcccagcgcctcgattttcgtgaatctcacgcgcgtgaccatctgggtcaccggtacggcgatggtgctgcaaccggtgttcggcatcaatccgaccaccctggtcaccgccctcggcgtcggaggcgtggcgatctcgctgggtctgaaggatacgatcgccaacatcatcggcggcttcggcctgatgctgggccgcgtaatccaacccggcgatctggtgaccattcaaggcgtcacaggtaccgtgcatgacatcacctggcgacagaccgtggtgcgcacccgctccggggacatgatggtcattcccaattcggtgctcaatacggccgccttgaccaagctcacgccggccagcgaaggcatggccacgctcgaattcacggccaaggcctccggcgatccgtccgcgatcagcagggatattctcgaccgcgtaaccaaagccaccgccgacgtggcactggagggccagccaccgctggtcaagttcaccggtttttctccttacggcatgaccggccaagtgctggtgttcgcgcgcgagggtgtgctaccttccaccatcaaagatatggcggcgcgagccatcgccggttcgggcaccgaataccttgtcgaagatggcggctcgtcagacaatctatgatatctcccgactcgcctctctgggtccggctatgacagtcatgcgaacagcatccaaccggtaagaatcacagtcaacagtaggtacgagataacgccgggattggcataggcggtgcgtattttaagccccgcaggcaactcctctggcgcaagatagaactcccagctcttacgcttggtgataagcagcacgataccggcaatgcagaggcccaacatcactgtgccgtacaacatcatgatgcccatgccgcccatgttgccggtttcagccatacgcatgatttcggcctcgctgattgtgccgtcgaggatgcggggatcgatctgttgtatcaccaatggggcgagtactgacccgttcaggttgatcagcatgtgcatagccaccgaataccgcagtcgggaagtgcgtgtgtatacatatccgaacatcagtcctaggccaaaggcgtagaagaactggaacacgttcatatggaatagcgcgaacgccaatgcggagaacatgattgcggtcttttctccgtaccggcgcaggcgggagataatctccttgcgaaaaatccattcttcgcaaaccggtgccaacaggcctatgaacaatgcgttcacccgccagtcgctgccaagaatcacgtcgttgatgcgattggtggcctgaccatcagtggctccggcagacaatatattgccgatcatattgcccaagagcattaccggaatgcacatgacgaaaatccgaatgaactcccccgccttcatggggtactgccgggtgcgaataaccggtacgcgagtgaaggccaacatactcagcggcatggccaccacatacagcggcccggaggaggcgagcagcacagcccaagcgggcacatcggcgccaagcagcgttcgtagtgcttcagtggccagaatattcagcccgatccagaacaccatcataatggcgagcgccgagccgattgtcgaaaaccggcgatgggccgtgaaccaccaatcgcgtggggtttgttgcggctgctgcgccgacggcattggttcgctcatacttatcccccatagtcactggccgcaaacggaccgatcacacgtgcaatactcttcaagaatacggcacggcgtttcgattgcattgggaatggggaaaatcatcaatgggcaaggaatgatctacgtcaatcaatccccatgccgagagagtcctctactctgcgggattgttgtgggacggcacgcgattttacccgattttttcgcggcggcccacaccactccacatatgactgatgacgccgcacgaagaaatggcgtcattgcaacgattcctcaatacaatctgtgggacggcacgaatgtacatcgtttgacgttcatgccatcccacaccggcgtgggacggcacgcgataatcgcccaaaaatcgccgccgtcccacacacatcattgccgataagccattcgacgatcgtacagtcacaaaaaacagaacagaaccgcacgatcatcgcaacgccattcagcaggcgagcgcggcgaccggacgcggggcgacaatcacgtcatcgcccaccgccagaccggccggcagctcgctggcgggcagctgcacggtggccttgagctgttcacctttgttccagcgctggtattcgccggaggtgatgaccgtgtccacacgaaccaaagagccaaggaagtgaatgacctccacgcgggcgcgttcgccgacgtgcgaatcgctgctgccagccaaggccagcatcaggttctccgggcgcacgagcacggccacggaatcgcccttggcggagccggcgagcagcggcacgcgctggccgaagaccacggcctcgtcgccattggatgcgccgagcaggcggttggtgagtccaatgaacgtggccacgtactcggtggcagggcgctggtacaggtcctgcggggcggcgatctgctcgatcttgcccttgttcatcacgccgatgcggtcggccacggccagcgcctcttcctgatcgtgggtcacgaagacggttgtggtgccggtggtgagttggatgcggcgaatctggtcacgcagctggacgcgcactttggcgtcgagcgcggacaacggctcgtcgagcaggagcacgcgcggcttgatggccagcgcccgggacagggccacgcgctgctgctggccgccggacatctgctgcgtgtacttcttggcctgatcggcaagccccacgagctccagctgttccatggcgatcttgcggcgttcggccttgcccatgccgcgcacttcgaggccgaattccacgttctccagggcggtcatgtgcgggaacagcgagtacgcctggaacaccatggccatctcgcgcttgttcaccggcacaccggtgacgtcctgtccgccgaccatgatgcgtccgccttggatgtcttcgagaccggcaagcgatcgcagcgcggtggacttgccgcaaccagatccaccgagcagcacgaccatttcgccgggcttgatgtccaggttgaagtcgtcgagcgcgtgaacggtggagccgggatagatcttgacgacgttctgcatctgaatggaaccaccgccgcgcttggcggtgtctttgagcagggccttggcagccttggtcacgtccttgccgcgcacgccctcgagggtagcggtgggatcgttcttgaaggcgtcctcggcagtggaggacacggctgccgggatggccggggacgccggggcggcgtccactgcggtaccggtttcctgacgggtgggagttgaatcgttgttcatcgggtcacttaccttcccttgacttacgcattgcgtcggagatcaggtcgagcgcaacgaggagcaccacgccgaagagcagagccagcagcgacatggcggtggaaatttgggcattggattggccgagctggtagagcgcgacctgcaggttcatacggccgagcagcgaggcgacggtgtattcaccgagtaccacggcgatggagatgaaggatgccgagaggatcgactgccacaggttcgggatgatcaccttgaagaacactttgggccaggaggcgccgagcgatcgggaggcttcgaccaacgtcttgacgtcgatggagttgaggcccacggcgatcgcgcggaaggcgaacggcatcacgagaatcacataggcgaagcacagccagatcgggttggtgctcaacacgtcggcggaaagccaacggtagatcggcccaagacccaccaccagcacgatgaccggaatggtcagcggcagcgtggccacccattcgattgcacgctccaaggctttggagcgaatatgcacgatgaccatggtgggcaccagcaggatgagcatgatcacgacggtgacggcgctcaacgacagcgagatgccgacgccctgccatagcacgctcagatcggcgcccaacgattcgccgttgccggtgaaaatcgccgtccacggcgcggccgaccagcgaccggacaacgggtgacgcagggtgaagatgaacatggccagcagcggcacgaacaggaacgccagggtgacgaacaggatcacgaatttgatgatgctctgtttgcgcacgcgggcggcacgcagctgcggcggcttggttgtggaagtttcggtcattgccaacgtccggccctcttttccacggcgtggctcagcagcatgacgatggccacgacgatgatcattgcgaatgccagcacctgcgcgaagccctgctggttggggtccatctcattgcgcatggcaccttggatcatcaacggcaccagaatcgagcgctgcgagaacagggctgcggcggtcgcgtatgcggagaacgcggaggcgaacaacagcaggaacgccgagatgaagcggggtgcgaggatcgggcaggccacgcgcgtccagtattggacggtgttgccgccgagcgactcgcaggcttcgcgccactgtggacgaatggaatcgaccgcaggcaggaagatgatgatcatcagcggaatctggaagtagcagtagacggtcaccagccccggcagggagctgagccaattcgggttcacggtatagccagtcagggttttgatgagcatggtgccgatgccgttgatgccaagagtggcgatgaacgcgaacgcgagcatcacgccgccgaactgggcgagcaccgatgagatggcggcgaccatacggcgcagcggtccgttcggcttggcgccgatcaccagcgcgtaggaggcgagcgcgcccaccacggcaccgatcagggatgaggccacggacaccaggattgacgtgccgaacgcggcgatggtgttggcttcgaacatcttgtggaagttcgcaagcgtgaaaccgccgctgcgatcctggaacgcgccgatgatcacgatcacggtgggtgccagcaggaagcaggcggtgtaggcgaagaacgggagcgtggtggcgagcgtgccaagctcctgacggtgcttcgccagtgcggacgaagcgggggtcgatgcggcggacggacccgcggccttggaggcggcgggtccgttcggtgcgatgggtgcgattgcggcggtcatcgtggactctcagttgccgatcgtcttgtcccagttgttttgaagccactcggtgatgcgggtggagtcatcgttgctgtaggtgaccggctggccttcgatggtgatggcgtccttcagggtggcctggtcgacggtgccgtcggccttcatggagtcgagcagcaccgggttggcgccgcccttgaaccacaggttctgggtttcggcggtgtacaggtattcctcccacaggcgtgcggcggcggggtgcggcgcgtccttgttgatggcctggttgtagtagctgacgacctgggctttggggaaggtcttgtacttccagttcacgcccttggacttgagttccttcttgtaggaggcctggttgtaggtccagtcgaagaccacgccggtctggccggagtcgatggtgccgttggtcacatcgatggtgttcaggttgccggcttccttgagcttcttgaagaagtcgagaccgggctgcaggttgttgatgtcgccgccggcgagctggttgaccatcagatagccgttgaaggccgcgccggcctcggtaggcttgccgttcagggacacggtgccggcgaacttcggatcgagcaggtcgttcagggaggcgacatcgccgtacttgtcggcgttccagcccacggacatgatgccggtgtagtcggcgtagtaggcgccgtcgacgttcttggcagcatcagggatcttgttccaggcctgcaccttgtacggggcgaaatagtcggtggaggtggcggcgatggcctggccgacgtcgaagacatcgggggcggcgtcggtacccttgttggtcttggcggcgtcgatctcctccttggaggaggcgttcgggttcagctcggtgatcttgatctccgggtacttcttcttgaagccctcgatgacctcgccgtagttggaccaatcatgcggcaaggcgatgacgttcagcgcgccttcttccttggcggccgattccgcaccacacttacctcagcacgccctcaatcaatcgcgtgatgagttcggtgtagctcactccggtggcatcccaagccttgggatacatagaaatcggcgtgaagccgggcatggtgttgatttcgttgaccatcaccgtgccatcaggcgtcacgaaggtgtccacacggctcaagccggcaccatccacggccttgaacgcacgccgggccacgtcacgcacgtcctcaagcacgctgaccggcagattggccggcacttccacatggctggcggaggcatccatgtacttggagtcgaaatcgtagaactggtcgtcgttctgatgatcgagcacgatttcgccgggccagctggcctcgggctcgtcaccggccttcgggcacagcacggcacattcgatttcgcgaccatcaatcccctgttcgacgagcaccttccaatcgtgctcgccggcggtggcgatggcggcggccagacgatcctgctgggtctcgcggtcatcggctttctcgaccttggtcacaccgaagctggagcctgcgcgcgaaggcttgatgaacagcggataggtaagaccggcgtcctcgatcttggcaagcacatcggcggcggtgaagttgcgcgcatcaaccgtcacacccggcgcggtgggaatgccggcggcacccagcaccaccttggtgtaatgcttatccatgcaggcggcggaagcaaacactccgcaccccacgtacggcacacccatcatttccagcaggccttgaaccgtgccgtcctcgccataggggccgtgcagcaccggcagtaccgcgtccacatggccaagggaggtcagcgcatggtgcatttccgggtcggacatgctgacgaagctggtgccgaagccggaatcggcggaattgatgtggcgggtctcgccgatgaagaaaccgtcctgtccgcgagaggggtcaagcatcaccgggcgcgatcccggggtgatctttacggtcggcagctcgccgccatccagattccagccacgaggatcttcgccgttgatgatccacttgccgtccttggtgatgccgaccggaatcggctcgaaccgttcagtgtccatggcccccagcacaccggcagtggagatgcaggaaatcgaatgctcgtctgcacgcccaccatagagcaccacaacacgcttcttggccataaccatccttttattgaaactacaaccgttttcaagcctatgctttgcaccgccaaccggaccgaaccgcgctcggaccgccgcgcacaagagacgcacaccagtctactcgcgcacgtcaacgacgtatacgccacacgactttgcacgtacaacgtatacgccacgtatacgtcgcttctctcgttattcgccggtaacctcgtgcccgaacagtccggcaagcatctccgagcaggaaatgccttcgttcagcacgcggctcatctgatacgccaatggggtcggcacatcaagctgctcgccaagagccaccaccgcatccgtggtgggcacgccttcggccacaccgttgctgaccttggtggcctcctcgaccgtcaatcccttgccgagattcgcgccgaacgtatagttacgagacagcggagagccacaggtggcgatgagatcgcctacaccggccaagccgaagaaggtcttgggatcggcgccagcggctgcgcccagcgcggtcagttcggccagtccacgagtttcgatcatggctgcggtgttctcaccgtagccggcaccacgggccatgcccacggccagcgcggtcacgttcttcaggctgccgcacatttccaggccgatgacgtcggtggtcacgaacggcttgaaataggaggtggtacatgcctcggccaccttcgtggcattatcgaggttcgtacaagccaccacggtggcggcaggatgacgatcggcgatttccttggacaggttcggtccggaaatggcggcgaaccggtcggccggcaggtcaagggattcgcggacgacttcgtccatacgcttgttggtgccacgctcgatgcccttcatcaggctgacgacgatggcgtgatcgggaatcagtcccttgaattcgacgagtgccactcgcgcgaactgcgcggcgatggccacaaccacgatgtccgcgttcttgacggcttcggcgcgatccccggtggcggtcatgttgtccggcaacttttcgacggacggcaggcgcacggcgttgtggtggcgatcgcgaatgccctcgacaatccgctgctccttggcccacatggtcaccgtgttgccggcgtccgccagcacttggccgaaagcggtaccccatgctcctgcaccgagaaccgttatatttttacccatatcaaattcctaccttcgcttgtcgcgcaacttcatcggtacaatcttgtgccatgctactcgcctaggctccccgtacgggaaccggtgcggctacttctcagccgggaacgggccgccggcttcaggccaaggcttgcgactcatgctgcggtagtcccagtagccttcagcggggaactgttcgccacgaatttcctccagtactgtgttcatgcgtttgagcacgcgccacatcagctcgttcacggcctcggcaggcggttcttcaccccatgagtccatgtcggcaagcagatcggagtaatcgagcgcatggtcatagcacatcaccacgtttttgcgcggccatggccaccagtggttgatggaggcggcaccccacgtcaccgccgggtacagcggcacctgatgccccagtctgcgcgaggattcaagggcgatatatcccacgccctccttaatgctcatcacccactttttcgggtcgcgggtcacggtgccttccggccagaccgtcagcgggcggccggacgtcagaatatcaatcgaggtctcttcgatctgcttggccttgcccgaatgacgctgcaccggctgcatgccgaccaaccggaaccacttgccgatcaatggccacttcgccatctcggccttggccatgtaccgggggcggcggcccatgtggaacaggctcatcatcggcacgaacacatcaaacatggtgatatgactggcggcggtgatgaacggtccggtttccggcacctgttccaagccccaggccttggtcttgcagctggcgcggaacacaatggacacccctcccagcagtcgtttggtggccttgggattctgggcgtcgatttccggctgattgggcgtgcgagggccggtcgggtaatactgtgtcgagtccacaagcgtgtggcgggcggccagacgcttgacctgctcatcactcagcgggcttacggccgaacgcggcgacggttttcctttggatgccatggtctctattgtggcacggaccaccgcccaacgattccagcgcaacgttcccgggaacgtgtcgcggaaccacacctcgcaccccccgcccagcgaaacattccccggaatgcgtcgcacaatacgcggcggcccgtctgcacacaccatgcgcgcagacgggccgccggggaaacgttcgaatcactccaccgcgatggcgtcgatctccacgagcgcgcccttgggaatcatgttgttgccaaaggccacgcgggcgggcttgacggagccgatgaacgcctcagcgtaacgtgcgtccacttccttgaagtcctcgacgttcttcaggtagatggtggcgcggcacacatgctcaatgccggtaccggcagtgtcgagaatgtgcttaatattcttcagcgcctgtgcagcctgctctccagcggtctcgcccgccagttcgccggtggccggatcaatgcccagctggccggatacgaacacgaagccattggccttcaccgcctggctgtatgcgcccagcgcggccggcgcctcggaagtggctacggcttccatcttttcgctcatattgtgctccttctcatcttgggggcgcccacctgctgcggccggcgccggtacacatcaccaccggctacgaccaatcgcacgatcagcaacgattggcaatgccgattacgtagcagtctactgagcgaagtcgcgtttagcgcgcatgatgcccggcatacggccatcaacagactattccttgctattccagacgattccagacgattcgactaccgttctcgccaaaccgggcggtttttccacgacccaagcgagccggcatcaccgacaccagcaccagcaccagcaccagcaccagcaccagcaccagcaccagcaccagcaccagctttgcacgcgcttaatatcacgcgccgaatatgcaaaaggcttccggcggctagccgaaagccatgctggtgggcttgatggggatcgaacccacgaccttctgttccggagacagacgctctatccactgagctacaaacccgagcaacttctttactgtacaccacatcacgctgcatgaggcacatacgtcgccaaaataacgagaaaatcgccatcatcggccctacaatggggttatgtcggaacctacagatgacttcgaatacgaacgccgcttcttctgccgcgagctgccggcggaatacgacgacggcgacgccccgaccctcattattcagagctactacgtgcatgccgacaattacgccttgcgcgtgcggctggtctcgcacaaggtgcacgtcgacatgacgcccgacgtaaatccggtggccgtgctggacgaataccgcgaccggttctcggaagcgtatgtcaccgtcaaaggtccgtccgtgggtggcacgcgctacgaggtcgagcgcgagatcgacacgcgcatcgccgccgaactcatcaagcgcggcggctcggtaatcatcaagaaccggtattccgtgtggattgcggaagacggctggagcgtggacgtgttcggcgggccgaacgcgccgctgatcgtagccgaggccgaacgatccgggccggttaccaatctgacgattccgaaattctgcatcaccgaaatcaccgatcaggcgcgattcaataacgatggtctcgccaaccgtccgttctgcaagtgggcggatgatttcgaggaggagctggcgctggaggggccaaggttccagcaatatttcgggaagaatcggatggtttaggggaagcaatcaagtacgttcgcgcgcttccctcagtcatctacgcctgacagctcccctcaaagaggggagccaaaaccaatcagtacatgagggtggctaggcgacggcgggcgcgagccagacgcgggtcggtgggttcggggatggcgaagtattcgagcagacgcttgcgaaccggctcgatatcggccttgtgcccggcggccaaaaagtccagcaaacggtcgaaagcgtcttgaatctggccaccgatcatgtcgatatcagccacagccaactgcgcttccacatcgtccggcgctgcggcggcagcggcacgcacgtcacgtacatcagcggacccggagcgggccagcaacagcgccttcgcacgttcgcgggcggccagtgcatcggacgggtcggattcgagcacgcgctcgtattcggcggcggcaccggcgtaatcgccctcctcggccaaacgatgggcttcggcatgctccggcggcacctgctcagcacccacgccggcaccggtggcaccagcgctcttggcggcatcggaatcaggatcacccgagtacggcgcggtaccgttcacaccagactgcgcggcggcctgaatgatcttcggaatcacctcgtcggtaagttgcttgagctcgtcgtcacccggaaggccctgcaacagtggcatcggacggccggcaatcaacgcgaacagtgcgggcgcgccctgcacctgcaacgcttgggcaatcgaaggattggacgagatatcgatacgggagagctgaatctggccgttcagggcgttcaccgcgtcgcccaacgcacgggccatcgggaacaggcggtcatcggtcggtatccacaggagcagcaggatcgggaaggtcgcagaagtctgcaccattgcctggaaggtgttttcggtggtgtcgatcacgtacccaccagcggcaggagcgccacccgcctggccgggctcggccttgacctgatgcttcagcgcctccaaatcgacggcgcccgccaatgagactcccggattgaactgctgctctaccataatgcctcccgattccacgcgattcgcgtacaacaacaatcacatttgctgacattgattgtaatgccgattcccaccacgtagggattcttccactacgcggtgaaattcccaccacgtagcaaaacgcccaccacgatgtgactcaaaacggcaccattgtgcgaaaggtaaaacttaccgacatcgtggtggatgaatcatatcgtggtggggcgttaaccgcgcggtgggcggcggcaacaactacagcgcttcgacctttaccggctgacggtcggcgcccacggcggtgatttgctcaccggagcttgccaacggaatgtacaaggccaccacgttcacatacgtgaccttcatggtgctggtgtacttgtcgctattgaacagcgccttctcgtcgtcggaagccggctgcgattcgcggccatcccccgccttgcgagtccattcgccgttaatacggccaaccaccaaatcaccggcaccgtctgcagcacgcatcacccacatctgttcaggcacaacggtgaatttctgctcctgcgtaccgttgttgcgttgcataccttcctgcaccttggccgtggtattggccagttcctggcgcagcaaatcgtctgcgaacttggaagcgtattggctcttggagccgttctgcagcacatcggcgtattgggtcaaggcatcggcgggagtggccaccagcttctcatcctttgcagtgcccatccgcgagccaatagtcggaatctcgaacttcggcagcttggccccctcaaacagtcgagccatggccatcagcttgtaattctgctgggcggattcctgatcgaagaccagcaaacgcttggactgctgatcttcggtggtggtcgtgatggtgaacaccgagcgaggccatccgtcgtccatgggaatcaccgtctgggcgatgtccttgggaatggtcgcgtatttggacataccgccgccgcgctggttgatcgtggtctggctgatgcgaatgtccagctggggcccgcccataacggccgcatatccatcgggattcttggcctgatcggcttcatcgatcgtcttgagaatcttcaggcgaatcttcttctcctgtgcctcggtcaaatccggcgcaaccttggtggaggtatcagcagccggcgtcggcagccggccttcacaggcggtcaacggcacgaccaacgccacgcaggcgagggcggccacacacagtttgttccatcgcttgttcatcagctttcctcctgtccgtcatcggccgagtcgtctccggtattgacctcttgggccaagcgggagaagtaggcctgcagttcgtcaggggtgattaccgaagtcgattcgttatcgccggcgctgaagccggtctcagcgccgctctcggcaccagtctgctggtcggcgaccaggttacgtgaacttgggtcgatgataaccggtgtttcggtggcttcagattgcgaggacgcacggcccgaacgccgatttgtggcgtggcggcgacgattacgtcgacttgcaccatccggcttcccggacactgcgatgctggcgggtgcctcttcctcaattacggcgcttgccgtgccttccaccatgcgcttgcggcgcttatgcggcggcatggcgaacacggaggcgcacaatacggccagcacggccagcaatccaccggacagatagaacggcatcgcaaagtccggcacttcggagcgcacccagtgcagctgcaccttggcgttggtggcattttcacccaaatccacaatggccaccgtcgaggcgccggtcttcttgctctccagcgaaacggacccggtgccgcatttcacggcagtccacatatcggaatccttgaacgccaccgcgtcatcggcactggcaggcgctccctgactcgtgctgcttcccttctgggtgctcagctcgctccatgacgccaatccggtgatacgggtataggacttctcggacgcgacccatccggcaacatccttggacggacccaacgccacgcacgcctcgtcctgagaggatcccgagtccacggttatcgtggcgttctgatccaacaaggtcagcacattcggatcagtgacggtataccgggagccgctcatggttgcggaagcggtgatttcagtggagggcttccatatcgtggcattcatgtaccccaacaccacagccgccacggccaatagaccgaagataggcgtcaccactccacgcatgatcttggcatgacgggatggacgcttggcgcccttatccggtcttgtagtctgttcttcagcactcataacttaaccattctacaatcttcacctgtttattacctaggagcgcagaaaatcaaggttcaccagtagggtggtgtgtcatgcgtaagtctgttaaatctatgttatcccctctcggcaaggccgttgctcttgcctgctcgctggcgatgtgcgtatcgctggctgcctgctccagttcgagctcggactcgaaatcctcttccgactcttctgacaagaaggggcaaattgccggcgtgaccgccaagggcaagctcggcgagaagccgaccatctcctttaatacgccgatgaccgtgtccgacggctcctatgtggtgctgcaaaagggcgatggcgacgtgatcgaggagggcgaccgcgtctgcgcccaaggcatcgcgctcaacgttaaagacggcaccgagctcatggacacctggaccaagaacacgccggattgctcgctgaaggtggattccaagaccctctcctcgacctactacaaccagatcaagggtgccaagatcaacaccacgatcggctttggcgtcaacgctcaggattcgtccggatactcttacattttggcgatgacgtttgtatccaagtccaaggacctgaagaaggccactggcgaggaagtcaaggatgtgccggccaatctgccgaaggtgacgcgagccaagaatggcaagccgtccattgacatgaacggtcagggttcggttgattcgctgatctcgcagacgctgatcaagggtaacggcgccaagctgaccgacaagaacaccgtggtggtcaagtacaccggttggcttacggatggcaagcagttcgattcgtcctgggatcgcgattccacaatcgacgccgatctgttcagcgattccagcggccagcatcaggttatcgagggctggcagaagggtctggtcggccagaccgtcggctctcaggttctgctggtgattccgccggatcaggcctatggagataaggagcaaggttcgattcccgccaactccacgttggtcttcgtaatcgatattctcgccgcgtactaaacaatctcgatggctctccccaagaggggagctggcagcgaaactgactgaggggaggcctcacggaatataccgtgaggcctcccctcagtctctctatgtacgttcgaaaactccccttcaagagggaagccaagaacaatcagaacagcctgagactgtcgtcctcggtgcctttcatatcgtcgtaatcgaggatgaggcaggtgaagccgcggtccttggccaagacctgggcttgcggcgtgatggtttgtgcggcgaagatgccatgcaccggggccagcagcggatcgcgattgagcagttcgcagtagcgagtcaactgctcgacgccatcaatgccgccgtgacgtttgatttccacagccacatgctcgccctcggcattcacggccatgatatccaccggaccaatggcggtagggtattcgcgacgcaccagcttggctcccttgccgatacgctcgatctgctcggccagatagcgttgcagatggtcttccacgccatccttgatgagacccggatcttcgcccagatcataggtttggtcggaatagatgtgttgcagcgtcacttcaagaatgtcagagcccttgtcggcgctgacgcgtagcaccttttccggcccaccagcggcgacactttccggggaatgcgtcgcggaatcaccatccacagccccaccagcgacactttcccgggaatgttgcgcggatttggcggctgggtcgatctcacgaatcgtgcagggcgcggtcatccagttcagcggcttgtaggagcccaattcggagaaaatcaacaggctggaatcagccttgatcagcaatacacgcttggccaggggcagtgaggcgttgaggcggcccgaatactcggccgaacagtcggcaacaataactcgcataggccaccactgtagcgcaacacatggcatacatagcaaaaggggctctctggaaaaccagagagccccttgaggagttggttcagatcactcggcggtgccggagtactggacgtcgtggccgcgctcgaccgccacggtgagtttgttcgagtcgaaggagatgaatccgtcggtcacctcgaacatgtggcgatcgccatcgggctcaaccacggtgagcgtaccctgcttgatcaccgtgagcacaggctcatggtcgggcaggatgcccatgccgccctcagaggcgggaatggtcacgctcgtcgcctcgccgtgccacacagggtggtcagcggcgacgatgttgaccttcatcgtggttttttccgcagccatcacgcacccagttccttctgcatgttgtgccacttctcttcgagatcatcgatgccgccgataccggagaacgcctgctccgggacgtcgtcgtacacgccgtcgcagatgcgggtgaaggcttcgatggtctcgtcggccggcacgtaggagccggggcgaccggtgaacttctcggcaacgtagaagttctggccgaggaactgctcgatcttacgagcgcggttcacggtggtcttgtcctcttcgccgagctcgtcgataccgatcaaggcgatgatgtcctgcagctccttgttacgctgcagaatcgccttgacgcggttggcgcagtcgtagtgagcctggcccacgtaacgcggatcgaggattcgcgaggtggagctcagcgggtccacagccgggtagatacccttggaggcaatgtcacgagacagctcggtggttgcatccaagtgggcgaaggtcgtggccggggccgggtcggtgtaatcatcggccggcacgtagatggcctgcagcgaggtgatcgagtgaccacgggtcgaggtgatgcgctcctggagggaacccatctcatcggccaggttcggctggtaacccacggcggaaggcatacgacccagcagggtggacacctcggaaccggcctgggtgaagcggaagatgttgtcgatgaacagcagcacgtcctggttctgcacgtcacggaagtactctgccatggtcagtgcggtcagcgggacacgcagacgggtacccggctgctcatccatctggccgaagaccagtgcggtcttctcaagcacgccggcctcggccatttcgccgatcagatcgttaccctcacgggtacgctcgccgacgcccgcgaacacggacacgccaccgtggttctgagccacgcgctgaatcatttcctgaatcagcacggtcttgcccacacctgcaccaccgaacagaccgatcttgccgccctgcacgtacggggtcagcaggtcgatgaccttgatgcccgtttcgaacatctgggtcttggactccagctgatcgaaggccggcgggttgcggtggataggccaacgctcggagacggtgatggtctcatccggcttcttgttgaggatgttaccggacacgtcgaagacgtggcccttggtcacgtcgccgaccggcacggagatcggggcgccggtgtcggagacggaggcaccacggaccaggccgtcggtgggcttcagagcgacgcaacggaccgtggaatcaccgaggtgctgttcgacctcgagggtgatctcggtctccttcgcctcgccttcttccttggcgccggtgttgacgatcgttactttcagggcgttgtagatgtcgggcagatgacccaccgggaattcaacgtcgataaccgagccctggacgcgggtgacgcgaccgttggtaggctcggccgcagtggtctggttgtcagccatatgcgttcctactcttccttcttggtcagcgcgtcagcgctgccgatgatttcggtaagttcctgggtgatcgaggcctggcgggaagcgttgagcttgcgcgtaaggtcgtcgatcaggtttcgtgcgttgtcggttgccgtgtgcatggcgttctggcggcttgcggtttccgacgcggccgcggtcagcaggcactcgtggatgcgggactgaatgtacttcggcagaatcgcgtccagtaccttttcgaggctgggctcgaaagtgtacagcggagcgacatccgcagtagccggtgcctcttcatcaggatcgggcaccttggtctcgtttttcacgatttcgaccggcagcatgcgcagcacgcgcaccttttgcaccaccatgttgatgaactcggtgtagacgatgtagagttcggaaactccacctttctcagccggcttcatgtaggcgtccatcaaagtgttggagatcgtttcagcaatttccacgccgggctggtcggtgtcgccttcccacgtcgccgcgatgtcacgattacggtacttgtagtacgtcgaaccgcgacgcccgtacacgaacagctccggctgcttgcctgccgcatcgaggcgggacagcagcgactccgtttcacggataatcgaagaggtgtacgggccggccataccacgatccgaggtgagggcgagaacagccacgcgcgggttcttctcgtccttcaccgcgatcggatgcgtgatatgggtgtgggccaccaacgcttgcacggcatcgaaaatcgcatcggtgtacggcttcgcgttcagggccacatcacgggccttggcgatatgcgaagacgcgatcatctcctgagcgttgaagatcttcgccaacgactcggtggagtggatgcgtgatttcaatgcgagttgcgagcccatggcttacttttctcccgccacgatcttttcctgatcaaccggcgcggccttgtcaacgtccggcttcttctcgaccagcggcttgccggcggaagagacgaacgtcgaacggaactcgtccacggccttatcgagggcagcctcggtgtcggcggtgaattcctcggtctcgcgaatggtcttgaggatatcggtgttgtggtcgatgtagtccagcagtccctgctcgaacggaaggacgtccttcaggtcgaggtcgtcgagcttgccgtgggtgccggtccatacggacacgacttcctgttccggcgagtacgggtggaactgcggctgcttcaacagctcggtcaggtgggcaccacgggtcagctgggccttggaagccgcatccagatcggaggcgaacatggcgaaggattccagcgaacggtactgtgccagggagatcttcagcgtaccggagaccttcttgagcgccttggtctgtgcggcgccaccgactcgagagacggagataccgacgtccacggcggggcgctggttggcgttgaacagatcggactgcaggaagatctggccgtcagtgatggagatcacgttggtcgggatgtaggcggacacatcgttcgccttggtctcaacgatcggcagacccgtcatcgaaccgccgcccaggtcatcggagaccttggcgcaacgttcgagcaggcgggagtgcaggtagaacacatcacccgggtaggcttcacgccccggcgggcggcgcagcagcagggaaatcgaacgataggcctctgcctgcttggacaagtcatcgaagacgatgagcacatgcttgccgttgtacatccagtgctggccgatggccgagccggtgtacggggcgatgtacttgaagccagcggaatcggctgccggggaggccacgatggtggtgtactccatggcgccggcgtcttccaggctctgcttcaccgaggcgatggtggagcccttctggccgatggccacgtagatgcagcggacctgcttcttcgggtcgccggattcccagttggccttctggttgatgatggtatcgatcgcgatggcggtcttaccggtctggcggtcgccgatgatgagctgacgctggccgcggccgatcggggtcatcgcgtcgatggccttgaggccggtggacagcggctcgtcgaccgggtggcggtgcatcacgtcgggggcctgggcttcgaggatacgacgaccctcaatgccctggatctcgccgaggccgtcgatcggcttgcccagcgggtccacgacacggccgagatagccgtcgccgacgggcacggagagcacttcgccggtgcgtcgcacttcctggccttcctcaattcctgcgaaatcgccgaggaccaccacgccgatctcacgggcgtcaaggttgaacgccaggccgagcgtgccgtcttcgaacgtcagcagctcattggccatgcaaccaggcaatcccgtcacgtgcgcaatgccgtcaccggccgtggcgacatagcccacttcctgggtgggggtgtcgctcggcttgtacgacgacacgaagtcgtcgagggccttgcgaatcgaggcgggatcgatggtcagttctgccatgatcactccttctattggttattgttcagtcaagtctttgcttgtgtgtggtgttggacggattggctcggccggtcaggccggagtcgcctccgtctgcaccttgcgatgcaggttctgcagctgtgcgaccacggtgttgtccgtgacttcgtcgcccacctgaatgcgcatgccacccagtacggtcggatcgaccaccgagttgatgtgcacctggcggcccaccttggcggagtagacctcgaccagtcgctcaatctgctccttcttcagcggggtggcggtggtcacggtgaccatcgactcgcccatgtggcgggagaacttgttgatcagccactggatggtctccaagtagcggcggcggcgcaggttgcaggtggcgtgttcggcgagcctcatggtgaccttgttcagggtcttgccggagaacacctcgcggaacagcttcacacgggcctcgctggtggcctggcagtcgtacagcttggagcggacgaccggcaggttcagcagtgcggaatgcagctcggacagctcgatggatacctgcagcgtggcgtcggtggcgtcagcgtagtacatcatggcgtccacgccgaagtcctccaccgcgttggcgatgtcgcgcgcacggctccaacggcgggagaccaagtcggtcatgatctccatggtcataggatgcgcgttgtcaccgagcagtcccttcaggacggccaccttgtcggcgaccgggcgggacgggtcggtcagtgcgcgttccagctgaatgctgtcatcgagcaccttggtgatcgtgaacagttcgttgccgatccgccacgcgtcctcacgggtgtcgcgcagtttcggggccagcgaatcacgcgactcgcggtctgcaatacgtgatgcctctcctcgcatggtcacctccctttctggttacggatggtcacggtcacttcttggcgcccaggtcgtcgatcatcgaatcgatcatcgaggactgcacgtcgctgtcttccagcttggcaccgaggatcttgccggccaaggcggtggcaagtgcgccgacctcgcccttgagcgagacgatggcctgctgctgctgggattcgatcgagcgctgtgcggatgcggtgatctgggccgcatcggactcggcgcgggaacgagcgtcggcgatgatgtgggacgcttccgcacgggcgtcgtcgcgaatcttggcggcgtccacacgggcggtgctcagctgggcctcatacttggccttggcctcgtcggcgtccttcttagcctgctccgccttggcgatgttgccctgaatcttggcggcgcgctcgtcgaagatcgcattgaacttcggcatgaagaacttgtagaagaacaccgcaacgatgacaagaatgatcagggaccacacaatgtcataggtctcgggaatgaacagatcaattccgccttctgcgagcgtcattatgaagtcctcctttcactggtggattcgttttgccttctgtattcgactgagaaaacgttcgatcagtggaacatcagggcggtaacgaagccgatcagtgccagcacctcgatcagagccaggccgatgaacatgatggtctgaatcttgccggacatctcaggctgacgagcggtggattccatggccttgccgaagaggatgcccagaccgatgccagggccaaccgcaccgagaccgtaaccgatgacggacaggttgccggcgaccgctgcgagggtgatgatatccattgtgtttcctttctaacgtacttggcgacgttataaatcttatttcgttcggtcctgcctacctaggcgaggccgggttccgaaagagggggttgaacctcactcctccgggaagcttaggttgatgtacacggtggaaagaatggcgaagacgtaagcctgcaggaaggcgacgaacgcctcgaagcacgtcatggcaagaccgctgacgaaccacatcgcgccgactgggatgccttgcagcttgttggctgcatcgacgatccagtactgtgcgaatgccaggcaggtggcgaccatcaggtggccggaaatcatgttggcgaacagacggatggtcagggaggccggacggatgaccagcaactcaaggatgttaatcggggtcaacaggatgtagaccggccacggcacaccgggggtgaacagctcgtgacgcagataatggccaagaccttgcgaacgtgcggcggcgatccaatactggaccatggtccagatggcgaacaccagcggcatgaccacagtggcggtggccgccatgttcatacccgggatgatgccacacaggttgaagatgaaaatcgtgaagaagatggtggtgatcatcggcacgtagcgcttgccgcgaacctcgcccatcacgtcatagacgaccttgtcacgcacgaagtcaagaccgtattccaccacgccctgccaacggccggggatgagcttggcgcgctttgcggtaagcccaagcaccaccagcagcacgaaggtggccacgatgcggatcagaataatgcggttgatagcaaacggagttccctggaacagaatctccgggggaaggaagtcgttgaccgagggcagatgagcaccctcgtccgccaacagcaatcctgcgccgagcgaaccgaccatatcacgcctcctgctttttcaatgtcaggtgtcagtttaaacccaccgggcaggcaaatgtgacgtgctcgttactttcgtctcctcggtgtggagcctgccgggcgtggacacggagtctgcgctgggcattcggctccgaatgactgaagagtgattatttgcctgcgtctagacaatgtcaatactacaccggcgcgtcttctggaatcggcggcggcgcaaggtttttcggatgttgcgcaagcgttgtgcgctattagtcataatacgaggatgtgcggcatttgcgctaccctctgatcactccgtatccgtcgtgggcgaacggcttgaaatcatcctggcgcggcccgcccggctcatgccgaatcgaacgatcagtaccgagcttcttctcagccctgagctgcggcacctcggtcaggtcgtacggcgtggtctggtacacccagttgagccagttgcgccacagcagattggcgtgggcacgccagacgaacaacggttccagcttcggatcgtcatgcgggaagtagttcttcgggaagggcacgttggtcatgcccttggccatatcgcgctcgtattcctcggcgagcgtgtacttgccgtactcccaatggccgagcgcgaacacttcggagaagtcacgtgtggcgattaggcccgggccggactgcggcccccaagtcaagatctgaaggtcatggttggcacgtacctcgttttcgttcacgccggcgaggcgggagtgcggctgcagatcaatctcgtcgaagccattggtcaggaagcagtattcgtcctgcaggtactgcgggaatacgccgaaaatcttctcggggtaatccaccttgtggatgccgtagcggtagtacagtgcgcccatcgcaccccagcacaggtacatggtagagaacacatgggtggaggcccagtcgagaatcgtcttgaactcgtcccagtagtccacatcttcgaacggcatatgttctacaggcgcgccggtgaccacaaaaccgtcgtaatagttgtctttgagcgcatcgaggttttcgtagaacttgacgagatgatcggcggaaacgtgcgtggcctcatgcgtggaggtcttcatgaagtcgatttcgacctgcagcggcgacttggaaatcagacgcagcagctgcgtttcagtc

SEQ ID NO: 1097 - DNA, 6780 bp, Unknown
  R13_10m  MAG No. k141_13009
gtggacgtcaccgcgccggtcacgccgtacgccttccaattcgacctgctcggcaaggccaagagcaacaagaagaccatcgtgctgcccgaaggcgaggaggaccgcatcatcaaggcggccgattacctgctcgaacgtgagaccgtgaacctcatcatcgtgggcgacaaggacgccattttggcccgcggcaaggaactggggctgaacagtctggggcgcgcccgattccaggccatggacgacgagaacgtgttgaagcccatggtcgccaagctgtgcgagttgcgcgccaagaagggcatgaccgaggagcaggcccgcaagcaactgaccgacgccagctacttcggcaccatgctggtggtgctcggctacgccgatggcctggtctccggatccgtgaattccaccgccaacaccgtgcgccccgccctgcaggtcatcaagaccaagccgggccagaaactggtctcgggcgcgttcctcatgtgcttcaaggaccatgtggccgtgttcgccgactgcgccatcaacctcaacccggacgccgagcagctttccgaaatcgcgttgcagtccgccgagaccgcacgtgccttcggcatcgacccgaaggtcggtatgctctcctactccaccctcggctccggcaagggcccggacgtggacgtggtcgaggaagccaccaagctgctcaaggagaaggctccggatctgccggtggtcggttccatccagttcgacgccgcctggtcccccaccgtggccgccaccaaggccaagggcaacgatgtggccggacacgtcaacgtgttcgtcttcccggacctgtgcgccggcaacatcggctacaaagccgtgcagcgctcctccggcgccttggccatcggcccggtgctgcagggtctcaacaggccggtaaacgacctgtcccgtggtgcgatggtgcaggacatcatcaacaccatcgccctcaccgccatcgaagcgcagtgagcccggcttagctcccgccagcgggagccactgtaatgcttattttgtagcaagcaacgagtaatctaatcaacggtaacccgtgtctcacgggaacattcaatcacaatggaggatgcccacaatggcgaaaaccgtccttgtcatcaattccggctccagctcgatcaagtaccagctggttgatctcgaatccggcgaaggcctcgcttccggcctcgtcgagaagatcggtgagccggtcgacggccactacaagcacgagtacaacggcgaaaagcacgagcttgaagagccgattcacgaccacgagcagggtctgaagcgcgtgctcggcttcttcgaggagtacggcccgaacctgtctgaggctggcattgtcgccgtcggccaccgtgtggtgcagggcggctccatcttcccgaagccggccctcgtgaccaacaagaccatcaaccaggtcaaggatctggctgtgctcgccccgctgcacaacggcccggaggccaagggtgccgaagtcatgcgctccctgctgccggacgttccgcagatcttcgtcttcgattcctccttcttcttccagctgccgaaggccgccagcacctacgcgctgaacaaggaaatcgccgatcagtaccacatccgccgctacggcgcccacggcacctcccacgagtacatctcctccgtggtgccggacgtcatcggcaagccggctgaaggcctgaagcagatcgttctgcacatcggcaacggcgcttccgcttccgctgaggtctccggcaagccggttgagacctccatgggtctgaccccgcttgagggcctgatgatgggtggccgtaccggtgacatcgacccggctgtggtcttccacctgatccgcaacgcccacatgaacgtggacgagctcgatgccctgttcaacaagcgttccggcatgatgggcatgaccggctacggcgatctgcgtgaggttcaccgtctggtgtccgaaggcaacgaggacgccaagctggctctggatgtctacgtgcaccgcatcgtcagctacatcggcaactacacctaccagatgggtggctgcgacgtgatcaccttcaccgctggtgtgggcgagaacgacgacgtggtccgcaagatggtgtgcgacaagctcgctccgttcggtgtcaagctggacgaggagaagaacgccacccgctccaaggaaccgcgcatcatctccactccggactcctccgtgatcatcgccgtgatcccgacgaacgaagaactggccatcgcccgcaagtccgccgcaatcgccgaggctggcaccgatacctacggcaacaccttcgccaagtaagtaaccgccgttaggcatctcactaatctctagttgcaacactatgggggctgattccgattggaatcagcccccattcgtatatggtcatgagaccactacccctgcgtcatactcccctcagtcgcctccggcggacagatccactcagagaggggatccaggccctataacttggctcccttctctgaggggagctgtccgcgtagcggactgaggggagttccaccagaacacaggaccccttactgcctcagcatgccactccacataccgacgaaatcaggcaaggtcttgcgcgtggtggccacgttgatgacctcgatatcgggaatacgcagccccagcatcgcggcgaacgtggccatacggtgatcagcataggtttccatcacggcaccgtgcaacgtctccgccggcaccggttcgatacgcaatccatcaggcaattcctcagccgctcccccaacacgacgaatctcgttgaccaatgcctccagacgattcgtttcgtggccgcgcaggtgaccaataccaaccatgtctgtcgacttatcagcaaacaccagaatcgccgccaacgagggcgcaatctccccggccgccgtcaaatcgaacgtacccagcccacgcacggtgccgtcaccggtcacctcacaatagcgcacgccgccgatggtcgggaacgatacttcggcacccatctgctccagatatccgggcaacaggccgcccggctgggtggtggtttcaggccaatgaggcacccggaccgtgccgccggcgatcaatgccgcgccgaggaatggcgccgcgttcgacagatcgggctcaacggtcaccttgctcggcagttgcattgcgcgcggttcaaccgtccatgtgcgggcggattcgtcggcctcaaccgcaccgccggcaccggtcacatcggccacggtcatgcgaatgtgcggcaggctcggggtcttctcccccgtgtgcgcgaggtgcagaccgccaggcagtttggaactaatcagcaacaggccggagatgaactgggaagaaccggacgaatcgatgctgacctgcgcctgggcagccggcaaggttgcaggcggcgtaatagtgaacggcagacggccaacctcgccgtggtaatcaaccgttgcacccagctgttccaaaccgtcaagcaccggcttcatcggacgtgcataagcctgttcgtcgccatcaaaattcactgggccatctgcaaacagggcaaggccgggcacgaaacgcatcaccgtgccggccagtccgcagaacacattgacgttgccatggaatcggccggatacaggaggagtaaccgttacggtggtgtcggttgcggaatccacgtcgcagcggacaccgagggcttcgagtgcgcccatcataaggtccgtgtcgcgcgaacgcagcaggccaatcagagtaacgggcttgctgccgagggcggcgagaatcaggtagcggttggatagggacttgctgcccggcaccgttaccgtagcgttcaacggctgtgcggcgagcggggcaggccagagattcgtgagtcgttcagtcataaggccaaatctatcaaacaaattattcaccggtcggcagcgatgcgggattcgatctgctgatcaggtgcggaagacggctgctcaaaaccgccttcgatggcctgcgcgtgcaacaactgagcggccgcgcgatcggcctcgatggcggcgatctggcgcgagaacacgatgaaccagccgaggaacgccagaccagccaacgcctccacattggtgagggtgttgtgacccatcatcatattgacccagaatgcagcgcatacgagcgcggtcaggtcggaggccaccatcactgctttggacaggcgtggcgcaagccacggcaggagcacgaacagcagcagcatgacgaacggcaggcctttggcgcatatattgtgcaagagattgtgtggcgtgtaccgaaacacgccgatgccgatgaatgccaggccggccaccatcagcaggaaggacagaatggagatgcgcagcatgaaatgtgggatttcgtagccgcgattcggatctctgttggtgcggtcgtgccagaggcgctgtagccgttcggtggtcatcagttcggagatggcgaagtagctgacgatgatgatgcatgtgccggcaagaatcagcgtggagttgaacatacgggccgcaaacgtggttctgtcgccgagctgcgaaaagttgttgtgataccagtatgggtcgtcggtggtcatgccggcggtgaccacgccggagatgacgaagaacggcaacagactggcaatagttttggcgttcatcatctccgcctgtacaaaggtcatgtaccccaccacgccggcgaaggcggcgcagacgctggagatatagccggagaagatggcattgcccatcatgtcgttggccgcaccgatgagtgcaaaagacgacaggaaaatggtcgaggcatacaccaccgaaagggcgacgatttcgaaaatgcgacgaatcggtgcaaaccaaccatgtttgaggttcaatgaacgtgatttgcgcgcatagccaataatgaaggaaatgacgccgcatgccgccacgatgcccgaacataccatgaatcggcgttgcgtcagctgccagatggccggcgcgtattccatgtacaggttcatcgataccgcgccaacgatggcgcaaatcaagaaggagatgagtccggaggtttctgcacgctgatgacgtcccatgccgggcctcccctatctattcgatgccgcgttatctttcaacaacaaacaaaactccccccgaggacaacgctttactagcaagccagcgggatttggctgtcgccattctactgaaaatctgaaacactacaaaaaaacgattatgtacgggcttcttagcctttgcgactatcgttaccgccttgccgagtaccgttgttcatgcagaaagaaagcagtattggacacaatcgaatgagcgtgtcggtatcgttgaaaaagtaatgaatgacggttctatcggttcaacctttaagggacgaaccagccgcggcaccatggcgctgatgcatgactatgccgagctcatcaatgaattacgtccgacagcagagcaattcaccgagatcgagcaatactgggtcaaacgaattcaggcgttcttcaccagcaaaccattcaagctggagtccgacaactcgctttccgttgatgcggccgtggaacatctgctgcggcaggcagcgcagcggcgaagggagaatccgggcaccatgtacgtcggcaccgtcctgcagcatctcgtcgcggcaaagctcaccatcgttgctccggaagtggaaatcaacggcgcgtccgttgctgatgatccgagtccgcgacttccaacggtgaggccgcggaccgtctcacaaaaccgtccgcggctccgccctcctgtttcgtcgcaactgactacaccgacgggttcgggcgcttcgtcacgaaaacgccattgcgatgcaccgtatacgcgccgccgtcactgccccgttccgcccggaacaggacgatcggctcccctgcgatgtcgcgcagttcgacatccgatctgccacgtgtcagatagaagtcgaatatggcgtcgtcggattgacgcacggtatgcagaacgtcagaggtcacgccgctggcgggcgaccgcaggttggcttccggctgccggccatcctgcggctgcacggcaagccagcctcccacgaatcgcgtcagatcgctcacgcccagatcgcagccgaggaaatacgcctccccttcgccgtacgtgttgcgggtgatcgcggccatgccgtcaagctcccactcatccgcttcttcgccggcatacgaggcaagcacctgcacatgcggtccggcgacggtcacgtcaccgagcttgtcgatgacgcgatcgagccagtcgaaatcccaatggtcttcgatgggctggaggcgatctcagctgaagatggcaagggccacggtgttgacgccggcctggcccatcaggcggatgtcgtcatcccagatttcctccggccattggtcgggactatagtcgccaccgaaagcgatgccgcgtccgtccgcggtcagcagttttggccatgcgaagtcacgtcatgcacgcacggttatctcctttggcaggcggcgcagggccacggcccatatcggataccagctgatactagctgatagacactcctggccgatagtcgacacgccgccggttccggccccactgccggaaccgacatgggtatgttcatgaccgccgaccgcaggaacgaacaggcccgtccgccacggaccgcatcttgcggttcaggcggacgggccttatgggagggatgggaac

SEQ ID NO: 1098 - DNA, 8996 bp, Unknown
  R13_10m  MAG No. k141_13791
agattccacattcaggaccggggtcatcacgccattgggcgagctgttctccgccacgccacgcgagacgaccctgctcacggaaaatatacttctcgccgaaaggcgcgtatcacggctctggaaccagattcccggcgtcatgcgctgggactacatacggcattccatcagtgaggaactgttcgccaccaacgagatggaaggcgtgcgcagcacccgcaaggaaacccaggacgccgtggacgcggccgacaaggcaaggagggacggcgacgactccaaggcgcggttcagcgaatttgccaagctgtacctgaacctcacggacaaggactccgcgttgccggcgggcatcgccgacatccgcgacatctatgacaaggtcgtgctcgacgaaatcgatgagagcgatcagccggacggcgacctgttccggaaaggcgatgtggaaatacaggggccgcacggcctcgcgatccataacggagtcaaaggcgaaggcaacatcggcgcactcctcaccgatatgatccacctcacggcctccgacgagattccccggctgcagtcggccatcatgtcgcacttcctgttcgagtatgttcacccgttttacgacggcaacggcaggaccggccggtatctcctggccctgtacctgaaccatgacctgactatgcccaccgtgctatccctgtcccgcaccatcgcggagaacaagaacgcttactacaaagcattcatggaggcggaggacaagctgaactgcggcgaactcacgctcttcgtgaacaccatcctcggattcatccaacaagcccaggatgagctgattgacgaactcggtatcaaggtcgatcagctcgacaaaggtcggatactctgtacacagcttgaaaagaggcatgccctatcgcgcaatgccgtctcggtgctctatggcgtgattcaggaagagctgttcgactcgtccaaatccatgtcgttggacgaagtggcccatcacatcggactgtccaaacagagcgcaaggaaatacgtggaagagctcttggccgcggggctggtcgtacagaccggaaaacgcccgctgaaaatacaggtatcgaaatcattgaggaatgttctcgtcacaggagtcgacgagaacgcggaagcctaagaaaagtagacgcaaacatctcatctcaacgaggttcataaaggttcgtaacatgaagaaaggtctgggcaaccaacactgctcggacctttccgcaacactcccgtcagtcgctttccgcgacggctcccctcaggaaggggagccgaggaaaactacttggagacgttgaatttgaactccacaatatctccgtcggccatgacgtagtcgcggccctcctgacggagcttgccttcctccttgatcttggccatggagccgtcggcggccacgaaatcgtcgtaggagacgatgtcagccttgatgaagcccttttcgaagtcggtgtgaatcacgccggcggcctgcggggcggtccagcccttgtggatctgccaagcgcgcacttccttgacgcctgcagtcaggaaggtctgcagtccgaggatgtcgaagcccacgcgggccagttggtcgagaccggactcgctcaagccagcgtcggccagcatttcgcgggcgtccgcctcgtcgagctcggtcaggtctgcctcgaactgagcgttgaggaacacggccggagccggggccacggatgcggcgagcttagcctgcaggtccttgttggccagctcgttgtcgtccacgttgaacacgtagatgaacggcttggcggtcatcagatgcaggtcgtagacggaatccttgtcgaagcggccttcgcgtgcggccttgtcgagcgtctcgccggcttcaaggatggtctttgcctgcttgactgcgtccatgtaggccggctcgatcttcttgcccctcagatccttctccagcttgggcagcgcgttttcgatggtctgcaggtcggcgaggatcagctcggtgttgatggtgtcgatgtcgtcggccggatccaccttgccgttgacgtggacgatgtcgtcgtcctcgaaggcgcgcacgacctcgcagatcgcgtccgcctcgcggatgttggccaggaacttgttgcccaggccttcgccttcggaggcgcccttgacgatgccggcgatgtccacgaaggtcaccgtggcgggcacgaccttttcggtgtggaccagcttggccagcacgggcaaacgcttgtccggcaatggtacgatgccggtgttcggctcgatggtggcgaacgggtagttttcggccagcacgttgttgcgggtcagtgcgttgaacatggtggacttgccgacgttgggcagtccgacgattccgatagtaagagacatgattccaagtctagggagaagctggacaccttgaacctgcatgtggtgaaccggccatatgcaaaagccttcgagcatacggttcgaaggctttgactgtgatatgcgaatatacgcgaactctgattggcagtcagccgacgatggcgtctacggcgtcgatgaccgagccgcggaaaccgtccttttcgagctgggcgacgcccttgatggtggtgccgccgggcgagcacacggcgtccttcatggcaccgggatgggtttcggtggccatgtagagcgcgccgacaccttcgaccatcttggcggcaagccggtaggaggtggctcgctgcagaccgtactgcacgccggcgtcgcccaaggcctcgatgtacatgtcagtgaaggcgggcgcgcagccggccaccaccatggcgatgttcatatgcgcggtgtccacgcgctcgatgaggctgatggggccgaatagctgctcgaaggtttcggtttcgtcgtcggtcagggtgttgacggattcggtgacgagcacgcccttgcccacggccatcggagtgttcggaatggtgcactggatatggatgtccggggagtcgacggattcgccgtcttcggtggcgaacaggtcctggtacttcttgagattccagccggcggcgatggagacgacgatcttgcccggcttggcaagttcgtcggccagcggcttgacgacggcggcgatctggtagggcttgatggcgatgatgaccacgtcggcggccgtcaccacttccagcgcattgcgcaacgggcgcacgccaagttcggcggtggtcttctcaagcttgtcgtagtgggcggcgcaggcaaccatctggccgccggcgaccacgcccgcgtcgacgaagccttgggcgatggcctgggccatgttgccatatccgataaaaccgatggtgaggttctgagtcatacgttttcctttcgtgcatgtatacagagctccctcatcagagggagcttgcttccttgagtcagaacagttcttcgaggtcgcctcggttgagggcttcggtgtagaggtgcttgaagacgagcgggccgtgcagaccgtcatgctcgaattcgttggtggtccagtagtggctgttgctcacgcggctcaaagtgtcgagctgcataccggaatcgacatacatgtcgtcgaagtagacggcggcctgcagcggcacctcattgcgggccagctgttcttcgtcatagatcacgccgaagtgcgtgtcttccatgagcaggtccatggccggcttgaacgggcgcaatgcggcctcctgttcgaacatccacgggaacatggcctcgccggtgaagttgagcgggcgttcatcagcaccgaattcgggcttgccatcgcgcacgcgctgggcagcccaacgaatgggctcgtcaagctcgccgttggcgtagatgaactcctgcagcggccagtacagtgggcgcgacgacgtggcgttcatcactttggtcaaaaattcgtcagacaacggcgagtcggcagaagcggaaccatcgccatcaaggaaggcgtcgtcaagaatccaatggacacgctcgaagctcggcttcatgccaaagtcggatcccaagcactggaagcgttcgacggtgagcgggtcgccgttcggcatcagcgggaagccgtgggcggccatgccggcgatcacgccaagtcgatgctccacatcggtaccagccatcggattcagtacggaatcggtgagtttgccaacgaattcggcgacttccgcagtagtcggcagcttgtcggcgatggcggccacgcgctccttgtcctgtgggtagcgctcgtagaactgagtcgtcttgcgcaccatgcgcgggaaggtatgctcgtacacttcagcggcgtcggccggcacgtgcgggatgccgccggtggtgaagctggcgattacgccggccgggaacagggacagtgtggtcagggtcaggaagccgccgtagctttggcccatcgtcacccacttgcggccaccgaattcggtcaggcgcagatgttcgaagtcacgcacgatggaatcggcaaggaacttcttcaggtagtcggcttgggctcgtgcgccggccgcggcatcatcgtcgtgcgcggcggcgatgcgggccatggcgtgcgtgtccacgcgcgaggagcggccggtgccgcgctggtcgggcaggatcacccggaagtgcctgatggcctcctcgatccatccgtcggaggtcgggctgttgaggcgcgggccggcaccgccgggaccgccttgcaggaaaatcagcaggggcaggtcgtcatgcacgtgttcgggcgcggtgaccacgcgatagaacagtttgatggtttcgccgtcgaacgcttggcctggctcatggccggtccagtcgagcggaacatcgatggaatggtcctctatggccagtccgggcacgtagtatttgctcagcattgtcatggttcaagactctagtccataaatcctcctgaagagtgataccggttcgtctccggacacgctagccttgtgcgttatggagatgatggcgcgcgtgagggcatggtgcgcacgggagtcgacccgcacactgctatgggacacattgctcgccgcggcgctgatcgccggctgcgtgccgttcatcggcgtcaccagccctgattcgacgggcggcatattgtttcccgcaactcaggcgtcgatgacgctgtggtcgctgccggtcttcgtgccgctgatgctgcgcaggtattgcccggagccggcggcctggctgttcgtggcgctgaccatcacgcatcttgtgttcggcccggcgatcatgtatttcgatttctacgccctgatcatggtgtattcggtgattctgtacggcaatccccgacattcctggcggttcatcgtcacggcgttcgtcatgggactggtcgcggcgacggtctggtcggtgtctttcaacgtgggtccgctgttcgccggaccttcctccggttcgcgcgtcatccgcgacggctggctgtccgatgccatcacgatgcccacatgcccggcggtcaccggcgtcgtgggggcaagcggcgccgtcaactgcggggccaagatgctcgctgacttcggcatggaggcggcgttcatcgaatcgagcgtgctgagcgtcatcatcatggccttgtggcagcgagcgcgcaacgccacgctggcggccatgcgcgagcgcaacgcttccattgtggcgaaagaggccgaggagacgcgcatcgcggcgctggccgaacgcgcacgcatcgcccgtgatatgcatgatgtggtggcacatacgctctccacgattattgtgcagtcggatggcggccggtatgcgggtgcgcatgatctggccatcgccaagcacacgatgggtacgattcgccatgaagcggaacgcgcgcagcatgatatgcagcgtctgttcaatgtgttcggtgcgagtggcagtaccggatatgccgacatcgattcgctgtttgacggtcatctggtggtatcccggcatatgaccggcaaagcgcaacctgaccggctgtccgccgacgcggaaaccgccgtgttccgtcttgtgcaggaagcactgaccaatacgcgcaaacatgcgggcgagggtgctaaagccaccatcgatgaaatctggtcaaacgatgtgctgtcgattaccgtatccgataacggccgtggcgcgacgtctgcagcagacggtcataagcccggatacggattggttggtatgcacgaacgcattgagtcgttgggtggcagcgtgcaggccggcccagggccgaatggtggctttattgtggcggctacgattccgctctcccctgccgccccacagtccggcaccgatacggaggatccggtgctaaccgttatctcgcgtatacgaggattgatggatcgggcgcgccccaaagtactcgaccaaggagatacgcgtgagtcgaactgggtgggtcgatttgcgcagtggaccgagcggcactatcttctgatggacgttatcgccactatcgtgctgattgcgctatttgattccgccacgtatggcgatttgcagatgatcggcaatgccccgtattcgccgaaccgcgtgccgactataatgctgacgattattatgctctcgcctttggcgttccgtcgccgcttcccagagggcagcgcgctggcgatggcggtgctgtctgctgtgcaactgttgttcttgccatcgattttgaccatcaatatgtttgcgatggtatccgtgtattcggcggtattgtatggacgagagtccgcttggcgctgggtgagcgtggcgctggcagccgattcgtggcttgcgggcatcaaggtgatggctgggtggaatggatacagtcagctgttccatctgtttttgcccgatggtagttccatgctctcaaaatggaggctggttttgtccggcttgctgccgggcgcgggaatcatgttggtcggttttgcctgcattgcgatggctcgatggagccgttcgcgtggcgcaaacgctctggtgctgttgcgacgcgaggaggcgctgcgagccgagcaggagcggcaaaaggtgctggcggccaacttagagcgcaaccgtattagtgcggcgatgcaaaccgaagtactgaccacgctggaatcggtgattgcgcaggctgacgagggactggtgatgctcaacgccgaacctgcgcctgatagtatgcagattgaagcggcttttgccgcgattggtgctcgggggcgcgccgcattggctcatatgcgtcagctgttgagagtgttgcgtgaaaccgggttcagcgacgaggcccatgagggtgtgcagccggatatgcagttgcgaccggcggcttcgttggatagtcagatgcaacacgcgggaacgttaccccggtgagagacttgcccaataagaactcagggaacaatcaggatgtttatggagcggcgctccgataggaaacggatacagtggagagcatgaacgagagcagaagcattcgcgtgattattgcggacgaccaggagctggtgcgtgccggttttgccatggtcattggttcgcaaccggatatggaggtggtcgggcaggcgtccgacggcgcccaagccgtggcgttggcggaatccctgcatcccgacgtggtgctgatggatgtgcgcatgcccggcatggatggcattgaggccacgagccgtattacctcactctccgccgcgccggacaacgcggccgattcggccagcccggccgccgacgcgaccgtctcggccgaatcggctgacgaccggccgacgcgcgtaatcattctgacgacgttcgatttggacgagtatgtgatggcggccatcaatgccggcgcctcgggcttcctgctcaaggacaccgaaccggaaacgttgctcaattcgattcgtactgtattccaaggcaatgcgattatcgcgccttccgccaccaagcgactcatcgaaaagatgatgcaggacggttacgcgcagcatggttcgctgaccggcgatgtcgcgcgctccggtgccgtgtacggttccgccgtcggcgtctctggcggtgcggccggcaacggtgccggctcgatgaccggcatcccctcccctgccggggccgcttccgacggttccaatacgtcacgcccagcatacaccgatcccgaactggatctgcttaccgaccgtgaacgcgaggtgctggtggagatcgcccatggtctgagcaatcaggagatcgcggacaagctctttatctcccttcccaccgtcaaaacccacgtggcgcatatcctcgccaaaatcaacgcccgtgaccgcgtacaggctgtagtcttcgcgtacgataacgggctggtgtaacaaaaaagctccctctgatgagggagcttattgctctacgcttcggccaaggcttcaactggtggcgttttgacggcccggcgggcgggtgccacgctggccagcagagcggcgagcgcggcgacgccgagcaccacaccgttggtggcccattcgaacgggaacacggtgtcgccgtacaaactaaacaccatgtaggatccgagccagccgaacagggtacccaataccactcccaccacgccggagacgagcgaaagcagcaacgcctccaccgccagcgagcgccgcagttggccgcgcgtcatgccgatggcacgcaaggtggcggattcgcgtgtgcgttcgatcaccgacagactcagcgtgttcgctacgccgaccaaggcgatgagcacagccaccgcaatcaaaccgaccaacaatgccatcatgccgttgatcatggtctcccattgcgtacgttcggccaccggaccggtcacggtaacgccagcactggcggagaacacattctgcacgttggtgaatacgtcgttcagcgcaacacccgcgccctcggcgtcaatacgcataagcatgatatgcccgtcggccttgattccaccgttggtgaagtggctggcgtccacg

SEQ ID NO: 1099 - DNA, 5543 bp, Unknown
  R13_10m  MAG No. k141_13995
agccaacagccacccaactaatagccgccagccaatcagcccgtccaatcactccttgtgttccagtgcggccttcaaatcgcggctacggtagcgttcgcgcagcatagagaatccaccgaagcccacaagccacaccagaccggcaatcgcggaattgcgcgtatcgtccgcaaggaacaacgtcaggtagatgaacacgaagaacacgatcgccaccgtattgagcaccttccacgcgggcatgacgaacccgtccgcgatgaaatcggcggaacggcgatacctgcgatgcgccagcagcgtcaggatgtagatgaacaggaacaccgcggagctggcggacgagaacagcacaaacgcccccgagatgccggggatggcgttgacgatcggcgacagcaggatcagcgccgcggacaccaggatggcgcgggccggcaccttgcggtcggacaccttgccgagcttgttcagcatcgggttcggcgacacctcggacagctgatacaggtggcggccggcggaatacaacagcgaattgagcgacgaggacgcggcggtgatcaccacgaagaacaccagggcggacgcccagttcaaaccggcatactggaacaccatgatgaacggggaggcgaaggagccgtcctcgttcggcttgaacgaggtccacggcacgatgcacatgatggccacgagcgcgcccacgtagaagatgagcacgcgcacgatgatctcgttgacggctttgggcagcacctcacgaggattcttggtctcggagacggtgacgcccacgaactcgagcagctcataggcgaagaacaccatctggaagctcatgaggaaggccatccagccgttcggggcgaacgagaagccggagaacaggttgtcgagtccggcgtggcccgccgggctcacatgatccacgccatgaatccgcgcggccgggtaatggtagccgatcacgatcatgaccacggcggtgacgatcatcgcgccgatcagcgtgatcttgatcatcgagaaccagaattccacctcgccgaacaccttgacggcgatcaggttgacggacaccagcgacaccaggaaacacagttcgatcagccatttccaatgggtcaggtcgatgccgaacgtgtcgaagaaggtgatgaagtacgtggagacggccgtgatctcggtcatgcccaacagcacgagcgcggcccaatacgtccagccggcgaaatgcccccatccgttgcccaggtagcgggtgatgaaattgatgaaggtgtgctggctggggtcgcggtacatcatctcgccgatggcgcgcatcaggaagaacatgatgacgccgaccaggatatacacgaagacgatcgaggggccggtcagcgccagcgacttgccggaccccaggaacaatccggtgccgatggtgccgccgatggcgatgaactgcacgtggcggttgttcaggccgcgctccatctcgttggtccggtccaggctttcgacagacttgagtctgcccgtagcctgccgtgtaccaccattcacattcgtatcggccatactgatttcatttctcttctccgccgcccgattgttacgcaccggacgcgatactcgttcaaaacaagttcggactgtatcaccgaaatatgtcacgaaaacgctcagctcaagaatacatgcgatgatactgtaaatattcagccaagaagttcaattcaccaacaccaaattgaacttctacctctattccacggacttgagcgagctgaccgggtctacgcgatcgagcactgggttggtgaacagctgcaccagcagcgcgaacgccagcgtcgccaccacggcaatcgcatagctgtaccagtgcacttccacttcgaaatacagcgacggcatattcaacgcagcagtcagtaatccgcctatccacctgccaagcggcagaccaaccaccacacccataccggtcaatatcatcatctcgcggttcacgtagttgtgcacctcgcggtcatagaagcccagcaccttcagtgtggccatctcgcggatgcgttcggacacgttcgtattggccaacgtaaacagcaccaccagcgccaggccgccggcgagccccacaatcagcgccaccacggcacccatcaaatcgaacttaaacgtggcggccagatgcgcacagctcacggccttgagcaccgacgattcctcgcccaaccgatccgcatattcggcctgttcggtctcggaacctttcagcttggcgagcatcgcgttccacgtcaaggtcgaggcagtgccatctcccgaagccgaagacgtcacaccgccggccgcaaacttctggtcgtacagtcgctcactgatgtacacatcagagccaataagattgcgcgtcacggccgtgacctgcaccttggcccggctgctgccgccattgcccagcgtgacggtgtcgccggcatgaatattcagcgagttggcggcggactgcgatacaatcacgccactatcgtccagcgctacagtgccgccacccgctttgccgaagatattgggcagcccaaaccatccatcatcgccagcttgttccagcgtgaccatatcgttcaagatattcagcgaatcgttgggcacggtcatcagctgcacggcttcgctttcctgcgccgcattgctcatctcgccactatccacgcgcagattcagcgtttcggtggtttggccatcttgtgccacctgcttgcgcatcgcggtggcgtcatcgtcattggccacgaccatcaggtcgtactggtagatctgctcgtattgtttgacgccaatcgtgtcgacggtgtcattaatcgcaaatccgcagataatcaacgccgtgcaaccggccacgccgcccacggtcataatcaagcgcgacttgaatcggaagatattgcgcgcggtgactttgccgaggaagttcagccggctccataccgggcgaatccgctccagcaatatgcgagcgcccgctttcggtgccttcggccgcatcagcgcggcgggcgtgtgccgtatctcctcgcgacaggcgagcgcggtggccacgcccacgccgaccacgaacagcacgatgccggccgaaccgtacagccagtcgtattcgagtcgcacaccgggcaatatatacagtccctcaatcaccaccagcaggaatgccgggatgccaaggaatccgaccagcagaccgatgccgccgccgaccaggcaggcgagcaacgcgaacagcagataccggctggacacggcgagtccgccatagccgagtccaaggtaggtgccgataagtccgcggtcttcctcgaccatgcgggtcatggtggtcaggctcatgagcacggcgaccagcaggaacacaatcgggaatgcgcggccgatggattcgatggaactgacgtctgatttgagcgagctgaatccgtcgatcgaagcgcgcgtctgcacataccaacgtgcgttggccacatcgtcgatgcgccgttgctgcttggcgaattcgctttccgcttcgcttcgcttcgcatcgagttcagactgcgcatcatccagtttcgccttgccgtccgcgagctgttgttcgccttcttccagctgccgctcgccttcttcgagctgctgcttgccgctggccagttgggcggcctgcgcttcaagttgcgccgactgggtttcgagggttgcggcattcgcttcgagttccgcggatttggtattgagctgtgcctctcctgcagccgcttcctgttccttggcggtcagttgcgcgttctgctggtccaaggtggattgtgcgggggcaatggtttcgtttaatgtgcgctgcaaatcggctttctgctgggtcagactgtctcgctgcgtttgcagttccgtttgcttggcggccagctgttgccgcagctcactgattgacggcacttcaggcagggtaatgccaaggcgcgcgagcagttgcttgatggcctgccatgtgggtgagttgaagtcgatattcgggtcaagttgcgccagtagattgtcggcctgttgaatcatggacagcatctgatcaatttgtgccacgccttggtcgatttgggtaatgccctgttcgattttcgtgcgattggcagtcagttccgtttgcgccgcatcgagctgtttgcgagccgaggtgagctgcgctttgcccgattcgagctgggtgcgcgcttcggctatctgctggcgaccttgcgcgatctgttgacgggccgatgcaatctgcgcacgtccatcggcgagctgccgttcgccatcggtaatggttgtcctgttgttctccaattcggtacggctatcttgcaatgtcgttttgttggcttccagctcggcccagttgtcgtcgatctgcttctgggcttcgtccagctgctcgttggcctcgtctttggcatcatccagtttgcgctgcgcgctggagacgatctgttgacgacgggctttctggcgtgtggcctgtatctgatgttcgatacggtcggccacggttttgatggcttcatcgtaggcatcggaaaacgtgtcaaaatcggacgcaccagtgacggcaaccgatatcgcagtgtatatattgccggtcacgccgtcgctgggtgcaaagaacgcatagtcctcggatgaggtggaccggaaggaggtcatgcccgaatagccgtctggattgttgaggtcgcgcgggtcgagtacgacgccggtgatggtgagtttcgtggggaactgcggggattgctcggcgtcggcgtccgtattggcgtcggacttcgcatcggatgccgaggcattggcggcgacacctaccgtatcggcattattggaatcgtcagtctccgtggccgctaccgatatgacggatgaagaggtgtcttgtggcgtcacagtaatggtgccgccaatcttgagtccgctatcgttcaggaattgctgcgtaaccgccacttcgccggccttgttcggcagtttgccctgccgtatgtacggctgatcaagcccttcggtaccgatttcctgcatggtcacggttttcttggtgccgtccaccaacgtggtcaccgtctgagaacgttcgggctgcacggtttgcacaccgtcgattcggcgcagtgccgttgcatcatcatcggtcaggccgtatgtggatagcacctgcaggtcatgcagtccctgctgatcgtaaaaacgaccggccgccagaaaagcatcgcggcatccggcgtagatgccggtcagcacggccacgccaagcagcgtgatgacggcgatcgagacgaacctcttccagctgcgcagccagcaacgcaacgtatctttggcaaataccgcagaaacacccgctcctcgaccgccgctatcgtcgaggttccgccgtttcacagaatgtttcacaggttgtttcacgaatcgcctcgcttgtttcacggggcgtttcacagagtgtcttgcagtgagcatcgccaatcacctaccattcgata

SEQ ID NO: 1100 - DNA, 24059 bp, Unknown
  R13_10m  MAG No. k141_14265
cggcggccatggcccaggagagacgcccggtcccattccgaacccggaagctaaggcctggcacggcgatggtactgcacccgacagggtgtgggagagtagcacgccgccgcaccacacgtacaggaagccccgatacccctcaaaggtaccggggcttcccgcatatcaggacacttgcgcgtggggggggtatctcgcgtccttgggccccggcaggagtatcccgtcggggcccagtgcgttttgggcggcaacccgctgaatacccggtaagatgtctgaggtatcaacaaacaggtcaggaggtgacgcgcatggtggcgccaagccgtgatgaccgtagcgtagatgcattggtgaaatccaaggcagtacttgatgtattggcggaactgggaccaagcaccgcaaaaaccataagcgaacgtactggtgaacccgtaagctcaacgtatcgtttgctggataatctcgtcgcagtcggttgggtggaacggggcatcaatcgtggcgagtatcggcttggcatcgattgcgtacgtatcggcggccaaatcgaaagcagactggacattcagcagatcgctcgccgtaccttccgcgcccatcacggccagttcggcatctggggtctgttcgttcggaggcgattgcgcacggtgtgcatcgagacacgcacccgtgagacattgcaaagctatgcacagctggtgggcaatagcttgcctctgagcatgagcgctccctctcatgtactgacggcctggcttcccccggctcgctacgagcagctgttggaacactatgcctataccaacgagctcggcggcacattctccacgatgcgtgccacagcaatgggacaggctcgtcatatacgcgaatgcggcttcacctatgacgtcggccagaccatggccggctccgtgactatcagcgtaccggtattcaatcacgccggagagattcaagcggcaatcgccctgagtggcctttcccgctccttggaacctgagctggcctgtctggtagatgggcaaccggcaacggcatcggttcaagacatggtgcgattggtgcggactgccggccgtgaggtgtcgcgaggccttggatacagtggtgatcatcttggcctgaacagttgaatatgatgagtcagggataagtcaggggaaggaacgtcgacgatggcggaagacaaacgtgaaccgacccgcgctttagacaaggcgagtcgtgtgatggacgcattggcggcggagaatggcctgtcgccggcagatatcgccgacgcctgtgatatcccgcgatcctccgtataccgcgtgctggatggactggtcgatgtggggtgggccgtaacggatacggatggtaactactcattatcactggactggctgcgattggctgatgccgctcgcacgtctcgtaccgaatggcagcctgcgattgcggtcatgcatgccatcaccgcgcaaaccggcatgacctcattcctcagtgtggtctccggcactgaattggtatgcgtggaatgtgcgcaaggtcatgccatcgattcgctgatcctgcgcccgggccgcgtgctgcctctgcatgctggcgcggccggccgcgtggccttggcgtatttcgaggatgccgatgtcgaacgctatcttgcaggagtgccgtttccggcatataacgagaacacgctggtcagtgtggaacagttgcgcgaggatattcgcttgactcgcgaacgtggatatgcactgtcggatgaggatgtgacgttgggtgtcggtgccgtcggtgtaccgattgtggacaacgagtccggtcgcgtgatcgccagcctgtccgccggtggattcgtggacgaagtgttagccactcaagaatccttggccgcgttactgcgcgatggcgtacgcgaaattcaggcagcctgattcggcccgctaggctgtcgggctggacggttatgtccggtcagctatggcctttgccggctacggttctgctggttatgcttctgcccgactacgctgcggtccgttacgcttcggccacacgacccaacgcgatggcggtgatcagcacgtacgcctcgcgcgggtcggtggcatcccagccggtggattcggcggcgcgcttcaaacggtagcggatcgtattgggatgtacgttgagctccttggccgtggtctcgagcgaaccgccgaacttcaggaatgtggagacggtgagcagcgtcggatcatccgggcctgctgctgtcaggcttccgtagaccacgcggaccagttcgtcacgggcgtccgcgtcgccgatcaacgcacgttcgggcagggcgtcgtcggtgcgtaacgggcgcggcaatggctgcacggtggcggccagggccggcgcggcctgaagacagtagagcgtggcctgaatcgaacgcatcgcgccatcggcaccggtgcgctgtggacccaaggcgattggccgatcggcggcgaacgacggggcgatggtattgcagatgatttccggcgtggccgcaccgaccggacgaatcaacgccactacggcggtgctgttgccgatcgggcgcttggcggtcagacacacaccgccgaaatcggccacgattttctcgatttccttggccgtacgtgcggcggaccgggcagggtatccggcgatggtgtaacaatcgaagtcatgctcgaaaccgaggatggtgaacagggactccactcgttcgtcggccagatgattgaacaggcactcgaacagcacggtgcgtacgcggttggtcgcggtgatgccgggtgcggccgaatcggatgaatcgggcgcacccggcataccggatgcaccggacgaatcgacaacgtcggcagcaagaagttcgagaaaatctgacatagtcactagtgtagcgtcgctgattggcgttgcctttcagccaaagactctcgccaatacgtcagcaccacgaatccgaatacaaacgcaaccggcaacatgtgccgctcgaaattattggccggcgcggtaatcatcacgcccatcagcagtagcagcggaatatgggtcatgagggtgagccaacgtcggcgaatcacctcggccgcgccgatcagcaatgtcatcaccacgtagaaattgccgtgcgtaggccagccgagcacgggaatactgccccatacgcgagtgaagccggcgatgtgctcacgccagtcatggttgtaatccttgatccatgtggagtttttctgcacgtaatcgctggccacgtaataatccatcgatacgtacggctgatcgttcacattgaagtatccgaagcatttggccagcaacgcatccagcgcgatgatcggattgtccttgacgatttcgaaccatgccttgttgaaattggtcatatcctcgggcgtcaccgtgcgccacttgtagctgaccttcttggcctgaataccggaggatttcaccgggtcggcatcctgctgggagtaagcgtcggccatctgatcgagattgaagacgggcgcgaggttctttttggcttcgtctgaaataccgtccggattgcgctgagccacgcgggcgatcatttgcagctgtacgccgcggctttcgattggatcgccgccgatgatcgcaccagaggagatggcgaaggagatgccgccgtgaatcagtacggtggggatgagcagcgccacgacgtaagtcgcccagcgtttgcggtcggcgatcagagccagcacgatttgcagagcgatgatgtaccacgcatatttcgcggaaatcagcatcaccgacgtggccaggatgaaggcgatgaagctgtggcacggcaagtggacgggcgtggcgatggcaggggtctgaggatgtttgcgggtgccggcggggtgccaggtctggacgagttcataccagacgctgaaccaccagacgaacgagaacgcgaacagcggcgatttggtgatggagatagtggaaaacacggccagcgggcagaccatgaagaacagcagaatcaggaatctggccaatcctccggcctgtgggggaacggcggaatccgttgccgtttttcctatccaaggtcggttcaggaatcgattggcggcggcagcgcagcagaacacggcgaacagcgtctgcagggcagccaacgtcacgatgccggcatcgtttgagccggtcagatgcctcgcaaacgtgactatcgcgccatagaacacagtgagtaccacattgtgctggtcggtcagatacgtgggatcggacggccacatgtagtgcgcggtggggtagatgtccatcggcacgaaggagaagaagccgatatagggctgtttcaggccggtccactggttccaagcccagctgaattcgcggatctgtgagcggaggtccgcgccgaatgcggccagcagagtggtcggcacccagagccagccgacaaaaaacaccagcataagcttccagaaccggttcgtgccgcgtgtgatccagcggtccagaacagtgacggtggacgtgacgatagcgcgaacggtacgacgggtcttggctggttggctggcctgctgatcggcggcgggccgtgatgtttcgctattctgctgatggtggcgtaggcgctcgccgatggtcttcggcagtatgcgctggcctgctgcgaatcgcgccatcagcgtgatgattccgagatatatcaggaacgacacgacgaatattgcgatattggcccagttccaatgggcgagggtgccgttctcctcgtcccggtacagcgggccgaccgccgagcacagtgcaagccacaggcaggccagcacggccagtgtccagcgcgcggcagcgcccacgcgcgcaagatgcgggtgggactggcggctggatacggcggcaagcttcgcggtggctggtgacgtcatgacaatatatggtagccgcacaggtcaacggttgatattcgatgtctgccgggcatcgccattgttcgcaagccaatacgacggccgggtgcatgcgtgggctcggcgaatgcggaatttccgaagttgtgaacgctaacacgggctgtccggcccaaaatggttgattttgtgcgcttttccgtggaatatcgcgggcaaaaaacggcgcaaccgaggtaacgtagtgtccatgatgattgcattgaaagctgcaacgccgcagctacccagaactacagccgtcgcggatcatgtggtcgccgtggacgaaaccgattcgaccaacgcgctggccgcgcagatgatcggcgacgggtcgttgacgctgcccgaccaccaggatggcgaactggcggtggccgtggtggccgccgaccggcagaccgccggccgtggccgcaacggccacaagtgggtcagtcagcccggccgttgctcgacgatgtcctatgccgtgcgcattccgcgcgcgatcgccaccgacgaatccgtcaatggctggctgcagatgatcgccggactggtcacgctggatgccctgaacggcatgatcgaggaatacggtgccgcgccgaaccagccggactgcttgctggaactcaaatggccgaacgacgtgttctgccacgggctcaagctgggcgggctgctctcggaactggtgattccgccgtcgtccggtactgatgctgatgccgatgacgacgtcgtcatcgtgttcggcgtaggcctgaatctggcgctgggtgcctgttggctgcccacgccgcagtcgacttcgctgcagctgcatgtcacgggcttgccgtcgtttggcgagatgcgcgatgcggtggccgaacgtcaggtcgagggcttccgtgaacgactggcgaagttcatcgccgacccgaagggccaggccgagtcgttgcgcgaggaaacgaaggcggtgtgctgggcgcgcggccgtcaggtcgaggcgcatttcacggacggcgccacgctgaccggcgaagccatcggcctcaacgaagacgcctcactgatcctgagaacacaagacggcacggaccatacggtccgcaccgccgatgtgggagtgctgtaatagccggccagtagctagctagtagcttgctagtagctcaggtcagcgaccgagcttggacaggccggcggcggccagagaggccaccacggccttgatggcgtcgccgacgacgaagcccatggaggccagggccacggcggcgagcggcgcaccggtcaacgcggactggatgacgaagccgaaggcgtacaccaccacgacgccgccgaccagcgcggccagcaggtagcggcccgcggtgcgcgcggcggccgcgaaggacgaagtgtcggacttgccgcgcagcagggcgatgaccaccacacccggcaggaagccgaagaggaagccggcgctcgggccgaccagggccagcgtggaggtgccgccggcgaacaccggcagaccgaccgcaccggccgccagataggtggcgacggcggcaccggcctgacgccacggcagcatgagaccggcgagcatcaccacgaacgtctgcagcgtgatcggcaccggcgtgcccggaatcggaatctcgccggcggccgcggacagccacatcagcacggcgaacagcaccggcttccaggatgcggcgacgatacgacgggcgagcggcgtggtggccgctgcggatgcggtggtgtgtgaagtctgcatatcaataacccctatgttgtgtgatatcgccgtgaacggcgggcggtatgcgatggatgaggggaggttccggcgggccgtgcggtatccccgacagcccgaaccgtccatatggtggacggtcccaaatgaatccggccctgtgcgggcgaatcgtgcggcgatggaccgatgccggtccggtcgccttccgttcgcccgcagatgagccttcccccgaacttacggttgccatcgtagaggtgttcgatttcgtgcggtttcgtaccaacttacaaaattgtcgatttcgatttgtcataagttgacgaacgcaaccgtaacgtcaacttcttgaaccggcgcgcagggatgtgcaatcggcggatttgcaacgtttttgatagccggcgccaacggttacgttgccggaacctacgcgcgcgtttgttcgtagcctacaaaagggcgtgaaagcttttgtgcgaacgcggcttgccctctcctctatatggagagcacaatttgacactatggctcatactgtcaaaaaactgctgattgcgaaccgaggtgagatcgctctgcgcgtggtgcgcacggccaaggagatgggtatctccaccgtggccgtctactccgaacaggaccgcaatagccgctatgtggacatggccgacgaggcatacctgctctccggcgacacctacaaggacacgtacctcaacgaggatctgctgatcgacatcctgcgcaagaccggtgcggacgccgtgcaccccggctatggattcctttccgaagtgccgagcttcgcgcagaaggtcgaggatgccggtgccatctgggtgggtccgcatcacaccgcgctggtggatttgggcgacaagatcaccgcccgccgagtggccttgcgcgccaaagtgccgccggtgcctggcctgtccgaaccggtgaccgacgtgcgaacgctgctcgacttcgcacacacccacggctacccgatcatgatgaagcgcactgatggcggtggcggccacggcatcaccgtggtgcatgacgacgaggagctgcgccgcttctacatgaaccacgacgcgctgcaaggcggcgatctgaaggaatacttcatcgagaagttcgtggacaaggcacgccacgtcgagacccagtccgggcgcgactcgcacggcaacttcaccgtgtactccacccgtgactgctcgctgcagcgccgcaaccagaaactcgtggaagaggcgcccgcgcccttcctgtccgaggaaatcgtcagcacgctggaggaatactcccgccgcctgttcaccacggtcggctacgtgggcctgggcacctgcgaattcatggtgaccccgaacggcaaagtgtacttcctggaagtcaacccgcgtctgcaggtggagcacaccgtctccgaagaggtcagcggcctcgacctggtgcgcgaacagctcaatatcgccgccggtggcgagctcacccgcgcccccgaaccgcgcggccacagcttcgaactgcgcatcaccagcgaagacccggccaccaacctgacccccggctccggcaccttggagaagatccagtggccggccggccccggcgtgcgcatcgataccggtgtggaacagggcgacaccatctccccgaagttcgattcgatgatgggcaaggtcatcgtcactgcccagaaccgtctcgatgccgtggcccgtgtgcgccgcgtgctcgacgagctcgtgatcgaaggcgtgcccacgccgattccgctgttcaaggagatcttccgcaacgacgacttcaccgccgagcatggccatccgttcgccgtgtccaccaagtggctggagcgcacgtacctgaaccgcacaccggcttccgccgcctccggccagccggcctccttggccaccgccccgggtgccgctgccccggccgcgcccgacaagtccaagtcggagacgttcgtcatcgagatgaacaaccgccgcgtcaagctcaccgtgccgctcgacatcgtggagaacatcaccggctcggcccgcgcccgcggtgccaagcgccccacccagccgttgcgcggcgcaggtttgcacaacgtggcctccggtgccgccacggccaacgacggtgccaaatccggcgtcatcgcctccccgatgcaggccgtggtcacgcgcatcaacgtgtccgaaggccagcaagtggccaagggcgaccttctggtggtgctcgaatccatgaagatggagaactacgtgtacgcgccggccgccggcgaagtgaagaagattttcgttggcccggccgatggcgtggaggccggcgacacgctggtcacgctggacgtgagcgccggcaaggccaaggccgccgacgccaagaaggagggcggcaatgactgacatcatggattcgccggccgtgaaggccgcggctgcggcctcggccgccaacgccgcccagacctcggcccaccagccgctgcgcaccgccgtggtcaaggccgccgaactggcccgcgccgccgaagagcgcgcccgcgacaagcagcacgctaaaggcaagaaaaccgcgcgcgaacgcctcgacctgctcttcgacaccggcacgttcgaggagatcggccgcttccagggcggcaacatcgccggcggcaacgccggtgcagctgtcatcaccggcttcggccaggtctacggccgcaaagtggccgtctacgcccaggacttctccgtcaagggcggcaccctcggcaccgccgaaggcgagaagatatgccgactgatggacatggctatcgacctcaaagtgccgatcgtggccatcgtggactccggcggcgcccgcatacaggagggcgtggccgctctgacccagtacggccgcatcttccgcaagacttgcgaggccagcggcttcgtgccccagctgagcctgattctcggcccctgcgccggcggtgccgtctactgcccggctctgacggacctcatcatcatgacccgtgagaactcgaacatgttcgtcaccgggccggacgtggtcaaggcctcgaccggcgagaccatctccatggccgaccttggtggcggcgaagtgcataaccgggtgtccggcgtggcccactacctcggcgaggacgaatccgacgccatcgactatgcgcgcaccgtgctcgcctacctgccgtccaacagcgaaagcaagccgccggtctacgcctacgccgtcacccgcgccgaacgcgagaccgccaagcgactcgccaccatcgtgcccgccaacgaacgtcagccctacgacatgctcgaagtgattcgttgcatcgtcgattacggcgaattcgtgcaggtgcaggaactgttcggcgcctccgcgctcgtcggcttcgcctgcatcgacggcaagccggtcggcatcgtggcgaaccagccgaacgtgctcgccggcatcctggacgtcgactcgtccgagaaggtcgcccgattcgtacgcctgtgcgacgcgttcaacctgcccgtggtcaccctcgtggatgtgcccggctacaagcccggctccgaccaggaacacgccggcatcatccgccgcggcgccaaggtgatctacgcctacgccaacgcgcaagtgccgatggtgaccgtggtgttgcgcaaggcgttcggcggcgcgtacatcgtgatgggctccaaagccatcggcgcggacctgaacttcgcgtggccctcctcccagatcgcggtgctcggcgcggccggcgcggtgaacatcatccaccgccacgacctggccaaggccaaagcctccgggcaggacgtcgatgcgctgcgggccaagtacatcaaggagtacgagaccagcaccgtcaacgcgaacctgtcgctggaaatcgggcagatcgacggcatgatcgaccccgaacagacccgtgaggtgatcgtcgaatcgctggccacgctcgccaccaagcggcgcgtcaagcgcaccaccaaacaccacggcaaccagcccctctgatttctgaagacatcaaccaaacacaagtaaggaaagcaatgaccaccttcttcctcaatcgcctggccaccgagccccatgcgctcgccttcgccggccagtccaccccgtggccggtagccctggcagaccagaccaccgatcccagccttgacgaggccctgcgcggccacatcgccgcagccaaccgactgctcaccccggtcgccgccgacctgctgaccaccaccggacgtccggtcgacctgttcggcttcactccgaacccggcccgcctcggcgccgcagccgacgccaccgcgtccgtggaaggcgtggcactgacccagctcggcgccctgctcgacttggaacaccttggctacagtgtggcccaggccaagccgctcgccgtgctcggccactcccagggcgtgctcgccgtgcacatggcccgcgccatcgaggccgccggctccatcgaggccgccggcaagaccctcgacgagattctggccgtcgccgccctgatcggcgccgccggaacccgccgtgtgcgcgaactgggcctgaaccccaagtatggcgaagccagtccgatgctctccgtcaagggcgccacccgcgaacaggttgaggctctggtcaagcgcgtgaacaacgcccgaggcccgatctccatcgccgtcaccaactccgacaaccaccacgtgctttccggctacccggaagacctggcagcactcgccctcgaagccgagcgcgagcacaagcaccaggccaagctgcgtgaacagaagctccacggcggcactgtgttcaaccccactctcgaatacctcgaagtcaccctgcccttccactctccgctcatggccgacgccgtcgagcagaccgtggcctgggccggcgcctgcggcttcgaccagaagcgcacccgtgcgcttgccgaggaagtgcttctgaaccatgtggactggaatgcccgcgtcaaggcgctgttcaacgccgccgacccggccaagctgtggatcgtggaccttggtcccggcaacacgcttggcaagctgatcggcaatgtggtgcagggcaccggcatcggcgtggtcgaagccaccacgctgtccgaacgctccacgctctccacgctggaaagcgagcctgagcgcacccagaactggaaggcattcgccccgcgcgtcatcaacaccccggccggcgccaagctggtcaccaagttctccaagctcaccggcaagccgccggtactgctgcccggcatgacccccaccaccgtggaaccggaaatcgtggccgccgcggccaacgccggctactgggccgagctcgccggcggcggccaggtgaccgccgaagtgttcgaccgccacatcgccgccctcgaagacgagctggaggaaggccgcacggtcgaattcaacgcgatgttcatggaccgttacctgtggaacctgcagttcggctcctcccgcatcgtgcccaagaagcgtgcttccggcgcgccgatcgacggcgtggtcgtctccgccggcatccccgagctggacgaagccgtggccctgatcgagtcgctgcaggcggacggtctgccgtacgtgagtttcaagcccggcaccgtggaccagattcgccaggtcgtgcgcatcgccaaggccgtgtcccccaccaccatcatggttcaggtcgagggcggtgaagccggcggccaccacagctgggaagcgctggacgacctgcttgccgccacctacgccgaagtgcgcgcctgcgacaacctcgtgctggtcgccggcggcggcatcggcacccccgaacgcgcggccgactacatttccggccagtgggcccacgcctacggcctgcccgacatgccggtcgacggcgtgcttatcggtaccgccgcgatgaccgccaaggaggctcacaccagccccgaagtcaagcagctgctcgtcaagacgcccggtatttcggccgacgccaagtccgacgacgtgttcgccccgcaggccgcccactgggtgccgtccggcaagtccgtcggtggcatgtcctccggcctgagccacctgcacgccgacatttacgagctcgagaacgactccgccgaatgcggccgtctgctcgtgcgcgtcatgaagcaccccgaagagctcgactcccgccgcaaggaaatcatcgaagccctgaacaagaccgccaagccttacttcggcgacctggcctccatgacctaccttgagtgggcgcagcgcttcgccgaactcgccttcccgtgggtcgacccgacttacgccgaccgcttccagcacctgctgcagcgcatcgaagcccgtgtgaacgacacggactccggcgaattcacctccaagttgttcgccgctgatggcgtttctgctgaagaggcagctgccgctggcctgctgacccacgacgacattctcgccgacccggcccccgcgctcgaaaagctcgcactggcctacccgcagaccgccgaactcaaggtggtcccgaccgacgtggcttggttcccggtgctcgtgcgcgaataccccaagcccatgccgttcgtacccgtcatcgacaacgacctgctgcgttggtggggtcaggaccagctctggcagtccgaagaccagcgctactccgccgattccgtgcgtgccatccccggcccgatctccgttgccggcatcaccaccatcgacgagccgatcgccgacatcctcggccgcttcgaaaccgccgccatcaagcgcgtgcaggacgaacagcaagccgccgatgccgctgagaacgacgatttcgccgcacttggcgaggccaccagcgccgaagacttcatccgcaagtccccgaacatctcctgggtcggccacatcaccgacaacccggcctacggcaccgccctgggcgaccagtactacgaaatccgcgcgtttgacgccgcggccggcaagtacgatctggacatccacctcgacacctactgggacaacgacccggacggcggcacctccaagcacgccgtgcgcgatatcgtcatcccgctcatcgtggaaggcaccgagcccggccgtgtgccggtcgtggaccgcgaacgcctgattccggacgtctacgcgatgctcgccgccaccgcaggcatcggcaacaccgccatcaccggcgacaagctcaccgagatgccgcagcttgacgacaagacctctgacgagcgtccgttcggtaccgcaaccgcaacctacaccctatccgccaacctcggcttcgaccacgaagcggccactggcgccgctctgccgaccaccctgcagcccagccgcatcgcccccgatgcgctggtcggccctgcctggccggcaatctacacggcgctcggctccgtgtacgtcaagggctacccggtgattgaaggcctgctcaacgccgtccacctcgaccacctcatcgaacttgaggtgaacgaggaggacctgctcaagcacaccggcgaaaccatcaccctgaagtcttgggccgaggattacttcgagtccgcctccggccgcgtggtcaccatccacgtgacccacaccgccgccgacggcacgccgcttgcccgcgaaaccgagcgtttcgcgatccgcggccgcgtctactccgatgctttgcctgcagacgcccccgagtatggtggtgccctcctgaataaggaagcggatggctccgtcgccggacagtccactggactgtccgcctcctcgcgcggcctgcaagtagtgcaggccactccgcgccgtctgctgcgccgcgtgaaggtcgtcgccccacacgacatgaccgccttcgcccgcacttccggcgacttcaacccgatccacacctccactcgtggcgctcgcatctccggcctggccgccccgctcgtgcacggcatgtggctgtccgccaccgcccagcacgccgtgcaggcgaccgacgagaagggtgcccactacgagattgccggctggacctacaacatgtacggcatggtccagcttgacgacaccgtcgaaatctccgtcgagcgcgtcggcaaagtgcgccacggcggcatgaccctcgaagtcacctgccgtatcgacggccagctcgtctcccgcggcaccgcactggtccgtgcgccgcgcgccgccttcgtctaccccggccagggcatccagaagcagggcatggttctggacgagcgcgccaagtccgccgccgcccgcgacgtgtgggagcgcgccgacaagctcacccgctccaagctcggcttctcgatcctgggcctcgtgcgtgacaacccgaaggaactcaccgccaacggcgtgacctaccgtcaccccgaaggcctgctcaacctgacgcagttcacgcaggtggcgctcgcgacggttgcttttgcccagaccgcccgtctgcgcgaagccggcgccgacatctggcccgcctacttcgccggccactcgctcggcgaatacaacgcgttgtccgcgttcgccgacgtgattccgctggaaaccgtgctggagctcgtgttccaccgtggttccaccatgcaccacctcatcgagcgtgacgcacagggtcgctccaactaccgcatgggtgccctgcgcccgaaccagttcggtgtggacgacgcgcacgtcaaggaatatgtggaatccgtggccaaggcgtccggcgaattcctggagatcgtgaactacaacctcgccggccagcagtacgccatcgccggtacgatcgccggactcaaggccctgaaggccgattccgcccgccgcgtggccgcattcggtggcaagcccgcgttcatgctggtgcccggcatcgatgtgccgttccactccacgctactgcgcaagggcgtgccggaattccgcgacaagctcgacgcgctgcttcctgcttacatcgactaccgtggccgtctggtggaccgctacatcccgaacctggtggccaccccgttcgagatgaccaaggaattcgccgccaagatcctcgaagccgtgccgtccgaacgcatcaaggccgtgctcgacgacccggccgtgtgggattcctacgccgccgacgaccagaagctcggccgtctgctcttgaccgaactgctctcctggcagttcgcctccccggtgcgttggattgaaacccaggcgctgctcttcggtcagcgcgaacagggcggcctcggcgtggaagaatacgtcgaagtcggcctcggcaacgccccgaccctggccaacctcggtaccaagaccctacgtctgcccgaattcgccggcaacgatacggtcgtctacaacgtcggccgcgatgaaggccgcgtctacatgaccgacaccgattcgctggttcccgacgacgagccggaagaggctgcggcctcggccccggtcgaaaccgctcctgccggtggttccgccgtcgccaagctcggatcgggtgctgctccggcaaatgccgcgactgaggctgctcagacaacggatggctctgtcgccggacagtccactggactgtccgactcctcgcgcggcctgcaatcagggcaggccgctgctggcgcaccgtctggtgccgccgtcgccgacctgcccttcaaggcttccgatgccatcggcgtactcatggcctactccgccaaggtgcgcctcgaccagatcggcagcaacgacaccaccgacaccctgaccaacggtgtctcttctcgccgcaaccagctgctcatggacatcagctccgagctgggagtcgccagcgtggacggtgctgctgaagcgacgctcgacaagctcgcccaaatcgtcaacaaggccgccccgaactacaagccgttcggtgccgtgctctccgaggcgctgcgcgaccgcctgcgctcgctgttcggtgccgccggcgtcaaacagcagcacatccgcgaccgcgtgaccaacgtatggcagctcggcgaaggctgggtggccagcgtgctcgccgcactgctgctcgacactcgcgagggtgccagctcccgtggcggcgacctggccaagctgcccaccgccgccgtgcagaacaagccggaagccgacaagctgatcgatgcggccgttgaggtcgtcgcccaactcaagggtgttgccgtggccctgccgtccgccggtggtgccgctggtggcgctgtggtcgattccgccgcgctcgacgccttcgccgagaaggtcaccggttccaacggcgtgctcgccgccaccgcccgcttcgtgctgaacgagctcggcgtggccgctccggctccggaagaatccgaggacgagaacgccgccgtcgtggccgcggtcgaagccgaacttggctccgactggaccaagcaggtcgctccgcgcttcgacgccaacaaggccatcctcttcgatgaccggtgggcctccgcccgtgaagacctcgcccgcgcctactacggcaacgaccccgccgccttgaacggcagcttcatcggccttggcaagaccatcgccgccgaagcccagtggttcgccaacgagtcggagagcgaggagcttaaggccgccttccagaaggccggctccgaggccctcgaacaggtcgcttccaacaagaacgcctcccgttacgcgaatgatatcgccatcgtcaccggcgtgagcccgaactcgattgccgctcaggtggtcgaaggcctgctcgcaggcggtgccactgtggtggccacctcgcacagcttcaagccgtccatcaaggcttgggccaagcaggcctaccgcgagcacgccaccggcaacgccaagctgtggctggttccggccaacctctccagctaccgcgacgtcgacgctctggtcgactgggtgggccacgagcagaagaagacctccggtgccaccaccacgattctgaagcccgcgtgggagccgaccctgttcttcccgttcgccgctccgccggtccacggcacgctcgccgactccggcgacctgttcgaatcacaggcgcgactgatgctgtggggcgtggaacgcgccatcgtcggcttcagccacatcggtgccgacaccaacgtgcagcacaagctccacgtggtgctgcccggctccccgaaccgcggcgtattcggcggcgacggtgcctacggcgaagtcaagagcgcctttgacgccatcgtcaaccgtgcccgcgctgaaaaggtgtggtcgagccgcgtcaccttcgctcacccgaagatcggctgggtgcgtggcaccggcctgatgggcggtaacgacccgctggtcgccgtcgttgagcgtcacggcatccacacctactccaccgcgcagattgcggccaagctgctcgacctgtgcactgccgaatcgcgcgagcaggccctcaaggccccgctcgatgtggacctgaccggtggcctcggctccgagcccatcgacatcaaggcgttgcgcgcggaggctatggccgatgcggagaaggaagctgctgcggcctcgtctcaggaaacggatggctccgtcgccggacagtccactggactgtccgactcctcgcgtgggcagcaaatcaaggcgctgcccaccccgatcatcaccaagcaggcttcggtcgacctcaacgactggaccaacgtcaccgccaagccggaagacgaaatcgtcatcgtttccgtcggtgagctgggcccgtggggctccggtcgtacgcgcacccaggccgagctcggcatccactcggacggcactgtcgacctgagcgccggcgcagtgctcgaacttgcgtggaacatgggtctgctgacttgggccgacagcccgaagcccggctggtacgacaccgacggcaacctcgtgcccgaagaggacatcgccgagcgctaccacgacgaggtcgtggcccgctccggcatccgcccgttcgaggaaggcatgggcaacgactacaaggacggtgctgacgaagaagaagccgaggtcttcctcgaccacgacgtcaccttctctgtgcccacccgcgaagtcgccgccgaatacgtcaagttggacgaggctcacaccaccatcgccccggatgaggaatccggcgaatggaacgtgacccgccacgccggctcgatgatccgcgtgccgcgccgcgccaccatgacccgcacagtcggcggccagttcccgaagggcttcgacccgacccgttggggcatccccgcttcgatggtcggcgacgtcgacaagatcgccctgtggaacatcgtcaccactgtggacgcctatctgggcgccggcttcaccccggccgaaatcctcgagtccatccacccctcgctggtggcttcgacccagggcaccggcttcggcggcatgatgtcgatgcgcaagctgtacctcgaccgcttcctcaaccacgagatcccgacagatatcctgcaggaggccctgccgaatgtggtcgcggctcacgtgatgcagtcctacatcggcggttacggcaacatgatccagcccgtctccgcctgcgccaccgcggccgtctcccttgaagagggcgtcgacaagatcgccctcggcaaggccgacttcgtggtcaccggtgcgatcgacgacatcggcgtggaatccgtgatcggcttcggcaacatgaacgccaccgccaactcggaggaaatgtacggcaagggcatcgacgcgcgcttcttcagccgcgcgaacgatcgtcgccgtggcggcttcctggaatcccagggcggcggcacgatcctcgtgacccgcggtgacatcgccgaaaagctcggcctgccggtcgcggccgtggtcggcttcatccactcctacgcggatggtgcccacacctcgatcccggctccgggcctcggtgccctggctgccggcctcggtggcaaggactccaagctcgtgcacgacctggctaagctcggcgtctcagccgacgacatcgccgtggtctccaagcacgacacgtccaccaacgccaacgacccgaacgaatccgagctgcacaacacgctggcccacgccatcggccgcaccgacggcaacccgctgttcgtgatctcgcagaagacgcttaccggccacgccaagggtggtgcctgcatcttccaggtcaacggtctgacgcagctgttcaagtccggcgtgattccggcgaacgcagcgctcgattgcgtggatccgaagctccagcgcgacgaccacatggtctgggttaggaagcccctgcgcatcggcggtggcgaggacgagttcggtcgcgagaccgctggtcgcccggtcaaggccggtctggccacctcgctcggcttcggacatgtttccggcttcgtggccctggttcatccgggtgccttcgaagcggccgtggccaaggccgatggcgaggccgcgctggaagcctggcgtgagcgtgccaacgcccgcctggccgccggccagcgtcacctcgaggaaggcatgatgggtcgcgccgcgctctacgagccgatcgacaaccgtcgcttccgcgaggatcaccgtggctacgaccaccacgaggtcgaaaaggcgatgctcctcaacccggacgtccgcctcggtgccgacggctactacgaggcctgattcctctggctcccctcggttgatgggagccagtagcgcaccggatctcggctcccctctttgaggggagctcccgcgaagcgggtgaggggagtttcccctggagctttctcgctggcacaaactcagtgagagaaatatgcagaacatacgaaagcccctccctcggagtgagctttctgcgtttcaaggggctgatttggcattcgccggaggtctacttccgtttcaaggggctgttgcccaagtagacaaggcgtaaaaacggcggaatggcgttggcgttatgctgcggatactcgtggtatggaggatgaccagccccttgaaacggaagtagacctccggaacggtcaaaatccgcccctcgaaacggagatagacctccggggcggggcgcggatgtttttttggacggctaggcggccagcccaagatgtttgcggtgttgcgcgaggtcatccagcctagtgaatcttttcccccgaaatggaaatcaggccccaattctgatgaggtgtagagattacgcgcgaagcggtacacaataggaagcatgaatacttgtggtttggggcatgacgtggtggatgtggccgcattcgccgaacagttggcggagccggggtctcgcatgcgtgctctgttctccgtgcgtgaggtgcggcaggcatccgaccgcgcgcgccagaagaatgacggggaggccgtgcatctggccgccaagtgggcaggcaaggaggcgttcctcaaagcgtggtgcgattatcttggcaatgccccctatccgttcacgcttgataatttcccgtggcctgaaatcgagatcttggatgattcccgtggtgtgccgcatgtgtctctgggtaagggggcggcgtcagtcttccaaactgattacgcgaattcggctgccggcgctcgctattcctctgcttattcccctgcttccgataacgggccttatgcagtgatgcaggagcggcggaatgcgcgttcggcgcagcgctcggctctcggtgcggggtcgatgccgcatatccatatttccctgagccacgatggtccgattgcctccgcggtggtgacgatttctgtggaatagcgcccgaggcccccgagtgctacatgctgtacaacgtctccatcatggttaacctgtggagcgcgctcaccggccgcgacgtgcgcctgctcaagaaccagatcgacaagctcgactcgctgcccgaaaactgctggttcgtgattctgaatgcgatgggcgccgacctccaaccatacgagtcccagctcatccatttgtgatttcgacggtttccagctcccctctctgaagggagctgtcgccgtaggcggctgaggggagtcctcggcaaagccacaatccatcaactagattggctggtcctgctgcagccacacgcgtttgccatccccgaagaaatatgtataataactcaagtcgccaaaagcgacgcttaacgcggatgtagctcaatggtagagcctcagtcttccaaactgattacgcgggttcgattcccgtcatccgctccactatttatatgttggtgtatctaattgggaataccggaagggtgagctaccccgagtagtattagtactcatggtgttgagaatcgacgaagctgaactgcgtgccaagctctttgagcacaaagagcagattggtttcgggccgattgccaatggggtcgtcatcatcatcgaaggattgttttacattcctgctgctctcacatctggactcgaccaaatgtttcaaggattgctccttgcattgagcattatcttcatattctatggagtatggagtttgattactgcttgcagaaataagtatgatgccataacactgtatgaggatatcgccaacatggatagaaccgaacgaagaagctcgatcattgcggtgaaagatgctaaccgatatcttctgtatcgtgatttaggttggggatgcgactttttccctaatcatgcaaccgcaagcagtactgatgaggatgttcgtcagctgacgacgtattttgccgatgaattcgaaattcctgctaaagactttactctgtctcacatttgtgtgaaggattctgagaagccatccacggagcatgatggagagattcgttattacgaatacacgctataccgcgctagcgtaacggtaatgcctgacgcctggcgttccactgagttccatgttggtgccaaggactgccgctggatgactcttgatgagatgcttgccgaccccggcatcaacaaaatcaatcatgatgtcgttgcgatggtgcgggataacttgtaattgttgccacttcgggcatatgacgattgagccaaagcatgttctatgtttcgataatcatcaaaagcagagcatagtatgctctacggggatttttctataccctgaaaataccgaaaatcaggatatagggcagtagcacgaattagccaacagcggcttgtctgcgggcaataatgacgttgctcccgcggattcggataaggagaatcgtagcgaggatcatggtgagggccatggcgagtaatcgatcgtatcggagacttgcctaacacacacgctaagatgggcatcgcaataatcggcaatgagcaggtaatcggcgaggcggtgcatggagcaggaatccaacgagcaagaacctaacgaggcgacggaaatcgtaggcggcaaagtagagaccgtcgaggtttccaagcaccccgaggcttccatacccgagaccgatttgtctctggcggatatcgagcgccgtcgttcgcatccgttgcgttgggcgctgattattcttgccgtactgtgcgccatcatcgcgccgtactggttcggccgttcgttggcggtaaataatactgactccattgtggccgtgctcgggggagtgtctccgcaaggcatcgcactggtcggttgggtgaccgtggtgattgcgtacgtcggattggcgatggcggtggtcgtctcgccgtcctggccgtggttgatcgtgttcgtgatcgggttggccggcgagcagttcatcgcgggactcagtatgctcaatctcaatttctggtattccacgtacgtggtctacggtaagcaggccggcctggcgaatgccgcgaatctgggcattatgggtgcggcgatcggcatcgccgtatatgccctgatgttcgtgggtctgctggtgattatccggaagacctcaccactgaacgtactgaccaaaagctgggcgagcttcattctgtacttcgtgattgaaaccatcgccctgctcgtggtgttgtttggcggattgctcaccactgtgtgagcgcgtgtgccccagtccggcccctgccgtatagttttcatttggcgtaatttcgcccgcggatagagagcgtttcgagcgaacctgcacgaaacaccgcgcaacgacacaataaggaggacgccgtggcactgacggctgacgagaagacccagattatcaacgagtacgcgacgcacgaaggtgacaccggttcccccgaggtccaggtggctctgctgtccaagcgtatcgccgacctgaccgagcacctcaaggagcacaagcacgaccaccactcccgtcgtggtatgcagctgatgatcggtgaccgtcgtcgcctgcttgactacctcaagcgcgttga

SEQ ID NO: 1101 - DNA, 56398 bp, Unknown
  R13_10m  MAG No. k141_16124
ctcaccttcgaggcggcgaacacgaggagcggcagagcggcgaacgcatagttctcgcattggatgtacaggtatgcgaccaggacgagccagcagatgacggtcttgtgccagacgccggattcgcccgaacccgcgccggcaacgccatcaccactattgcccccggcaacatcagcaacgtcggcaacgtcggtgacacaaacaccgtgcgccagcccgtcggacgatgcgccatccgcaccgccacggcataccgtcctcccgcgcgtcatgcagaccatcgaggctccgaccagcatggccagcccgatcagcccgtattcggcgatgacgctggtatacgcgcacatcgtccacaccgtgtccgcgttcacgccggccgcgaatcccgtggccgcgccgccgttcataccaagaccgtccagcagccgtccggctttggccgcgccggcccacaccgcattgatgatgttgcccgcgccataaccggtgagcagcgtccacggatgggtgagcaatccgcatatcggatcgaggctttggtagatccgcgcgaagaacgagccgtctccctcggccccgttctccgcgatggcggagagtctggaatccgccagcacacccagcaggcccagtgcgcatgcgccgagaatctgcagcatgccccggacgcggcgtgcgccgtcatgccaatcggtgcgcgccacaagggcgatcagcaacgccacgacggaatcgatgacgattctggtgccggcttgcatgagcaccgcgccgacggcatacgtgacgatgaggtcacgcagccgtttggcgtagatgcggtcgcgcccgcgcatgagccacatgagcggaagcagtatgccgaacaggtgcatgccgatatagctgggctcggcgaacaggaactgcggacggccgccgccccacaccgagttgtcgctgatgtattgccggtacatgaggtgcgagaaatagtcggtcaacggtttggcgcgcagacggatggacagccattgcacgacgcccactccgaaggaaacccagtatgatgcgatgagaatccgcaatggcgtacgccacggaatgcgtttgatgtcgaacgcaagggcgatcgcacccaaagtggcgagcacgcccagcaatccggtgatgctcatgaacgcggcgttgaggtggatgccgaacttcagccatcccgggatggacaggattatacagaccaccggtaggaggaacattggcaggtaccggttggctgcgatgcgcagttgccgccaattgcataggcagtacacggcgaacagcgccggactgattggcgaccagaacggcgcgtacagaccaagcgtggtgccgtccaccggaagaaaagcgacggccagcaacagccaaatgacgttgcgttcctgcgatgtcagaaatcgcaggaacgaccggtattgcggtcggccatgatggttgcccgcgtcgatggtgtcgttgcgtacgcatgcctggttcatgtgattctccctccccgtcaaccttactcgttcatcacgatgcgcggacgggggcatgctttccccgccgaacgtgcaatggcccgaacattgacaaggccgcaccgaatgcccccatcattggcacattgtgcaatctcgtcgcgactggctgacgaaataatgttggccgaccggttacattggttcggtacagtgacggcattattggccactggatcaagcgatttgcggcagaacgacgaaagcgacacttgggcgaaaagaggcaggcatgactacgaatcgaccgctcattgcggtgactccgctgatggattacgggcgcgatagtctgtggatgctgcccggatatatggaggcgataatgcgggccggcggtacgcccatcatgttgccgctgaccgatgacgccgacattcttgcgcaatgtgccgaacggtttgacgcgtttctgtttacgggcgggccggatgtgggaccgatggttggtgcagcggcctccgccaccggccgtagcgaggtgctctctcctgagcgcgaccgaatggaatcgattctgctgccagctgtaatggcttgggacaagccgattctgggcatctgccgtggcattcagttcatcaacgcggcactgggcggcacgttgtggcaggatttgccaagccagcatccgagcgatatcgaacaccatatgaatccgccgtacgatgcgttcgggcacagcgtttccttggtgtccggcactcccctggcttcattgttcgcggggcagactgagattgcagtaaacagctaccatcatcaggcggttcgtgatgtggcccccggtctcgaagtcatggccgttgcgcccgacggcgtgatcgaggccctgtaccggccggcaagccacttcctgtgggccgtgcagtggcatcccgagtttctctacaaggtagatccacgctcgcaggcgatttttgatgcgtttgtggagagttgctaacaacggattttttgcgtgaccacgcaagcataatcgagattgccacctcatgacaacggttccgcaccaggcagcggcgcgtctgtgttatctggaaacatggctgcatcttgctggaaaacatcacctgaagtattctaaggtcattggatgttatttttttatcacataaaatatcatttttttatacagcgtgtgataaaattatcaacatgattccatcgaacgttcgatacgtaactcgaccgttggcacaagtcctccgtcagtgtccaaacaaagtagcggtgctggaaggagcacgagcagtcggcaaaaccatgcttgttcagacagaattgccagacggctatcattatgagacgcttgctgacaagaggacattcgagtacgcctcatctcatttggatgagtgggttgattcgctacccacgccgtgcattatcgacgaagctcaacgtattcctgacttgcctctatccgtcaagggagtaatcgacaagcaaactggttctactccttttttcattcttactggttcagcatcaatcacccgagatgggctagacggacaggacccccttacccgccgttccctgcgttataccttatatcccctaacacgcagagaaatcaataaaaatactgataccagcatcattgacttgttgtggaacggtaccccaaatgcgaactatcattcagagaccaatagggacacactagctaggtatatgactgtgggaggtttcccctcgtatgcaatgccctccatacctattgcagagagcgatttacgtttttccgtaaaaacggatatcgataatgttttgggcgataccatacttcccggagagcgattggataaagcaatagctgatgccatactcaaagagttacttgcagtccctggcgggattttgaatgtaaaaagaatatccgacactattcattcgaatccctccaccattgagcgatacatcagtattttcatgcgccgattcctaatctccgccttaccgaacctacgctcagcacctggtaagcaactgtttacccgcgcaaaaatacatccagtagacacgtcattcagcgttgaaacaatacgacaatccggcagagattttcataatgatcgcgttctgtttggcgagctttttgaatcattcgccgtcaatcaaatcattccggaaatacaatggtccgatatacaccccgacgctttctactggcgggaaactggcaataagcccaaagaggttgatctcgtgctgctacacgataatcaacttgtcgctttggaaatgaagtccaacaataccgtggaccgcaaagatttttctggtattgcagcattgcgcgacagcgacaagcgcttccaccgaggctacgtcttatacacaggagacaaggtgcagcagttcactaacaacatatgggctctgccaatttcatcattgtgggacagtgacggattccagacagctacttcggatgctgaacattactcattatcggttccatcagttttacctattcggccgtccgacaccgatgtggcagctcatgccaatgcccctactgatgccaacctgtttttaagctactgccatgcagacaacgaccacctcaagggggcaatacttcaattcgtgaatgatattatcgacgaatacaattacgagaccagcaatacactcgggttattcgtcgacaagacctctataaactggggtgaagattggcgtcaggcacttgatcgaggcattggtaatgcaaatatcattcttccaataattactcccagatatgtgcgcagtgaggcctgtcgtaaagaactgctggatttcaatactcgggtcacggaacatggaccgaatcgtatacttccattgatgttgcaaagcatagatggcatgactggaattagcgatcgtgatcctgtttgggacatcgcgcataatcgacagtatctaccagtgggcgatttgcgtttaatgtctgctgaagatcgtcaaaagagaatccttgaaatcgtgaaagaacttcgcgcagtaatagaggatattactgcccgatcacaatctgatgacacatcagagtcagttgtgagcaagtttaagggagacaacacaccggatttattgagtgcctggaatgagatagaaaaacttacaccacaagttaatgtgggcgcgcaagaatttgccgtatcatttcaaaatatctcaaagacattaagtacccatcccgctcctgcgaacggcaatgcgtctgtctattcctcatgggcgatacaactatcagaacaactacaacctgacattgattcgctcaacaaggcatcggataatctgtcagaactatggaataacgcctatgccgtcatgtctcaatacgtgggcttcattcagagccttccacaaggcgctctacgcaacagccagattgacagcatgggaacaacattcgatggattgcgcacttcgctatccatgcctccggaagtgacacagatgctgccccttattcgtatgcttggtaattttgcgcgtccccttcgcccatttgctgatgccgtcaaccaatcattcaatgtaatcgaaaatatgggcaccatgacggctgcattacaaaatcagcttgatcgcatacctcgataaatcggaattcaattcagtgcgcatcggattaatgcgaatcatctaaaccacctaaaaggggctgctccggtttcccggaacagccccttttagcggtagcagtcagcagactgatttagtcatcggtgctggcttgccagcgctgattggcgcgtgcggagaccgccgtccgaaggcgaggggcgtacgaaggtacgtcgaacctgaggaaaggcggtatacgctccgccaatcagtgctggttgttgagacggtggtacatctcggacagctccagttccttctcgaactggcgagcggtggtgttctcgtcgatgacggcgagctcaacaccggcgatgcgggcgaagtcttcccaagcctcacgaccgacggaggtggtcatgcaggtgtggtgagaaccaccggcggtgatccagcactcaacagcggtcttcaggctcggcttcggctcccagacggcgcgggcgcacggaagctccttgagggagccctgcggctcaacgacgtcgacgacgtccatgagcaggcggaagcgttcgcgaacgtcggacatggagaccacgacggcgtccttggtgggcttgccggagaagaccaggcggaccgggtcggccttgccgccgatgcccagcgggtggatctccagcttcggcttggcgatggtgccgatggacggggaaacctcgagcatgtgggagcccatgtcgagctcgtcgccctcggtgaagttgtaggagtagtcctccatgagggaggcgccaccctcaaggccgtagcccatgacggcgccgatgcgcacgaggacggcggtcttccagtcgccttcagcggaaaagccccagccgtactcggacgggaagcgctgtgggccaacgcccggcagctgtggcagagcgccgaggtcctcgaaattgtcgacgccggcggtgcagccgttggcgcgcatcatgttgaccatcgcggcctcttccttggcggcgatgaacagggagtcgtacttggcgtccagcagagtcgggtcgacgtcgtacttggccttgtagtcctcgatgatctccttgacctggtcgtccttgacggcgtcgtacgcagcgacgagctcgttgacggcccaagtgttgatggaggcgccgaacacgcgctcggcctcggtcttgtcgccctcggtgacggcgacgttacgcatgttgtcgccccagcgcatgaccttcatgttgttggaggcatcccagccggcgcaggcgcgggcccaggtgccgaccttctcgacgacctcaggatcggtgtagtggccgacgacaaccttgcgcttgatgccgaggcgggagacgatgtaaccgaactcacggtcgccgtgggcggcctggttcaggttcatgaagtccatgtcgatggtctcccacgggatttccttgtggtgctgggtggccagctgcagcagcggcttggtcagcgcttcgaggccgcgaatccacatcttggccggggagaaggtgtggcaccaggtgatgacgccgatgacgttcgggttggcggaagcctcgaccatgaactccttgacaccgtcggaggacttcaaggtgggcttgaggacgatcttggccggaatcttgccggtgttgttcaggtagtcgaccatttcagcggagtgaatggcgacttggcgcagggcttcctcgccgtacaggtcctgcgaaccaacgccgaaccagatttccttgccctcgaaggggttttccataaccatagggttacttcctttacttctttgtttatgggggtttgtttaagtttcattcgccgaccgaggctcccctcagagaggggagccaagacaccaccgtgctggcggagtcagcgctgatttgatgtgtgtgcccgcaagacgcggaaggcgaaggcgtacgaaggtacgtcgagccttccgcaacgcggcggacactccatcaaatcagtgctggccgtagacgttctggtagcggtcgttgagcttatcgatgtcggcctggtcgatctcgatgatgtcaccgagctgacgggcggcccacatggtgtgagcgacttcctcggtcatggcagcggccttgacggcgccttcagcatccttgccgatggtgaaggggccatggttctgcatgaggacggccggggacttcgggtacttcttgagggtctcgacgacacccttgccgatcgcctccgagccgatcagacggaacgggccgaccggcaccgggccgccgaactcgtcgcccatcatcgtcaggccgcacgggatgttctgaccagtggcagcccaagcggtggcgtaggtggaatgggtgtgcacgacaccgtagacgtcgggcatgttgcggtagatgtaggcgtgggaagcggtgtccgaggacggggcttcggcaccgtcgaccacgttgccgtcaaggtcgcacacgaccatggaggacggggtcaggtactcgtagcgcaggccggagggcttgatgacgaacaggtcggcggtgtgcagacgctgggaaacgttgcccgcggtccacacgaccaggttccacttgatcagctgctggtgcaggttggagacgacctcacgaacctgcttgacctcggcgcgaacctcggggccgtaatcagccaaagttgccattattggttttcctttccactgtgatggatggacgttttttcaaaatctcaaggacctctctcaatagagggaggtcagaaaggcttacttatcttcgaggttgatggtttcgatggcagcgtgctcgatgggcaggcccttggtgaagcgggcgaagaagtcctcgaaaccaaccacatcggaagccaccggcttctcagtggtggactgggcgtccttgaacacgaaaccatcaaggaagtcagcgaggttgctgtgatcctcgttggtgttccacaggtagttggcgagcacggccataccccaggcaccaccttcggcggcggtggacatgaccttgatcggggtgttgaaggcagcggcgagaatcttctgagccaccttcggagtggtgaagatgccgccgtggcccacgagagagtcgacctgcacgtgctcctgcttggtcatcacgtccatgccgatcttgaccggggagaacgcggagaacagctgggcgcgcatgaagttgccgagggtcatgttggcttcggggctgcgggcgaacagcgggcggccttcaggcagaccggccaggaattcgccggaacggaacggatagttcagcaggccgccgcagttggcgtccacgtcgtcggcgatggccgcgcggaacaaggtgccgtacagcataccggcatcaaccgactggccgatggccttggcgaactggccgaacaggccgacccaagcgttgaggtcggaggtgaagttgttggcgtggctcataccggccagatcgccggccggggtggtgaccaagtcaacctcagggtggagggccttgagcttgtgctccagaaccaccatggcgaagatggaggtgccggcggagacgttaccagtgcgtacgcgcacggagttggtggctaccatgccagtaccggcgtcgccctcaggcggggcgagcacgatgccgggattcagggcaccggacggatcgagcagcttggcgccttcctcggtcagctcgccagccggagtgccggccacgagcggctcaggaagcaggttctccagcttccacggctgggctgcgacctcaggcagagcgtcgaacttctcgatgaatgcggtttcgtaagtgtgagtggtcgggtcaatcgggaacatgccggaggcatcgcccacaccgaggaccttctcaccggtgagcttccagtgcacgtaaccggcgagtgtggtgaagtaagccacctcggagacgtgctcttccttgttgagcacggcctggtacaggtgagcgatggaccaacgctcggggatgttgtactggaacagctcggagagcttcttgtgagcttcggaggtgttggtgttctgccaggtgcggaacggcaccagcagttcgccggcctcgtcgaatgcgaggtaaccgtgcatcatggcggagaagccgatgtggccgacgtgcgtgagcttctcgccataggcggtctcgacgtcgttggccatggaggcgtaagcggactgcaaaccgccccagatctcctcggtggcgtagctccacagaccatcctccaagtgggaggcccagctgtagtcgccggaggcgatggtctggaagttgtcgtcgatgaggacggccttgatgcgggtggagccgaattcgatgcccagcgtggtcttgccagcgcgaatcttctcggcgatgtgggcggcctgctcggccgcgttgtcggttgctgccatatctttcctttgccttggagcgccggcgttgttatccccttccttggggaggatgttagcgctcacaatttcaaaaacattgtaccgataacctgcattcgacacaacttataccgtgtcacgcatcataacggtttgataacagcgccaatttaccgccgaggagccggccccaaggaccgccgagcacgcacctcggcgggaatcagccccacgccgtgctgggtggtcaggaaggtcggctcgccgccctcccccagcaaacgcagcgtctcgcgcatggcggccacgccgagcccctcgaaatcgggatgcacggtggtcagcggtgggtacatgttatccacgccagacatgtcgtcgaatccgaccacgctgatgtcttgcggaatccgaagcccatgctcatgcaacgcgcgcatgacgccgacggcctgattgtcgttcgcggcgacgaccgcggtgggcaacgccgtgcctcgacgcccatactcatcaatgagatgattcatgtgcgcatatgcctcagaggcatcccacgtatggcagcgcacgatctgcgaatcgatggatcgggaggcggcgagcttgcgccacgcatccagtcgggtgtgggcgtcgcgccattcgttgggaccggcaaaatacagagccgatttgtgcccgtattcgcccagcaaggccaccactttggccattgcaccccactggtcgataccgaccagtgcagtgcgacgcttgttttcggtggagataaggcccaatccctcacgcacggtcatttggccgtgggtggcggtgacgatgacgcgtggctgagtgactcgcgcacggcaggcggcggcgaacatcacgtcggtcggggtcaggaagatgaaggcgtcgacgttctgctcgttgaaggtgtcgcacaggttgtcgaattcggactgcatgcacaaggcctcgtggaccatcatcacgctcatgaacagaccgtgttcgcgggccatggattcgatggatgagatggaggaaatcgggccgaagaatttgaggcccccggcgatcaggcctatggtgcgcgaacggcgggaagccagtgcgcgcgcggagttggaggggcggtagccgagttggtcaatggcggcctggactcgcgcacgggtggcgtcggaaacgtccggcgagtcattgatcacacgggagacggtttggtggctgactccggcgagcttggccacttcgaacatggacggacgtttgcttggcttgcggctggtcaccatgctacctaacctccccgctggcggccggcacccatgcgcggccaggcttgtaccttaatcaatactgactttagcgcgtccacaacagttttgcgttagcgctcacactgtcgtgtcgcacgcggctcaggtcaggtgccatgagacacgatggagcggagtcggcccgtgttcggcgatggcggcacggtgtgcggcggaaccatagcccttgttatgagcccattcgtaggcggcgtaacgtgggttgctttgcgcgaggtcgaccatcagccggtctcgggtcactttggcgatgaccgccgcggtggcgacggtggcgcaatgctggtcgcctttgactttggtcgttatatcggctggaatcggcacgtccggcgcgtcgaacgtgttgagcgccttggtgatgtaatcgctcggcccgtcgagaattccggcgactttgggcagggcgcgaacgctttccccacaatttccaatggattcccctacggagtctcccggacgaccttccacaatctcccccgcagccttttttgccgtcaatccccctccaagccgtaagccaagttcgcgttcgacttggctgagcgcgcgcagggcggccacgccgagcgcataggtgatgccccattcgtcgatctcggtgttgctggcctggcctacggcgtaggccgcgcaccagtcgcgcagttcgtcgaaaatcgcctcgcgcctatgttcggtgagcatcttggagtcggccacgccgtccggtacgccgaggtaggtccgcccggacagttcggcggaatcatcgccgtcaagcggcgccaaatcacaggcccagatggcggcgcacccgaccatcaccggaccggcgagcgcgccgcggccgacttcatcgaatccagtaataaggtcatagccctgggccgcaaggctgcgttccaagtcaagtgtcggggtaatcatgcgcggctcccatcgtctcacaatggttaggattcagacggtccaggttcaaatggttcaggattcagacggcccggaactcaatcagttcaaagactcacacggttcaaaaaagactcaggaattcgagccggaagcgtcagacacgtccttgaagacttcgtggtggtcatcaatcgcaccaagccggtcaagcggccagtatctcgcgattccgactccgaccacatcggagatgggaaccaagccgcgatcgccgtcatcctgatgatagcgggagtcggcggaattggcgcgattgtcgcccatgacgaacacgtggccctcggtcacggtcaccgagaacgggaaagcgctcgggtccacgccggggcgaatgtaggaggtctcattgatggccacgccgttgatggtcaccggctggcccgcgcccttgcattcgaccacgtcaccgggcaggccgatcagtcgcttgatgaggtacccgccaccgggagcgctgctctgctcctcgttcaaccagttgttgggatctttgaataccacgacgtcgccgcgctgcagatcgaagatcttgggggtgagcttgctggtcaccacgcgatcgccgggcaccatggtgtccatcatcgagcgcgaaggaatctcgtaaaagccgacggcgaaaatgcgaatcagcagcacgataagcacgggaacgccgcaccacaggaaaaagtcgcgtagggtgaagtggtcatcatccatcgatgatgctgccgcggcattcgtgccagcggaagaagcggcgtgcgccgggcgcgccggtgccgggggaaccggggacggggcgatgccgtggtcggcgacttggaacgtgcgggaatcgcgggcatcggcctcgtcatcatacgaggtctggttgctctccggattgtcggaaaccgggaattcgccattatcctgatcgtcctgcataccatctcctcgcgattcatgctgccggatatgaggggtgccggcgcccgtccatcatacgtggaaaatacggaaacagcccgaaaccgaaacggttccgggctgaatttcacggtttattcgcgcacctgcatcatcaggcccacgattgcacccgcgaatcgactcacttagcggagttgtcgcggcgctcggcaatacgagcggccttaccgcgcagagcgcgcaggtagtacagcttggcgcggcgcacacggcccttacgcacgagcttgatggagtcgatggacggggagtgcaccgggaagcgacgctccacaccagtgccgaagctgatcttgcggaccacgaaggtctcacgcacgccagcgcccttacgagcgatcaccacgccggtgaaggtctggatacgggagttgttgccttcctggatcttcacgttcacgtcgacggtgtcgccgggacggaaggccgggatttcctcagccggcttcatgtgcttggcgtcaaaagcctcaacagcgttaaccattgttttccttcagtgctgccgcatatcagccacagatctggggccatccacgcgattgcgcatcacgtgcgttggcctgttctcgttatccctcgggtttgcccttgggaagcctgccgatccgccgaaagtcaggccttgcggccgttcggactggacccatggagacgtgggcttatgcggcggcccacttctcgacacagcaatcgtcaattgtacggattattgcggacagaatggctgtctgatggcattccaacaccaaggcactgcgacgtagttgacagacctgcaggcgggctttatcttgggagcgtcggtaggcgaggctaccgcagggatatgggttgctgccgctaacagtggagacactgcacgcaggtcagcagttcttgtcggatcaaggcatgaactaacgcaattccaccgccctgcgatgctgaagcttgaacgatggctcgaatcggcggattcgaatactttccgcccctcctgctggtcgcatggataccgacgatggtattgatctggcgtttcagcgcacggcttgaaggaggtgagagtccgatggacggtgattattccagtagttccgccgccggcaacagtcatagttgcggtggtgatgaccatgttttcttatattccgttatccggaagtcgggctctcgcctgtagtgttccttggctccccggataacccttgcataattcgtctttcctatgcatagggaggtcttttcatgaccatgttttcattcaatcgcgtcggtgcgcgtccaaatgcgtcggcccgcaacccttccaccgccgcgtccgaccgccagccattcgccgtgcgcctggcctccgacgtactggtcgcggccggtattctggcgctgttcggtctgatcgcttggattctgccggcgatcggcgaaccgatcggcccgaaaggagtgccatcacaagtcagtacgaatctcgccgacctgccgtattacgcgctgcgctcggtgttccgcatgctcgtggcactgttcttctcactggtgttcacgttcatctacggcacggcggccgcgcgctgccgccgcctgagccgcgtgctgattcctctgttggatattctgcagtcggtaccgattctgggctttctttcggccaccatcaccatctggatggttctgttccccggctcgatgctgggcgtggaggccgcgtcgattttcgcaatcttcaccagtcaggcctggaacatggcgttctcgttcacccggtccctgaccagcgaaccaactgaactcgacgaggcggcccgctcactacagctcacacgctggcaacgattctggacactggacgtgccgaacgcgatgattccgctgctgtggaactgcatgatgagcgtgggcggcggatggttcttcctgaccgcctccgagatgatctcggtgaacaatcgcacctatgcgttgcccggcatcggcagcttcgtggcacaggcggcggccgaggagaatctcgcggccatctgctgggccatcgtgacgatggtgctggtggtgctgcttatcgacgtactgctgtggaagccgctgaccgcgtgggcggagaagttccgcattacgcaaagcgagtcggcggtgcgcaagaccagtgtggtgctgaccatcattcgtcagtcacatatcgatgagatggtggcctggctgttcaggcctgtcggcgacctgttcgacacgctggcccgcccgttgggtcggaccggtggacgttgggcggcggacgtgaagtccgcacgcagccgcgcgcttgacgtggtattcacagtgctggtgttggcagcgtgtgcgttcggactggtgcagcttatgctggtgattcatcgcgatgcgggattcggcgagctcgggcaggcgttcgtgttgggcatggtgacgttcctgcgcgtggcgctgcttacgctcgtctgctcggtgatttgggtgccgattggcgcgatgatcggcatgaatccgcgcgtttcgcggtttatgcagccgattgtgcaggtgctggccagcttcccctcgaacttcacgttcccgttcgtcacgctctggttcgtggcatgcagcgtggatatcaactggggcagtattctgctgatggcgttgggcacacagtggtacatcctgttcaatgtgatcgccggggccagccagattcccgacgatctgcgtgagatgacgcgcagcttccagctggggcgctggcagcggtggcgcgatttgattttgccggcggtattcggctcgtgggtcacgggcggcattacggcggccggtggggcgtggaatgcctcgattgtctcggaaatcgtaagttatggacggcatacgctgaccgcctccggcttgggcgcgtatatcgccgaggccaccgaaagcggcaacaccgtgaggaccatcatcggtgtggccgtgatgagcgtgttcgtggtggccgtcaaccgcctgttctggaacccgctgcagcgcatggccgagcgccgtttcgcactgaactaaagacttaaggagaacaatatgactgttgcaatggaaaccattcgttcgctgcgggcggtgaccccgcagaacaccatcatcgaagcccagcacgtcggccagcgcttcacggccgacaacggcaccgaactcaccgtgttcgacaacatctcgttcaacctgtacgagggcgagatcgtggccattctgggccgttcgggtgccggcaagtccacattcctgcgtgcgctggccggactggtcaagccgaccagcggcacggtcaagtatcgcggagaggccctgaccggtccgaatcccggcatcgcactcgtgttccagaccttcgcgctgatgccgtggctcaccgtgcaagacaatgtggaactcggtctgaaggcgcgcggcgtaccacgtgcggaacgcaccaaactggctctggatgccatcgacatgatcggcctggacggcttcgaatcggcgtatccgaaggaactgtccggcggcatgaggcagcgcgtgggcattgcacgcgccttggtgctgcggccggacgcgctgttcatggatgagccgttctccgccctggacgtgctgaccgccgaaaacctgcgtcaggaagtgctcaagctgtggtcgagcgaacagcgcagcatcaagtcggtgcttatggtcacgcataacatcgaggaagccgtggagatggccgaccgagtggtggtgttgggctcgcacccggggcatctgattgccgatgtgcgggttgatctgcagcgcccgcgcgaccgtcacagtgtcgaattcgaggcgatggtggaccgactgtacgcgattttgaccggacaggcctcgcagcctacgcaacaagccgaggctctatcgccatcggcatcgctcacgaacgcacccgtcacggacgcatctgtcacggacgcatcagaccttcagcccgccaagaccatcgagaaaatcaaggagcatccgctgcccaacgccacgccgggcgggcttgccggtctgctggatgtggttgccgagcatcctcacggcatcgacttggcagatttggcctcggctctttcgttcgaggtggacgacctgttcccgctggtggatgccggtacgatgctgcgcgtcatcgtggtacgcgacggccatgtgcagatcaccgaggcgggcgacgcctggcataaggcggacattctgcgggccaagcaggtgttcgcctcactggcgatggagcacgcgccgctggtgcacaacattgagcatgcactgcggaagtctgcggaaggcaagctccgcggcgagctcatgctggacctgctgcgcgcccgttacgccaacgacgaggcgcatcagcagttcgccatcgccgtggagtggggccgttacggcgaactcttcgattacgatgccgatgacgatctgctgagcttggatgaggcgaataagggcgaataagcgaatcagccacgtgagttggctagatagtgcctttatgcctgcaaacagatgccgaagcggaatatgaccatgttcgactcatctgactgacagcaatccgtatatgcaaagtgcccggcatccgaagatgtcgggcactagtcgtgagagagactccctcagtcagctacactgacagctcctctcacccgagggggcaccagaggaacgaatcagaactcgcgacgtgggcagtcgccagactgcccaccagacagcacagccgcggtcgcgcgaatcacgaattctgaccgagcaaagcgaatcagaattcgcgacgtgggcagtcgccagaccgaccatcaaacaacacagcgcggcgcgccaaccgcgagttctgattgaagcgacgcaggagcggagatcagaactcgcggttggcgcggtagaacttgatcaggctctgggtggaggcgtcctgggcggcgagggcgtcgtcgtcctgggagatggccggggtgatctgcttggcaagctgcttgccgagctcgacgccccactggtcgtaggagtcgaggccccacacggtgccttcaacgaaggtgatgtgctcgtacagggcgatcagctcgccgaccgcgaacggggtcagggccacaccgaagatggaggtggtcggacggttgccggtgaacacgcgggccgggacgatctcctccggggtgccttcggcgcgcacttcgtcggcggtcttaccgaacgccagggccttggtctgggcgaagtagttgcccaggaacagctcgtgcacgtcctggtcgccgtccttggtcgggttcggggtgttgacgaacgcgatgaagtcggccgggatgagctgggtgccctggtgaatcagctggtagaaggcgtgctggccgttggtgccgggctcgccccagaagatctcgccggtctcggaggtgacgggggtgccgtcccaacgcacggacttgccgttggattccatggtcagctgctgcaggtaggccgggaagcggtgcaggtactggtcgtacggcagcacggcgtgggaggcgaccttgaagaagttgcggtaccagacgttcagcataccgagcagcaccacgacgttcttctcgaacggggtgttggcgaagtactcatcgatctcgtggaagccgtgcaggaactcctcgaagcgggccgggccgaagacgacggccagagaggtgccgacggcggagtcgacggagtaacggccgccgacccagttccagaagccgaacgcgttgttcgggtcgatgccgaattcggcgaccttctccaggttggtggagacggcgacgaagtgcttcttgatggcttcggcgttcttctcgtcggagccgtcgatggcgcccttggccttgagctcttcgagcagccaggtgcgggcttcacgggcgttggtcagggtctccagggtggtgaaggtcttggacacgatgatgaacagggtggtctccgggtcgaggcccttggtcttctcggccagatcgttgggatcgatgttggagatgtagcgggcggagatgccggcgtcggcgtacggcttgagggcttcgtacaccatgacgggacccaggtcggagccaccgatgccgatgttgaccacggtttcgatcttcttgccggtcacaccggtccactcgccggaacggaccttgtcggcgaaggcgtagatgcggtcgagcacctcgcgcacgtccttgacggtgtcctggccgtcgacgatgtacttgccctcgtcttcgaccgggcggcgcagcgcggtgtgcagcacggcgcggtcttcggtgttgttgatgtgcacgccggtgtacatagccttggtgcgctcatcgagcttgacggccttggcaaggttggcgaacagctggagggtttccggcttgatcaggttcttggacagatcgaagtgcaggtcgccggcgtcgaaggacagcctgtcgacacgctcggcgtcttcagcgaaccacttcttgaggctcacgccttcggcctgaagctcgtcatagtgcttctgcagggcagcccactcaggggtctgggtggcgtcaacgggcggattgatggccataggattccattcctttcatcagtgactggagcgccttcgctcacggctcggatgcgctccgtatcaccaaacagaatactcacaaattcggacatgaacagaacaaaaatcagtcagcgatgtcggattgccatcgtttgcattatcgaacagttcgtggcgcggcacaaccgtcatcttcaaccgagcggtcacgacacaactgccaagccgccgattggacttttcgcggagatgtcttatacttaatttcttgtgcgcggctggcgaaatgccttccgcgaaccaagccactttagctcagtcggtagagcggctcactcgtaatgagcaggtcgtcagttcgattctgacaagtggctcggatgccctaggctggctggtctgtaatggctgtccggcctagggttttgtatatcttccacacctgtggaaacgcggatatgcacgcgcgagtggcggaattggtagacgcgcaggatttaggttcctgtgtctttgacgtgtgggttcaagtcccatctcgcgcaccggcttgagcctcctggaaacattggatcgccaacgattccgggaggctcttcgtatatgcgtgaggcaattgcaagcccttgcggacgcctctacatatggcaatgccaaggcggcaaatataatgggcacagcattgtgggtctgagcctgtgcgccgtgagcctgtgtgagtcaaggagagaagtgtatgtccgccattcttacgccggttggcctattgctgatcattctcgccggctatctgttcaagcggttcggcctgttcgggcagaaggattatcgcgtgttgcaaaccgcggaattcaacatcgtgctacccggtgccatcgtatactcgttcgccaccaatccgcatgacatctcgctgctgcttatttcggtattcgcattcctgtttgcttttatcccgatcgtgttcatctttctggccacccgcaagcgcaatgtgaccgaccgcgccttcctgatgctcaatggcgccggcttcaatctcggttgtttctctttcccggtcgtccagtcattctggggtgcgggcgcggtggtgccggctgcgatgttcgatatcggcaactgcgtgatggtggccgccggcaccaatgtgctcacccagcaactgctgcatattcagcccggcaaaacacttgccgaacaacacgccggttcggttcccaccttgccgtacgaaaagcccaaggatcgcgacgccaaacggcttgcccgccgcgcattgctgcgcaccatcggcaagagcttcttcggctcggtgccgttcgacacgtatctgctcatgatcgcgttgaccgtcgccaacgtgaagattcccgattggatcgcctctataacccagccgttgagcggtgccaacgcgctggtgtcgatgctgatggtgggcatgctcatggatttgccccagtccaagcatgatgtgaaggaagtcatggccgtcatcgcttggcgtataccgttcagtgtcgccttcgcgttgatctcgtggttcctgctgccgttctcggcttcgattcgcgccgtgatggtgatctgcgcgttggctccaatcgccattttctccacgctgttcaccgacaaagtactcggcaacgccaaactggccggcttctcgctggcaatcaccgcgatgatttcactggtgatgatggcatttgctcacgcgctgatgggcgtgtgagcaaatgcgcgagtaggcacacgacgggcacacggcgggcacacggtcaggcgagacgcagcccacataggttcgtcccccggccgccagctgctaccggtgcagcagcttgtgcgccagattgctcacgccgaagcggaacttgtccaccggcaacgtgaatttgcctaccatctgctcgacgtagccgttgaagccctgcttgaattccagcacgccgcggccctcgtcgttcggatcgtcgaacacgccggaaatgccgtagaagttgtagcggctcacaccctgttccacacacaggtgcagcatcgcttcgtactgaatcagcgccgaggcgtagaacggcttgtactcctccaacgaaccggaatactgatagaccacctcattggggtgactgacgaacattgaagccgctgccggcagcacatcgcccttcttggcatatccctccacctcagccagacgcttgtcggcggccgcgagattgcgcgattcctcccccagctgacgttcgatgcgcgtggtcggacgttcatcgtatttcgtctgcagctgtgcgaccttggtctgcaaggcctcgcgcttggcggtcatatccgccacatattcggcgatgtggatttccgcgagcatgaaatgcgcatccgcgccatacgcctgcttgaactggcggaaatagtccgcgccgcgcgtcgcgaacccgcggcgttcaccggtccgccgttcgatatcggcgaacacgtcgaactcgtcggggccgatttcgcgaacgtgcacgcccatcgactgcgcccgcttgacgctccattgagcgcgtttgccgaatgatgccagcagttccttgccgttggtgatgccggtgagatccttgacgtacatccactggcagaccacgtcataaccggtatggaatccgccatgcgtccagccggcatcggtgaatccggtcagcagtgcatcgttcggctcgccgtcgggctgcccgtccgaggaatacagacggtaggcgacgttaggccagcatgccacggaaacagcatggtggcgacgggccgattcacgaatcgcctcggttatggcccgcagcagagccggatcatcgctaatgccgatggggccgaaatatacggagccatctgcaccgaaacgaccattgaggtacagaatcacgcagccggctaccagattgccggatgcgtcgcacacgccaacgcattcggcttcatgcccacgaatcttggcaagacggacctgcccggaccattgctgaaagctgccctggcttgtggcttcggaaagccggtcgaactcttcgggcgtaatcacgccaaacgtatacgtcgtatctgttcgattcgcagtcgcgctcatctcgtcgtcacctgtgccttatttctgtgtccgtgctcgccactgtttgtcagcgatgcagcagcttgtgtgcggcttcggatacaccgaagcgcagtccgtccaccggcagcgtgaacttgcccggaagctcttccacgaatccgccgaagcgagtcttgaactgccagacgccgtaggaaggatcgttggcgtcgaaaatgccggaaatgccgtagaagttgaagcgctccacgccacgggcgatgcagtcaagcatcgcctcgaagtggattagggaagacgggtagtaatccatgaaacgatcgtcctcgccgctggacaggcagacgacctcgttcggatgccagaagtagacaccggcttccaccggaatgaccgggccgtccgaggcgatgatgccattgacttcgccgatggtcttttccagcgccgtgatcttcttgtctgcggtggcgatgcgcttttccagcgttgccgggtcggaggcacccttcttggccgtgccttccggccgctgttgcgcgcgctggagcaggcgttcgaggttgcgcttgtctttggaggccgcattcagcttggattgcagggtgtccagatattcgtcgaaatgggtttcgaccaccttgaactcgatcaggtcgccgaaggtatcgaacagacgctcatagtaggccagatcgcggctcttgaagccttgacgtgcggcgctcatatcgcacagcttgacgaaagtgctcagttcgccgcgttccagccggcgcacgcgcagaccggaatcctgggcgatgcggatgttcttacggcggtacttggagaacgaggccagcagttccttctcattatgaatgccgtcaagccccttgacgaagttccagcggttcaccacggattcgtagcccacggtgaagccgccatgtttccaaccgaagcgggccatgttgtccatcatcgtggtgtccgggtcgctggtcggcttgccgtccagatcatgcagacggtagactgcggccggccagcaggatacgctgatggcgtgatgggccttggccgaacgacgcagggcttcggtcatcgcctcaaccacctgtggattgtcataatcgcacagcggtccgcaccagaccgagccttccaaaccgaaacgggaccgcgtgtacaccacgtagcaggcggcaatcagcttgtcaccgcgcttgacacccacatagtccaccggaccgttgaacgcacccatggcggccatctgcgaggtctgctggaaactaccttgcatttgagctgcggagaacgcatccagctcggcaggagtgatcttggtaggggtgagtgaggcaacgcctgcatcggattgcgtcataatcgaaccttcttacttgtcgttactctgatcgttactctgggctctggaacggcctgtgtgctgcgtccgtttaccgcgacagcagcttgtgcgcaaattgcttcatggcataggcgaccggtttgaccggcagtacgaactcgcccggaagttcctcgacatatccgttgaagccctgcttgaactccagtacaccacgcccctcgtcatcgggatcatcaaagacgccgtcgatgccgtagaagttgtagcgagacagcccgtgttccacgcagaaatgcagcatcgcgtcatgctgaatcagcgcggaggcgtagaagggcttgtactgctcgacgctaccggagaacaggtagatgacctcgcgcggatgctccacgaatagtgatgccgcagccggcagcacatccccgtctttggcgaactcggccgcctcgttcaggcgcttttcggctgccgccagattgcgggtctcctcccccagctgacgttcggttttggtggtggggtgttcggcgtttttggcggtcaatgccgccaccttggccgaaagtgcttcacgcttggccgtcatgtccgctacatattcgtcgatgtggatctcggcaaccataaaatgcgccttgttgccaaacgcttccttgaaacggtggaaatatgcttcgccacggtattcgaagctacgacgttcagcggtttgctgctcgattcgtgcgaatacccccaactcgtcgtccgacagctcacgcacatgcacacccatcgattgggcacgcttcacgctccactgggtgcgcttgtcataggacttcagcagacttttctcatcggtaatgccggtcagatccttgaggtagcgccaacgtggaaccgccgtgtagcccacggtgaaaccgccatgagtgaagccgatcgcctcgagccgttctatcagcttattgtcgggagcgccgttctggtcatccggcaaagaagctccattggtgtcgcgaagccgatacggggattcaggggtgatttccagctgtgaagcaccctttgccttggcatggcgtttcagcgcatccatgaagaaggtcaatgcttcggtgtcgtgatagtcgcacatcgggccatcatggatggccgcaaatgtagagaatcgagagcggtgagtttcgaacagcgccgccgcgacgatcttctcgccctccttgagggccagatattcgacgtcgatcccctgcgcggcgcgaaggcgtcccatcgccgaggtctgttggaaattgccttgtggatgcctggcggagaaatcatcgaactcttcgtctgtcaacttcaccagcacaaaatcacgcatgcttccctctgcctccgagtcaatcaggctcaccatgctagcataacgcgcacacgacgaatggggtccgagcagatgaggtgtgcacatcgttcgcactattgcctccacaatggctcaaagaacaatggcccgaagatgctgaacgtccggcttgcgttgaatcaaacgcagtgctatattctctacttggctcttggagccacgccaccttagctcagtggtagagcatccccctcgttcgtgggaaggtcggtagttcgattctatcgggtggctcttgttcatcaagaaggccgacgcactaagcgccggccttctttcgtatcgcccttgctaggtcataggcgcttgctagacacttgcccgattcgggaggggctgagttgctgagccgcgactcaactgtggcttagtcgcggctcagtgcagttagacagcctagacgacttagtgcagcagcgcctcgatagcggggaccaaggctttcagcgccttgcctcggtgggaaatcgcattcttctcggccggagtcatttcggcgctggtcagcggctcgccttcatggtcaggctcagtgctgacgcgaccggcagactggtcgtccgggacgaacagcggatcgtaaccgaaaccgtgttcaccacgagcctcgcggatgatacgacctggcatgtcgccgagttccactgtctccgacttgatggcgtaccgggcatgcaccggggcagggctcccatctgcagccgtggtgtaaacggtgatgccgtcggcagccactccaccggtcacgtcggcactggcctcggtgtccgggaccaccagcgcggcggcgcagcggaagcgcgcggtacgcttgtcatccggaatatcttcgatttgggcgagcagcagcgcattattggccttgtcgtggccgtgagcacccgcccagcgagcagacagaatgcccggagcgttacccatcacatcgacgatgagacctgaatcatccgctacagcgggcagaccggtacggatggccacggcgcgggccttgagcagcgcgttctcctggaaggtgacgccggtttccaccgggtccggcaggtgaaggctaccagcggacaccagttcgatgttttcggcatccgcgccaagatcctcttcgagaatgcggcggatttccacaagcttgccttcgttatgggttgcgacgacgatttgcatgggttctcctttaagaaggctccccttgtcaggggagctggacattgcagaccgtacggcttccagccgacaacctcccctaaaggaaggggagctggcttagtctagggacaaagcggcacgctgggcggcttgcagttccttgttgcccttttcggccaagtcaagcagggtgccgagttcggcacggttgaacggacggtgttctgcggtgccctgaatctcgatgaaggtgccggaaccggtcatggccacgttcatgtcggtcatggcctgactgtcttcaatgtatggcaggtcaagcatcggggtgccgttgatcacgcccaccgatacggcggacacatagtccttaagcacgcggctggcggacttgatatggcggtgcttctccgcccaattgactgcgtcgaccaaagccacgtacgcaccggttacggaagccgtgcgagtgccgccatcggcctgaagcacatcgcagtcaagctgaatctgattttcgccgagcgccttcatatcgatgacgccacgcaggcagcggccaatcagtcggctgatttcgtgggtacggccaccgattttgccacgtacggattcacggtcggtgcgttcggcggtggcacgcggcagcatcgagtattcggcggtgacccagccgaggccggagtccttgcgccaacgcggcacaccaggggtaaaagtggcggtgcacatcacgcgcgtgttaccgcattcgatgagcacggagccttcgggggcgtcggtgaagtggcgggtgatgcgcacggggcgcagctcgtcgaccttgcggccgtcggcacgaattatttggtgattgccaagcatgtctttgatttcaaccatgcgccccagcatacgccatccgctctatgcctggatagcaactcgtcaaccatcatcaaaccccagcgcaatgtcattccctgcttacatatccattccatgacacttggctgcacgccactattttcttatgcaccactcgcttacagagtcaatgcctgcgtacctgatgaggattgggaaagatcgtccgctggaataagaatgccatattccatgaaatcttggttgaattgcttgcgctgcatagcgttgagttcgtaatcgattaacggcaaatatgtatagtccatgtcatgcaacggctcttcatatcgatgaagcacgtgcataattgccgcgctcggcagtggggaccaccatccatccaagccataccggtacggaggaaccaatgtcaagcgtctgttccttgggttgatatcccaacgcagaaaacggtataaaccagcgagaaacgcaatccagcacgcatcattcacccgtgcaaccgctcggacgaacgatatacgttgatgttgaacattccgagcatgaatcagattgacgcagagcatcttcaacgtagaccaggtcgctccgctttctattgcatcgaaatcaggaggcctacgcagttgcgccaacaacatgtgcaattcgtcttccggaatcgtttgcgagggggccacggcttctaggtgaagaccaaaaccagcccgctcaagcccctcggccaaaacatcaaacaacatacctctttgcccacgcaatacgcgaccaattgcagaccgatccaaaccagtacgctgtgcaagctcataggcattccaaccagtctgcgacatcacttcattcagcacagccgcacacgaattaacagggcaaccagataccacaccgtgatgcacgacatcgcactgttctaacgctcgatgctctacagcgcgccgctctgatacgtcatcgttgcccgccgcgttctcatcattgagagtttcactcatcgaagtcaccttgcctcggccgatttcccggtcatttcatcaaaccgcaatcatcatatcccacaatcccatgacgatacgattcgtcatatcccacaattcagagacggtatgattcgtatcgcatcagttcacacgattcttcaacgattgctccgcaaacgattgctctgcacgcatcacggcattctatcggcacactattcctcccaatcagcccaacgcaacatcacacgcaacatcacacgcaacatcacacgcaacatcacacgcaacacccctcacgcaacacccctcacgcaacactgcgccatctctgtaacatcaccgacaacacggcaatcccacaacgtctcggtgcaatatcctctgaaatggtttggtttttcactccacctcgtcggcatcctgaccaggataggaatatgtgtcgttccgcaccatgtacaaaacgttgtcaactgacaacgctcttcaaatcaattggataagacaaatggccatttcccgccaattcatctgaatcaagacgttgtcaactgacaacaaaatgtacattgcaacagcatgcacatatacatatttccccggtgaacagtaccccccccaaaaaaaaacaaggggggccaccctcagctggaaccacgtccggcgaaccgggacgcagttcagcccgaggggacgcggccaatacagccccgggacacagccacagggggtgcaaacacgggggtgcgaccggggttggatctccccgcctcggcggcgaccacaggagtgcggccaacacagacagaggggcacagacagagggacacagacagcgggaagagtagccaatgtaaccaaagggatgcggccagtgagatacggtcagagaacctgagtctccgtaggaatcactggctcgcccttcatgaggctctgcgcggtgatgggcagttcggacaacgccttggcgtggtagtcgtgggcggccatgatggcgtcatggccctgccactgagcgtcgatctgcccatgatccacaaagtcgaccagcaggttcttccacgtcggttcaggcgtgaaaccggccagcttctcctccgagccggaaatcacgtgttcggcttcggctaacgcgtattcgtaggagcggaatgccagtttgcgaccgggcactgtggccttgtccttggatttcttcatgaccggaaccatcgtgccgtcagcgccttcacgttcggtgagcttgtacaccatcgcacaagtgggagcgccggagccggtgaccagcatggtgcccacaccataggagtcgaccggcgcggtctgcaatgcggcgagcgcgtactcatccaaatcgttggtcacggtaatggtggtgttcgtggcgcccagggcgtccagctggttgcgcacacgctgggccatggcggctaggtcgccggagtcgatgcgcacgccacccagttcgggaccggccacctcgacggcggttttcacggcttcctcgatgttgtaggtgtccaccagcagcgtggtgttcttgcccaatgcctcgatctgcgattcgaaggcgtcacgctcggaatcatgcaccaacgtgaagcaatgcgcggcggtgccaatggccttcagaccatacagctgggcggccagcagattggcggtacccttgaatccgcccactacggcggctcgagcggcggccacggcggcccactcgttagtgcggcgtccgcccatatccatgcaaggacgatccttggctgccgacgccatacgtgaggcggcggaggccactgcggaatcgtagttcagcacggatagaatcaacgtctccagtagcgtgcattcgccgaacgtgccttcgacctgcaaaatcggggagttcgggaagaacatctcaccttcgcggtaaccgcgaatcgtaccggagaagtggaagttctccagccacttgatggtctcggggcttaccacgtgacggtcggccaggaacttcaggtccgcttcgtccaagtggaaatgttccagcgcatccagaatgcggccggtgccggccaccacgccatagcgacggccttcgggcaggcgacgcgtgaacacctcgaacacgcatttgcggtcggcggtaccgtctttcagagcggcgtcgagcatcgtgtattcatacatgtcggtcatcagagccggcgaataatcgaccattgcaaggcctttcctacataagtggtgaagttgcacctaagtgtagtccgggcaaagccatacagcccactggcgaagcggtagactcgatgcatgagattcatcgtggcgttgtggcgctttgcgatcgccggtttctgcttcgtgggcacatatgaggcatggtccaaaccgcagttctgggtgtatttcacgttccagaccggtttcgtgctgggcatcgtgatgctgtgggccggcgcggccacactgctcaaaggtattcagccgcctgcatggcctaagggatgcctgactgtgtacgccatagtcaccgcactggtggcgttcttcctgatgcctccggacgacccggcatacgtgccacaggttattggcatcatgaccaatacgatgctgcacaaaatcgccccgattatggcggttatcgatttcgtgctattcgacccgcaccggcgtttccgctggcattacatgttctcgtggctggcgtacttccctgcatacttggtcttcgtgctggcccgtgcgacgatttggccggggtccggaccggcggccggcggcagtccgtatccgtacgacttcatcaacctcgacgcactcggctggcaagggttcggcattagctgcggcaagctggccatagcgttcttcgtgatatcgctcgttgtctggctgctcgaccgcgcactgccgagcaaggccttactcggatagacgcgcccacgatcgacgcacatcggtcttagtgcccagccggcatccagctcagcactcgatggcctcaacattcaatggaataggcgcggtttttgtactcgcgccaatccggccagtcttcaccggcgtagagggctgcatatggaactgcgtggccacctgacgaatggtgtaggacatcatgactccttactgcggcgacacgccgaagcgtcgcagccgtttgcattcaagttcacttgaactggaaccttagtatctaagaacacttacgaataccactcgatcggcgtcggtttgcccatcgcagaccagcattcgtaagaacaaaaatgacattgtaaggagactcaatgttcgagccaaccgccacctacgctcccaacccgcaccgttacgacacgatgacctacaaccacgccggcacctccggcctcaagctgccggccgtctcactcggcttctggcacaacttcggcgacatcacgccattcgaccagatgaagtccctgatcttcaccgccttcgacaacggcatcacccacttcgatctggccaacaactatggccccgaacccggccaggccgagaagaactgcggcctgctgctcgccaagtacttcaggcaccaccgcgacgaactcgtcatctccaccaaggctggctacgaaatgtgggccggcccctatggcgacctcggcagccgcaagtacctgctcgccagcctcgaccagtcgctcgaacgcctaggcctggattatgtggacatcttctaccatcaccacccggacccggaaaccccgcttgaggagacgatgggcgcgctggctcaggccgtgaactccggcaaggccctgtacgtgggtctgtccaactacgatggtccgacgatggagaaggccgccgcgattctcgccgacctgcacgtgccgttcatcatcaaccagaacaaatacaacatcctcgaccgcaccgtcgaggagaacggtctgaaggagaccgccttcaagctgggcaagggcctcatcaccttctgcccgctggcacagggcctgctgaccaaccgctatctcaacggcattccggccgacagccgcatggctcacgatccgcgattcctcaacgattccgccctgaccgagaaactgcacaagcaggtcgtggacctgaacaatctggccgccgaacgcggccagacgctggccgagatgagcctggcatggctgctgcacgatggtaaggtgacctccgtgctgaccggagcctccaagcctcagcagattctcgacaacatcggcgcgctgaagaacacccacttcagcgacgaggagctcaagctgatcgacgagatttcggctcggtgaccattttggcttccctcgctgaggggagccaagtaccacctttagcgcgtcatttcttcgtagatgcgcttgcaatcggggcaaaccgggtacttggacggatcgtgcttgggcacccagaccttgccgcacagggcgaccaccggacgaccggtcgcgcgtgattcggcgatacggtccttagaaacataatgtgcgaatcgatccgcgtcgccgccatcgtcacgaaccggagactccttggtttccgggcgttccagcaccgacgtgccggcaccttgggccgggttgcgcagcggttcggcatcatcaacgaacatctcggcaaaagtcatggtgcacttctttcctcgtattcaacgattcgactgcactccatcatagattcccgtcgttacccgcgaaacccattggcgcgtaatccgcacacctccacacacccatgtcgcgcatcacgccaccccgccacatacaatgccacataacaatgccgcaccgacgccacatacggcaccgcacacactgcctcatacgccgacgcgacaacaatgcacgctcggcagcacgaagcacaccattcgcggtaggctataaggcatgactatcgcagtatgccccggctcgtatgaccccgttaccgccggacacttggatgtaatcgagcgctcggcgcggtttttcgacgaggtgcatgtggtggtggccgtcaacgccgcgaaaacaccgatgttttccgaagccaccagagtcgacgtgatccgccgtgcccttgacaaagccggttgcaagaacgtcactgtttcttccaccgacggcctgatcaccgactactgcaagaaggtcggcgccaccgttatcgtcaagggtctgcgccagaacggcgactatgaagccgagctcggcatggcgctggtcaatcgcaagctcgccggcatcgaaaccctgtttttgccggccgatccgattcttgaacacatctccagttccatcgtcaaggacgtggcccgccatggaggcgacgtgaccggcatggtgcccgattgtgtcgtgccgatgctggccgatgccctggccgaggaacgtcagcggaaggactgatgcactaatgactatgagcgatgaccaccccactggatacgtcgatctgaccaaaccgaatgcggacgccgcatcgtccactccggagccgtccgccccggaaccgcccgcgtctacgcaagccgcgccggcacccaccgaagaggccgatgttctcgccggatcgccgcccgccgcgcctacccctactccggcacagatgcaggccaaagcgcaggcccaagcagctcagcagacccgggcacaagctcagaccgctcaggccgccggcactcgcccctcgttcatgaacgaaatgcccgacctgcgagaaaccacggacgacgacccggccacggtcaagagccgcgaggaattcaccacggtgtatgacatcatcgaccagctcgaggcggcactgggcgaagcgaagtccagcatattcgcccccggcatggtgaaggttgaccgcgacgaattcaccgaccagctttccgagttgaagaaaatgctgccggtgcagttggagcgcgcctccgccctcatgcgcgaggccgagcgccgtctggaatcggcacagacccagtccaacgccatcgtcgcctccgcacaaagccgcgcagccgacatgatcaaggacgccaacgaacaggcacagttcctggccggccaagagaacgtcaccgagcttgcacggcagaaagcgcgcgcgattcttgaccaggcacagaccagagccgaccatctgacccaaggcgcggaccagtactgcactacggtgatggaagggctgtcccagcagctcggcaaactcagtcgggatgtgcaggccggtcttaacgtgctggaagagcgccagcgtgcggccggcgaacagatgccgcacctgacgctgaacgactatcccgaagcccagtaacgccagcaacgccggcaacatcagtaacgcgaataacgccagtaacgaataactccagccaacatacgaaaggcaccaagaacataccatggcacgagttgaagattccccgtgggccattccggtagcgcagattgcttcgcgcgccggtcaatccaagccgattgacgccgatttcccggccccttccggcattggcgacagcatcgtcggcatcaaggatggtgagcccgtacatgtgagcgggcagttcgattcgattgtggacggcctgatcttcaccggccgtctggtcgcgccattcgtcagcgagtgcacgcgctgcctgaagccgattgacgaggactggccggttgatgtgacggtgttcttcccgtatgagtcgggtcaggacaaggccaacggcaagggcggcaagaataagaaggacgacgagatcgacatcatcgccggcgaggacgagtcggaagacacgtatccgctgctggagaacggcgcattcgcggacatcgaggcgatgatccgcgacacgctggtcgaatcgctgccgttgcagccactgtgccgaccggattgcaagggcctgtgctcgcagtgcggtgccgatctgaacgaggatcccgaccatcatcacgatgtgacggatatccgttttgccggattggcggggctcaaagcccagctcgaggccgagcagaacggcgagcaggccgagtgacgcgcgcctgaacggagtttgtacgagccgtgcgttaagataacggacgcttaagctcaattgttcgaacgaaatagaggatactcaaatggcactgcctaagtacaagacctcgcgcgccaacacgcactcgcgtcgcgcgaactggaaggccaccgctgctgcgaccgtgaactgcccgaactgtggcgctccggccctgccgcacatggcttgcccgagctgcggtaactaccgcggccgcacctaccgctccgccatccagccggctcacaccaagtgagtcctgcgataacggcttgaatgaaggccctgccatcgacgggtggcggggtcttcgcataagtgcaccattacgtacaccatcgcatcgcaaacaacacaacacaacacacaacacatcaccatcgcgtgaaggaccatacaacaatcatgagcaatgaaaccccacagcagccgacgccggccaacgagcttcttgaagcgttgggcaccactctcagcccggatctgctcgtgcaggcactcacccaccgctccttctcgcatgagcaccccggcgtggccaattacgaacgcctcgaattcctgggagacgcggtgctcgaactggtctccactgaaacgctgttcaccattcacccggatatgaccgaggggcaactggccaagatgcgcgccaaggccgtctccgaagacgcgctgagcgccatcgccaaaaccaagctcaaggtgggcccctacattctgctgggtcacggggaaaccgagcagggcggcgcggagaagaactccattctgtgcgacatcgtggaatcgctcatcggcgcgaccttcctggaacacggcatcgacgaggcacgcaaggtgattcaccgacttattgacgacacgctcgccgaagtggccaccgagggcccggcacttgactggaagacctcgctgaccgtcaaggcgcacggcctcggcaaggatgagccggtctaccatatggaggtctccggcccggagtacgcgcagatcttcaccgcgcgcgtctcattgggcgagaacggcgacatcatcggcatcggtaagggctccagcaagcgtaaggcgcagctggcggccgccgaagcgggctggaagtcactggactcgctcaagacgcggactaagtaagcccgctgtcagatttgcgaatagactaataccaacatgagcgacgagtcgtgccggggccacaagtctcggagaagcgactggaatcagacacgcgggcacccggccccatcccaaggtcgggcaggttcgcggcaaaatctatgaggtgagaggaatcatggctttacccacgcctttgcaggcattcagcggcgtgccgaaaatcaacgcggcccccgataagcagaccatcgtcgatggcgagaagatgactggcgcccaagcgctggtgcgttcgctggaggatctcggcgtcgaggacgtcttcggcattcctggcggcgcgattctgcccgtctaccacgagatcaaagacaacacgaagttccgcttcgtgcttatgcgccacgagcaggccgccggccacgccgccgaaggctacgcactggccactggcaaggtgggcgtgtgcatcgtgacttccggcccgggtgccacgaacgtggtcacggccattgcggacgcgaatatggactccgtgcccatggtcgtgattaccggtcaggtgggcgtgcaggccatcggcactgacgccttccaggaggcggatatcgtgggcatcacctacccggtgtccaagcactccttcctcgtgacccgcgcgcaggacattcctcgcgtgctttccgaggcgtactacatcgccaacaccggccgccccggcccggtggtcgtggatctgaccaagaccgcacagaccggcgacatgtactactcatggccgcagcgcatgattctgcccggctacaaccccaccaccaaggcgcacggccgtgtgctgtccgacgcggcgaagctgttctctcagtcgtaccgcccggtgctgtatgtgggtggcggcgccgcccgctccaacgccggcgcacaggtcaaggctctggccgacctgaccggcgcccccgtggtcacgaccctgcccgcacgcggcatcattcccgactccgacccgaagaacctcggcatgctgggcatgcacggtacgattgccgcaaccggtgccgtgcagcgcgctgacctgcttgtggccatcggtgcacgtttcgacgaccgcgtgaccggcaagctcgacgccttcgcaccgaccgcccgcgtgattcatattgacatcgacccggctgaaatcggcaagaaccgtcagcccgacgtgccgatcgtgggcgatgcggctaccgtgctcgacgacttgattcccgaaatccagcgcacgcaggccattcagggcaagccgaatctggccccctggtggaaggcgatcgacggctggcgcgaggaatacccgatgacgtgggatgagccgaccgacggatcaatggccccgcagtgggtcatcaaaaagctctctgagatggccgatccgtccaccatctgggtgaccggtgtgggacagcaccagatgtgggcttcgcagttcatcgatttcgagaaccagcacgcttggatctcctccggaggcctcggcacgatgggctacggtctgccagccgccatcggcgcatccgtgggctcggcccgcgagttcgagggcaagaagccggtgtggctgatcgatggtgacggttccttccagatgacctctgaggagctggccgccgcgttcctggaccacgctccggtgaagatcgcgattctgaacaactccgtgtacggcatggtccgtcagtggcagacgctgttctacgagcaccactactcgcagaccaacctgctcgatggcgaggcgcacggtgccgatggtgcggcggcactggtcgacggcgatgcgccgctcgaagtgcctgatttcatcaagttggccgaggcatacggctgcgtgggtatccgcgcgttcaccgaggaagaggcgattgccgccatcgaaaaggcgaaccagatcaacgaccgcccggtactgattgatttccgcgtgtggaaggatgcgatggtgtggccgatggtagccgccggcgcttccaacgacgaggtgacgtacaagcccggcatcaagccgctgaccggcggcaccccggctccgggaaccggtccggacgagcatgcgaccggcgtgttcgagcacgagaccgccgctgccgctacgagcgagcactgaggagaggagaacacttatggctaactatcctgcatcccagcctggttcccagcgtcatacgctgtccgtgctggtggagaaccgcccaggcgtgctggcgcgtatcgccggcctgttcgcccgtcgtgcgttcaacatcaactcactgtccgtctcccccaccgagcgtccggacatctcacgcgtcacggtgaccgccgacgtggaggccgtgccactggagcagatcatcaagcagctcaacaagctgctgcacgtgctgaagatcgtggagctcgacccgaactccaccgtggaacgcgaactggtgctcatcaaggtggccgccgacgaatccaaccgttccgacgtgctggagatcgtgcgcctcttccgcgtgcgtgtggtggacgtgaatccggaatcgctgaccattgaggccaccggtgccgaaggtaagatcgatgcgctgctggggcttttggagcattacggtgtgattgagctggtgcgctccggtgccgtggccgtgacccgcggcccgcgcgccctgagcgaaaaggtcgtcggttccgaggttaccgggcgctgattcggcgactgcggggagacccagtccaagctcaaagggcggatgtgcatgatgcatatccgcctttttcatgcgtgcatacctcatcacccgtgctgcaagcaaaatgacagcaccttatgctagcattatgacagcaacaaggaggtgcatcatggcaacattgaccatccgaaaaatacccgatgagcagattcaacagctcaaagaagtggctgagaaaaacaaccgctccatggaatctcaggtgcgatccattcttgaagaatggctggccggcacggtggcgcatgaaatcacacgaaagaccaatttctacgacgagatccgcgaattcatgaagaacatggattttgagggactcgacaagggggaactcccactatccgagcgaaattccgccgattcccgaccgccagtatcttttgaataggaatcggccatgattattctggacaccaacgtcatcagcgaaatcatcaagaaacagccagacgaacacgttgccaattggctgaggaaccaagatacaagcaatctggcaaccaccgccatcaccgtcgccgagttgttggtcggaatatgtcgcatgcctgaaggcaaacgacgaaagtacacagatacgaccgtcaagctggcgcttatgacattagaggacaggacgttcgcatttgacacccaggcagctgcggattatgcccatatccttgtcgaacgcgaacgcaggggcacacctaccagtattcaagacgccatgattgcggcaattgcctgttcctgggatgcggccatagccacgcgcaatatcaaggacttcgaaggtaccgacgtggaattgattaatccgtgggagtttgcatagcggtaggccccggcaaactaccgaggccttgtgaacgttacggtttctcccgctactccaattgttcggagagttcgagccattcggcttcgagattatcgctttcagtattgacggcggtgagttgttcattgagcttgttgagaccctcgtagtcgctcgggtcatgggcggccatctgtgcctcaagttcggtcttccgctcttccagtttggcaagcttgcgctcgatggcattcacgcgcttggatgcctcgtggaaggccttgccggtgagcttcgaggtggagtcctcaccgttattggctccctctgacgagggagctgtccgcgaagtggactgagggagagatgcagcaacattgacggcggccgccttacccctaccagacttcgccgagctgctaccggtgcccgcgaagccaggcgtgtcagccggcaatcccttgccgttcttaatagcctcaaccatatcgaggtaatcctgcacaccaccgggcagatggcgtaccttgccgccaatcagcgcgaactgctgatcggtgacgcgctccagcaggtaccggtcgtgggatacgacgatcaacgtacccggccaagtatcgagcaaatcctccatgacggcgagcatatcagtgtccagatcgttgccgggctcgtccatgatgagcacgttcggctcgtcgagcaggatgagcagcaactgcatgcggcgcttctgtccgccggagaggtcgcgaatcggcgtcatcaactgggcggattcaaagccgagacgctccatcaactgtcccggcgttacttccttgccatccacaatgtagctcggcttatagcgggaaagcacttccttgatcttgtactggcccagtttctccagctcatcaagacgctgcgagagtacggcgaacttcacggttttgccgatgttcacatggcccacggtcggagtaatcgaaccgtcaatcaacttcagcaatgtggacttgccggcaccgttcgcaccgacgatgccgaaacgatcgccggggccaatcagccaagtcacatcgtcaagaatctcgcggccggaaaccgtcaccttgcgtgcagccgaggtgacaccggctgcagcagtgtcatcatccgaatccgttgcagcagtgtcaccgccgatggtttcaccacccgtgttcatgcgacgaacctcgcgatcgtcagcaagctgcggattgccgctctcagcctcggccttcttacgcgcttcctcagcggcctcgacggcttccggcacgccggcgtccaccaggcgcaggtcagtcatgccggtgaccgccacctcaacggaaccgtgcagctgcggctcggcgtacatggcgttgaccacatccacgcgggaagcggacgcggagagcgccgccacatccgggtcgatatcggccatgccctgcggtttttcgaaaatctgcgtcacgtcgaccaaatcgaccacctgtttgccgagacgggaggtggccatttgcttcagttcaagtgtgttacgcatcggcggcacgtcggcaataagctcgcgcgcggccttgacgtggaacttctgcttggtggaacgggcacgggcaccgcgcgaaagccatgcgagctccttgcgggccagattgcggcgcttcgtttcacgcacatcagcctggcggtcgcgttccacgcgctgcagcatatacgccgaatacccgccctcgaacggctcgatcacgccatcgtggacttcccacatcgattcgcagacctcgtccaagaaccagcgatcgtgggtcacgagcaacagagcgccctggcctttggaccagcggttcttcagatgctcggcaagccagtggatggtgaccacgtcgagatggttggtgggctcgtcaagcgcgagaatatcccaatccttgagcagaagtcgggccaaatcggcgcggcgacgctggccgccggacaaggagccgaccttggcatccaggctcatgccgccgagcaatacctcgacgatttcacgggaggtgttgtcggacgcccattcgtagtcggcgcggccttcgagcgcggcctgacggatggtggcgttgtcgtcgagcggatcgcgctggtcaagcatgccgaacgtgagtccgccgcgcttcgtcacgcggccggaatccggctcctgggtgccgcggaacaggtgcagcaacgtggatttgccgtcgccgttcttgccgacgatgccgatgcggtcgccctcgaaaacaccctgcgtcacatcagtgaagatggttttggtggcgaaagcgagcgaaacgtgttccagtccaatgtcataagtcggcatgactcaccaatgtagcgccacgcttgcccagcggcggcccacaaacgttatttgttcagcgtctgagcgtaggagttgcagcgggccgcaaaaccggagaacacttgctcggcgagcggatgcagtagctgatcgtattgggcgaattgctcgcgcaattgggacttggacccacccgcggccttgagatccttgaccatgctcggctcatccagccattcgtccagcagcgagccgcacacctcaagatggaactgcatgcccagcgcggatcccagtcggaatgcctgcaccttggtggaagacgaacgtgccagcagctggcctccctcgggcaagcccaccacgtcgttatgccagtgcagcaccgtcagctgcttatcccacatggagaagaagtcatgcttgtccacacgcttgatcggcgcgaacccaatctccggcgcatcgcccttacgcagctgcgcaccaagcgcagtggcgataatctgatgccccaggcatacaccgagaatcggcttgcctgaagccacggcggcacgcgccaacttggcttccgccttcagccccggatacttgtcgtaatcaagcgcgcccataggcccacccatgattaccacgccagctagttcgccgaaatcaggcaagtccggtttctttttgtcgacgatattcatcgtcaccgtctcaagaccgatgtcttcgaggttcgacaatatgcgtcccggacgttcccatgggacatgttgcaaaatgagcacttgtggtgtggccatgacttctattgtggcacgagcgttccccgtttgcgtaacaggcagggcaaatccatgaatctcgcagtttccgcagcggtcaaagacgtgttctcgcgagactgttgtcccgcttctcatccgtctgtcacctcgttcgggccccgcctgtgaagcgttcaccaagctcttcgagtaacgattcagcatgtctggttcggaccctacgcttgagcgttatgggaaacagccaagaaccgcaggatttcaacatttccgtcatgccttcaagcctgacgccggtgcatgtcgccaaggccgcagaaggcctgaatctgtatgacaccgcctcgcaccaggtcagccatttcgtgccgctcaagccgggcgaagtcggcatttatgtgtgtggcgccaccgtgcagtcgtcaccgcatatcggccatatccgtgccgccgtggcgttcgacatcgtgcgccgctggtttttgaagctcggttacaaagtcacttttgtgcgtaatgtgaccgatatcgacgataagattctcgataaggccgcggccgccggccagcgttggtgggcccgcgcctattactacgagcgcgaattcaccgaggcgtacaacacgctcggcgtgctgccgcccaccgtggaacctcgcgccaccggccacatgtcggacatgatcgacctgattcagcgcattctcgacaacggccacggctatgtggtcacggatgcggacggcaagcccaccggcaacgtgtacttcgatgtggcatcctggccgcattacggcgaactcacccaccagaagcagacctccgaagtcgatgaggccgccgccgtggccgaccgcatgggcccgtccgtggacgccaccggtgccgacaagtacaatccggtcgacccggccgacgcctcccccgacaagcacgacccgcgtgatttcgccctgtggaaggcccccaaggacaccgatcccgaggacgcccgttggtcgacgccgttcggcgtgggtcgccctggctggcacatcgaatgctccgccatgtcccaccgttacctgggcgatggcttcgacattcacggcggcggtttggatctgcgcttcccccaccacgaaaacgagatggcgcagacctgcgcggccggctacccctctgctgcgcgctggatgcattcggcatgggtgaccgccaagggcgagaagatgtcgaagtcactgggcaccggcctgtccgtgccgagcgtgctggccgagcattccgcttgggtggtgcgttacgctttgggctccgtgcagtaccggtcgatgctcgaatggtccgatcaggcgctggtcgaggcgcaggccgcatacgaccgtgtctcgaacttcatcgagcgcgccggtgtggcactgggcggtcagccttctcgcgaggaggttgctgccgtctccgccgacgatttgcccgccgatttcgtggccgccatgaatgacgacgtcaatgtgtctggtgcaaccgccgcgatcttcaccgccatccgttccggcaatacgttgctttcacagctggctgaccgcgccgattccgaaaccgccaaggccgaggtgcgtgaggcgctgctcgccgtgcgtgccatgctcgacaccttgggtctcgacccgctggccgagccgtgggtgtctgctggcggtgccgctgatggcacggccgagtcgcccgaacatgcggcgctggaggcactgattgccgagcagctcaacgcccgcgccgaggcccgcaaggccaaggacttcgccaaggccgaccagattcgcgacgccctgaccgaggccggcatcgccatcgaagacggcccgcagggttccacttggagcctgaagtagccgcttcaaacccatcaatcagtcaaacacgaagtccacgtccacgatgtgcaggcgcttggcgagctccttctccagcgagcgcttgcattcgatgaggtcagctacatcaatggtttcgccgatgccgctcagatacacgtcaacggtgtagttcatgccggtcttgaagatcagcgtctgctcgtagtcggtgttggcaggcagatggcgctgtgcctcggcctccacgtaggcgttggtctcatcgtcatcatgcacgccgccgaccaattccacgaacgcctctttgagcacgctgaacggttccttgatggtcaatgccaccaaagccacggtgatgaagaaatcgccggtgtagtgcaggaagtcaagcggaccgccggccggtagcagcatcaggaagatggcaaccacgccgatgccgaacgacatcgatccgtcgaccaacgtgctcttgcactcggcggtgagcatggtgctggaatcgccgatggagcggttggaacgccggtaatacatgtataggctgaagcacactattacggtcaggatctcgtagatgaccaccgggccggtttcaatgcgttcgccggacccgaacacgaagtagtcgtacgctactcggcacacgtcaatcagcgaatacaccaacaacgacatggtgaaaatggccttgcagatcgcgtagatgggttccagtgcgaacatgccattggggaagcgctcggtggttcgcaccgtgcgcgacgagagatacaccgccaccattccggacaggacggaaatcgcggtgaaggagaagtcgaggaacatggccttgaggccggtcatgaagaacacggccacgccggctaagacctgcagcacgttgatgacgataccaacgatcagggctttgcgttcgagtagtttttgggtgggcatcagtgggccttccttattgcacggcatgtctgcgttggcccgaacgtcatggttcggagcgcacggcagtctgcgtataagcggtgtccagcgattttcaaaacagcgtaagcattccaaaaaacacaggattctttacggtttccatggtatcggaagcactcgattggcttcgccacgagcggacggcacggcatttgccgtctgaatgcccaacatccctgactactccgcgacgcattccccggaaagagtcgtccccaacaccgcaatttcccgcgtggcggctagactgttgcccattatggcagctttttcatctttgacagacagactctcgaatgcgttcaagcatctgaagagcaagggcaagctttccgaggcggatatcgacggtacgatccgtgaaatccgccgcgcgctgctcgacgccgacgtggcgctcgacgtggtgcgttccttcaccggcaaggtgcgtgagcgtgcactgggcaccgaggtgtccgacgcgctcaaccccgcccagcaggtggtgaagatcgtcaacgaggagctcaccgacgtgctcggccaaggggtcgatcgtccgctgaacttcgcaaagaacccgccgacgatcatcatgctcgccggccttcagggtgccggtaagaccacgctggccggcaagctcggctactggctcaaggattccggccacacgccgctgctggtggcggccgatttgcagcgtccgaacgcggtgacgcagctgcaggtggtcggcgaacgcgccggcgtgcccgtctatgctcccgaaaagggcgtccaatccgatggcggcgaggccgtcgcagctccgggccagacctccggcgacccggtgaaggtggcccgcgattccatcgaactcgccaggcagaagctctacgacacggtgatcatcgataccgccggccgtctgggcgtggacgaggagctgatgaagcaggcccgcgacattcgcgatgccgtgcaccccaacgaaatcctgttcgtcatcgacgcgatgatcggccaggacgccgtcaagaccgccaaggcctttgacgagggcgtggacttcaccggcgtggtgctctccaagctcgatggcgacgcccgcggtggtgccgcgttgtccgtggcgtccgtgaccggcaagccgatcctgttcgcctccaatggtgagggcctgaaggatttcgaggtcttccacccggaccgcatggcctcgcgcatcctcgacatgggcgacatcatgacgctcatcgagcaggcgcagaagcagttcgatgaggaagaggcccgcaaggccgccgagaaaatctccgaaggctccttcggcctggacgacttcctcgatcagctgcagcaggtacgcaagctgggctcgatgaagtcgctgctcggcatgattccgggcatggcccagcaccgcaaggaactcgagcagttcgatgagaaggaaatcgaccgcaccgaggcgatcattcgctcgatgaccccggccgagcgccgcgatccgtcgatcatcaatggttcccgccgcgcccgtatcgcctatggttccggcgtgacggtttctcaggtgaacgctttgctgcagcgtttcgagcaggccgcaaagatgatgaagcgcatgtccaatcgtggcggcatgggcggcggcatccccggcttcggcggcccggctatgggcggcggcaagaagaagggcaagaacaagaagaaaggcggcaaatccggcaatccgatgaagcgcgaggccgaggagaaggcattgcgcgacaagctggccggcaaatcctccggttcgaccggcggttccgccttcgccaagaagccgcagaacccggccctgcccgccggccttgaacagatgatgggcaacgtcgatggtggcactgaactgccgccgaacctcggcggaggccttggcggactgttcggccgctgatctcacaacttggctcccctcgcagaggggagccaagttatatctcggttcaatttatatttcgaaaggaacttccatgacgacaatcttcagcgcggtggcaatcatcgcactgttatggacggccttaagcgcgctgcccgccggtctcgaggcccgtatgccgcttccgtacatgattgccctgactccgctgctgtgggttcctttgatgattctggccgcggtcgccgcatggcaacatgaatggactgcgatgtcgtcgcttattgtggtcgcgctgattgccagctcacagcgcatcaactactggggtacgtcaatcgacccagccggcaaacgcagagaatcccaccgtgaaacagcccgtgaaacaacttcgccgacgctgtcaaaaagccataacagcaatacatcgagcacctcaaacactccgaaggaaggacccgaaacagtccctgatgggcaccgtgaaacaacgcgtgaaacactctcgccccagttctcggttatgacgatgaattgtcgatacggacgcgccgacgccgctgaaatcattcgcaatattcgcgaacgcaatatcagcgtattggccttgcaggaagtcaccgacgacctcatcacacgtcttaccgaagccgacatcaacgaactcctcccctaccatcagttcggagacgccaaagagaccgataatggcggattcaacgtgatctattcccgctacgagccgagcgcagcggtgcccaacgtggtctccatccctgccgccgacgttcccgccatcaccctcaaaacctccggtaatcgcacggtgacgctttgttcggctcacccgaaatcgccgatgcgcggctgcgcggattggtcggccggcattctgggtctgcgagaactcgcccgtgcaaaatccgtcagcaatcgcaacatcgtcgtcgttatgggcgatctcaactcgagcaccgaccacccgagcttccgcgcgttgctcaagtccggattcaaggacgcaagtctgattcaagccgccggcccgaatctcaccttcccgcgctggctcaagtggccgcgcatcgaactggaccatattctgttcacccaagggctcagaccgtccggcgtgacgtccttcgaagtgccggacaccgaccatctggctttggccgcaacgctcaccctgcggtagcgggcgcggcgatcgatcgggccttggccgtgtggcgcgaagcgggcgggaacgtctggaagacccccgcccgcagccgggtggttcgccgtcagaggtccatggagcggatcagattcaccatttcgatcgcgccctgcgcgcactcggaacccttgttccccgctttggtgccggcccgttcgatcgcctgttcgatggaatccgtcgtcagcacgccgaacagcaccggcacaccggtgtcgaggctggtctgcgcgattcccttcgagacctcgttgcacacgtaatcgtagtggctggtgctgccccgaatgaccgcgcccaggcagatgatcgcatcgtagcgcttgctcttggccatcttcgacgcgatcaggggtatctcaaaggcgcccggcacccaggccaccgctatgtcctgttcgcggacattctcccttttcagggtgtccagcgcccctgccagcagttttgaggtgatgaactcgttgaacctcgccacaacgatgcctatcgtgatgttttcggctaccagatcgccttcgaacgtgtgcatttattcctcctccatgttcaggatatgtcccatgcggtttttcttggttttgagatagaaactgtcgtaagcattggcttcgatttcgattggtattctgtcgcggatctccattccatagtcttccaattgatacactttgtcgggattgttggtcagcaggagcatggaccgtatccccagatccctgagaatctgcgctccgatgtagtactccctcgcgtcaccggggaatcccaacgcgagattggcgtcgatcgtgtccatgccctcgtcctgcagacggtaggccttcagcttgttgaccagaccgatgccccgcccttcctgacgcatgtacagcagcacgcccgagccatgctccgcgatcgtccgcatcgccgcgtccaactgctgaccgcaatcgcaacgcaacgagccgaagacgtcaccggtcagacattccgaatgcacccggcacaacacatcggtcccatcgcccagattccccatgaccagcgcgacatgatgctcgccgttcaacctgttcacatagcagtgcgccgtgaattccccgtatcgcgtgggcatcgccacggtcgagacgcattcgacgagcgtatcgtgcgctttcctgtatttctgcagttccttgatggtcaggagcgggatctgatgctcctgggcgaaccgggtcaggtcgggggtcctcatcatccggccatcgtcgtccatgatctcgcagcacaggccgcattcacgcaatcccgccaaccgcatgaggtcgacggtcgcctccgtgtgcccgttccgttccaggacgccgcccttcttcgccaccagggggaacatatgccccggtctgcggaaatcgaggggttccacgtcatcggagacgcacatgcgagccgtcaatccccgttcttcggcggagatgccggtcgtggtgccacggtaatcgatggacaccgtaaaagcggtttcatggttatcggtgttgtgctcgaccatgggcggaagcatcagcttgtgggccagttgctcgctcatgggcatgcagatcaatcccttggcgtgggttgccatgaaattgacgttccatgtggtggccgactgcgcggcacagatgagatccccctcgttctcccggtcctcgtcatcgatgaccagaacgagcttcccttcccgcagcgcctgcaacgccgcttgcaccgactgatggttcatgattcatacatcctttctcagaacccgcaccgggacagcagatcctgcgtcagtcccgtccgggtcgtcatcatgttccgcacgtattttcccaatacgtcgttttcgagattgaccacgccgccgacccgtttctcgcccagcaccgtctgcgccaaggtgtgcgggatgatcgataccgagaagtccctttccgtgacctccgcgaccgtcaggctgatgccgtcgacggcgattgaacctttctcgacgatgccttcgagtatctcgtttcgcgccgcgatccggtaccacacggcattgccttcgcgccgcacggaggatatgctgcccgtgccgtcgatgtgcccggtgacgatatggccaccgaaccttccgttcaccggcagggcccgttccaggttgacgccgttcccgcggcgcaatacgccaagcgaggttctgcgccacgtctcattcatcacgtcgacggtgaagcgtcgccggtcgaaatcgacgaccgtcagacagatgccgttcaccgccatgctgtcgccgatatggaggtcctccatcacgttcgtggcatcgaccgacagcgtgcagttggcggcgctcctccgtatgtccgccaccgttccgacttcctccactattcccgtgaacatgaatacaccacctcgctttccaccagataatcctctcccactcgggagcaggcgcggggccggagcatgacggcgtcggaaggcagggcgactccttggccgcccaccgggcttttcgcggtgccgccgaatatcttcggcgcgatgtacacgtgcgcctcatcgacgatccgctgttcgagggcgctccaattcatcgcgctcccgccttccagcagcacgctgtccatctgcatatcccccaggtgccgcaccacgtccgccagatcgacgtggtcgcccttccttccgacggcgagtatttcgcagccgtgccgccggtagtcctccgccttgcgttcgtcatcgcaggcggtggcgatataggtcctgacgtcattcgccgtctgcacgatccgcgaggtgaggggcgtcctcaatcgcgtatcgcagacgacgcgaaccgggttccttccgtgtgccatgcggcatgtcagcaacgggtcgtcctcgatcaccgtgttcacccccaccatgaccgccgcgacggatcgacggagctgatggacccgacgcctcgactcctcgccgctgatccaccgtgattgattggtatgggtcgctatcttcccgtccatcgtcatggcgtatttcatgatgacatacggcgtatgcgtggtgatgtatttgctgaacacccgtatcagatgccggcactcgtcggccagcacccccacatcgacccgtatgccgtggtcttcgagcatgcgcacgcccttgccggacaccacgggattgcggtccaaggttccgacgacgacccttgcgatgccgctttccacgatcgcctccgtgcatggcggcgttttgccgtaatggcagcacggctcaagcgtgacgtacaacgtcgccccggcgggcgactgcgtgcaatgccgcaacgcgttcctctcggcgtgcaatccgccgaacatctcgtgatacccctgcccgatgatccgatcgtccttgacgatcaccgcgccgaccatgggattggggttcacgtatccggcccctcgcttcgccagctcgatcgcgagtcccatgtactgcgcatcgtccatgtacgcctccaagcatgttgcgcccatacgctatccaaggcatacaaaagaaggttcatgcgaacacgaaaacgccctgaaatgatatggcatcatttcagggcgtacgacaaagcataaacgtactttcatcttctctcatccagactgtactgtcggctttggaatctcaccaaatcatgccttgcggctcgtgggctgtaccaccggtagggaatcgcaccctgccctgaagatagttattcgttttgcccgtgattgtactcgccgacgctccccctgtcaacggaagcggcctcccgcagcgcccgggccttctgcatcgtctcgtcgtactcgaagtcgaaatcggattccacggtgatgcctccgcccacgccgagcgacgtctcgcctccctcccgcacgatggtgcggatcacgacgttgaaatcgcaatcgcccgtatcggagaaatacccgatgctgcccgtgtacaatccccggggcgcgcgttcgagctcgtcgatgatctgcatggcgcgaaccttcggggcgccggtgatcgaaccggtggggaacgcggcgcgaaccgcgtccacggcgcaacgatccttgcgcagcgtcccctcgacggtcgcgacgagatggaatacggaaggatacgtctcgatggcaaagtcggggtccgtgccgacggaacccggttcgcagacgatcgacaggtcgttgcgttcgaggtccacgaccatcagcagttcgctgtggtccttctcgctgcgggcgagttcctcgcggttcgcccgatcctcgtccggcgtgccgccgcgtggccgggttcccttgatgggccgcgtcaccacatgccccgagcgaatctccatgaaccgttccatgctcgaacagcacacgtcgagacccggtgcgcgcagataggcggaaaacggggccgggttgtgggtgcgcagataacggtagatggcataggggctcccggatgtctccaggcgcaggcgctgcgccatgttgacgacgtaggcgtcgccggcgcgcagatggtcgacgagacgggccagggcgtcgccgtacccggcccgcgtgaaatcggaggagcatggggcgagcgaacgtcggcgcgcgggatgaggggcgggcgggcatgaatccaccaggtcctgcgcccatgtcagggcgtgggcggccgtcatcgtccgcccctggcagcaacagaacaacgcccgcgaccggacgtcctcgatgagcagcaggtcgtagaagaccatgctcgcctccggtgtggccgcgacgggatcgtgcctggtcggtacgccgcacgattcgcggccgaaatcgtatcccagatatccgatcgcgcctcccgtgaggggcagacgcggatcgcgcgcgccatcgcagggtccaagccgcttcttcacgacatcgaggaaatcaccctccacggcaacgccgttgacgaggcatccgccccgcccatgttcgatcacaagataggggaagagtcccaggatcgagtagcgcccctgcgcccccggcatcgaggagtccaggaacgcgaagcgttcctcgccgcgcacgcactccacgatgtcggcaagcggtcggaacgtcctgagcttgaacacctgcgcgctcaccggaactccttcgtctgcgcccggacccgcgtccgcgccaccatgcgggcgtaggtgtcgttcacgtcgcgcgacacgctccccggttcgaattccacgccgccgataccggccacgggcatggcacccatcagggagttggtgaggaacacctcgtcggcccgaagcagctcgtcgggcatgatcgggcgttcgacggcccccgtgaacccgatcacggcatggcgcatgaccccgggcagcagaccgcaggagacgggaggcgtcacgacgtctcccctgatgacggcgaagatattggagacggccccttcggcgacctcgccccgcgtattgaggaacaacggctcgtcgacggcgcggtcacgggcgcgacgcttctccatgatgttttcggcatacgccagcgtcttcatgcgcgcgaggggggaggattcgttcctgcgcacatcggcgaagtcgcagcggaagacgcgcttcgcccccggcgcggcatacgggttgcgtctcaacgagacgacgcggttgcgctcggtgaccgtgagcttgagggccgaatcgtccgatgcgccgagtccggcgcatgcgcggagaaccatcgtctccagatcggcgcgacgcgcctcgatgccgaggtatcgcaacgtctcacccaaacgcgtcagatggtcgtccagaaacacgggcgcgccgccggataccgcgatggtctcgaaggcccccatgccgaagaagaatccgtcatccgcatccacacgcgcccgggcaccggggccgatcacgcactcacccatcgatcagcgccccctttcccgtctcgcactgccatcaatcaggctatcagtcatgaagacggtaggtgcgccgccgacacgccgtccgtccggcgattccgtgcgtcacgaccggaccgatgcgcaatatccggcttccgcgttacactagtacggttattcgcgcgcgcgtggcgccctctacaccccgagccgcgaggacacgtggattccggccggtcatgccccacatggcaaaccgagaacccacacacctagcattacaaggagagccattttggcaaccaagattcgtctgaagcgacagggcaagaagttctacgccttctaccgtgtggtggtcgtcgattcccgcaagaagcgtgacggcaaggtcatcgaggagatcggtacctacaaccccaacacccagccctcgaccatccagatcaagtctgaccgcgctcaatactggctcggcgtcggcgctcagccgtccgagcccgtcttcaagctgctgaacatcaccggcgactggcagaagtacaagggccttgaaggtgccgaaggcaccctgaagaccgttgaggctggcccggacgccgaggcccgcatcgcggccgttgagaaccaggctcagaagctgaaggccgccaaggccgaagctgccgccaaggccaaggctgaagccgaagccgctgccgccgctgaggaagccccggctgaagaggccgccgaagaagctccggccgaggcctgagcggaaacgaaaggctagctatgcttgcacaggctgtggaacacctcatcaagaacatcgttgattttcccgacgatgtttccgtcaagtcccatgagaacgcgcgcggcgaactgcttcgtgtacgcgtgaacccggaagacatcggccgtgtgatcggccgtggcggccgcaccgccaacgcgattcgcaccgtgattcaggcactgtctgaccacaaggtccgcgttgacatcatggacgtccgtcgataaccgataaggaacgattcacagcatggcacagcaagacatgcacgacgaccctcagcagctcgagttgctgagggtcgctcgtattggccgcgcacagggcctgaagggcgaagtcaccgtgcgcctgtacaccgatgatcccgagtggcgcttcgagccggactccgtgctctacagccaggatggcgagaccgagtacatcgtcgagggctcgcgcacgttcaaggatcgttggattctcaagcttgagggcgtcgacgaccgcaatgccgccgaggccctaaacggtgtcgaactctatggcgaggccgacgacgcagaagatatgctcgaagccgacgaatggtatcccaaggatcttattggccttgaggcccgtctagtcgagggcaacggtctgggactgcccgccggccaagtggtcggcaaagtggtggatgtggtcgactcccccgctcagtccctgctcaagattcgtttgaccgagccggtggtaaccggccagaattccaagggcgaggatgtggtcgaaaagaccgc

SEQ ID NO: 1102 - DNA, 40225 bp, Unknown
  R13_10m  MAG No. k141_17288
gcgcgaatgcggaacgcggtggccagacagcaccagccaatcaggcagataaccgtcatcgtggcaaacgtccatgtgccgccgacggcagtggcgtgagcaaactcagcggtgccttcttctcctgcgccggcctgagccacggaaagaatcgtggagaacagtgcggtaccggcagcgccgccaaactgaagacacgtgttgaaaatggcgttgccgtccggcttgaactcgggagagacctccgacaggccactggtcatcacattcgcattgccgatggaatagaacagaccgaaaatgaaatagaatccgacgagcagcacgggcgtaagctgcatcgagaacaccagcataagcactgggcccaaaatagcgatgccgatcggaatcagaatcggcttgaccgcgccgaacttatcgtagaaccagccgccaagcggggcacagacagcgccgaccagtgctccgggcagcaccagagagccggccacaaatgccgtggtgccgagcgagagctgtgccacattggtgatgacatagccgtagccgatggcgaccaatggcagcagcagatatgcgcaggcgtgtaacagtacggcgggatccttgagaatgccaaggcgcagcagcggggagaaggcacgcttggaactcatggcgaacacgatcaacaaggcgaggcccacaatcagactgacaatggcgataatgccggagcgtgtggctgacttgccggacaccgccgcactgatggccacgccaccttggttgagcgccagcaccagaccgaccaacgcgacaacaatggacccaagctgaatcgggtcaagataggcagcctcggtcggtgtcttctgctcaatgcacttcatgccgatgcatgctgcgattagcaccagcggaatggcgatgacgaaaatcgcgcgccacggcagcactgtggtcaccgcgccgccgacggtcgggccgatggccggagccacggtaatgaccagcgatcctacgcccatcaatcggccgattttcgaacgaggagactgctccagaatgatgttgatcatcaacggcgtggccacgcctgagccagtgccctgaataatgcgggcgacaatcagcagcgggaaggcttgggcgacgatcatgatcagcgagccaacgatggccagaatcacagccgcaagaaaaatggttttcagtgcgaatcggcgcttcaaaaacgagctgatgggcatggtggcggccaccgccaacagataaatcgtggtaatccattgcacagtggccgtgtcgacatggaattcgcgcatcagtgcggggaaaagcacggtcatcacggtttcggtcagaatgccaatgaaggcaagtgagccgacagccacaatcgcgccgataagacgtgtgggaatcttctcgttatcaatatgctgctcaggcatacatgctcctaaacgttcggttgcaatgtatggaatgtaaggtttaccaaccggcgtaggtacctgtgcgtgcggataaaccggcaatcgtactgccttggctgcacgctatggaatcacaaaaccacctgtgagtgtacggttcggggcggacgctacggtcgatgcgcaatgggctgtcccttggtttggtggggtttgatggggcgggttcggcattggtccggcggggcgggttcggcattggttcagcatgaggaaacacgcgataatatccgccctgccgcctagtttggtgaaccatgggtattgagaacacgcataagctgattgtcaactgcctgccactcaacgaaggagaacggcgcgctttcgccaaggcggcccgcgatgtgccgcaggaattcgtgggcgacgaagcgcaccgcggcgacatggtctggtcggccgctgttcccgaggagcttcgctcccgagctaccgcagtcatcggcaactttccggtctcgcaggcttcccaatacacccgtcttgaatggttgcagaccttcagcgccggtgtggatgcgtacatccgcccgggtgtgctgcctcgcggcaccatggtcaccaatgcgagcggcgcgtatggccaaagcgtgtcggaacacatgttcgccaccatgtgggcattgatgaagaacctcaaccggtatgcctccaatcagcgtgatcatcagtggcaggatgaaggcccggtattgagcccggaaggtggcatcgcactgattatcggcgtcggcgacatcgggtcgcatttcgctcagcttgcccaatccgtaggtatgcgtaccttcggcgtgcgccgtcatgcggacgtgccggccaagggcattgaaaagatgtatggcttcgagcggctggaagcactgctgccattggcggacgtggtggcgatggcggtgccgcgctcgccgcagacccatcatctgctgaatgcggatcgtctgggtcgtctgaaatccacggccatcgtaatcaatgccgggcgtggcgacgccatcgatcacgaggccttggccgacgccttgcacaatggacggctccacagtgccgggttggacgtcaccgagcctgagccgttgccggcggaaagtccgttgtgggatgagccgcattgcctgatcaccccgcatgtggccggcggcaatcatttggaaaagacttccgagcacatcatccgcatcgccctgaccaacgtttcccgctatgccaaacagcaggaactgttgaatctcgtgcgatactgattcgcctgtatcgggtgtacatgaactcatgtacacggccggcgtgtcgcatcccgctacgactgcggcatcgagatgatacctgcagaggcgtggttgatcagaggcccaatgaacgtggcccgaggtcagtctcagtctgatagttcgtagccgttggcgtctttatgccacggcgagccgggcttgctgcacagaatgatgatgccttcaacaaagccccagatggcggctgcgattgggccaagtccgagcagaatccagccgacaagcgtcagcagcagctgggccacggccttgccggtgttgccgagatagaagttgtgcacaccaagtccgccgaggaagatgcccaacaggccggcagccaacttggacttggatgattgccacaccggggcggcggcatacggagcggcggtgtattgcggctgtgcgtaggcattcggctgctggtaggcctgtccatagccgggctgctggccgtagcccgctgcgggctgtgcgggctggccatactgcggctgagcgtactgagactgagcgtatgcgccggcgggctggccgtattgcggctgctgctggccgtagcttccggcggcgggttgagcgtatgcggcgggctgtggggcgccatagccctgcggctgccgtgcggcatcttggccgtacgacggctgtgccggctgtgcaggttgtgccggctgcggaacactgtccgaaccgtacggttgttgttgattatcagtcatgtgggtctatcccttctcaatcgggaacggcagtaccttcttaccgtttctgcacaacatcatctcacgttttgcctaatagtaaaacctgccgcgctacgattgggccatgaaaagtttcctgaccagctggttgattatgactatcgccgccgccgtcatggtcgcggtgactcccggcatgaccccggtgggggagcctccgattctcggcatcgccgcgttcgctttgttcatggcgctgattaatgcgtcaatcaagccgattgtgcatctgatcgcactgccgtttgcgattctgtctctcgggctggtcaccttgattatcaattggctgttcatgcgactcgccagctggctggcggtcagtctgttcggcgtgggcgtcttcgtacacggtttctggtggtcggtactggggtccttggttctgaccattgttgcgggaatcgtcgggtccatcttggatcagtgacggtgctcgctgggcgaatatgaataatggcggttggaatcggactgattccaaccgccattactcatatcaagctacgggatcgagcagagcgaacgctactcgcgcaccaagcggatatgctccacatcgtcgcgccgggagcgacggaacagcacgaaacgattgccgatggactgcaccacttcggcgttcagctgctcggcaagctcggcggcggcttccttggcggtcaggccagaaccgtcctgcacggcgcacttgatgagctcgtgcttctcaatggtttcatcggcctgattgacggccgactcggtcaaatcgttcttgcccacatagaacaggggcttcagcgagtttgccatcgcgcgcagctgcttgatttgcttcttggtcaatgccatgggaatttccttacatctttcgtataaccacaccagcatagcaaccggtgctgtctgtgctgtttgccgccctacagcgcgatgatggcggcgatgtaggcgatgacggcgacggcgaacacgagatcttgcgcggcgatggtcagggcacgccagtgggtgcggcggatgctctcctcgtagcagcgggcgtcaagtgcgaggctcaggttgtccgcgtgacgcaacgtgccggcgaaaatcggcacgataatcgcgctcatcgccttgatgcgctgggccagcgaaccggtttcaatggaaccgccacgcgcggattgggcatcgacgatggcacgggtctcgtcggtcagcgttggaatgaatcgcaatgccagactcatgaccagcgcgatttcttgggcgtggataccgagccggttgagcgggctgatcagggtggcgaaggcgtcggtcatggcggtcggcgtggtggtggtgaggaacaccgcgcccaagatgatcaccaacgcgaaacggcaggcgtacagcacggctatggtcacgccctgatcggtgatgctcagcgggcccagcgccaccaccggcgtgccggtgcgtaccacaaacagattgaccacgcccatcagccccagcaggatcagaatcggatgaatggattcgagcacccgtaacgggttcaggcgtgccgccgcgataacggccagggtgatggcgatgcccagcgcaagctggaggggtgtgttcaccgcgaacatcgtgaacatggcggccaggaagcccaccatcttcacgcgcgggtcaagtcggtggatcaccgagtgcgcgggtttgtcaggggagacggactcggcggggaaggcagtctcggttgccgagatgctctcagcaccagccgcgccggcaatcggcatacgtaccacgcgatcggcgatatgcttggcctccgctcggtcatgggtgatgatgagcacggtcacgccgcgcgatttgagcgtgcgcaacagctcatggatgcgctccttggcctggacgtccaggctcgcggtcggctcgtccatgatgagcacgtcaggattgcaggccagcacgccggcgatggccaccaatcgctgctgtccgccggacaggtcgaaaggggagcggtcggcaagatgcccgatatgcagcaggtccagtgattcgcgcacacggtcggccacctcggcctcggcgagcccctggttgcgcgggccgtacgccacgtcctcggccaccgtgtccgcgaacaactggtgctccggatgctgcatcacgtaacccacatgccggcgcaattgcgccaattgcctgcgattcgccggctccggccgtgcgttgctaccgcgtttgccggtcgaggccaccggaacgccggccacctcgatgctgccggcggtcggcgcggccagcgcgcacagcatgcgcaccagcgtcgacttgcccgaaccgttcacgcccatcagtgccacggtttcaccgcgcgcgatggtgaacgacaggtcatcgataaccgcccgtttggccgaaggatagcgataggtcagatgcgagacgcgaatgatggggttcgtcatatcaccgatgccgtcggagagcagcggcagttcggagccgtcttcgcgcttccgctggcgggggctgtcgttcgtaggacgactgggggcggcttctgtgccgataccaccctcagtctcgctttgcgagacagcctccgctagcgggggtcgattatcggcggctgcagtgacaccaacgattcgcccggcctccatgtgcacgatgcgatcggcatgaacggtctcatccggatgatgcgtgacatgcacaatagtggtgccgcgtgcctgcaaatcatccaaaatgcgcataacttcagcgcgtgcggattcgtccagcatggcggtcggttcgtccaataccagcatcgccgggttcatggccagcatgccggcgatggcggcgcgctgctgctgtccgccgctcatacgggtcgggtcggactgacgcaagttcgccaaccccacggcctgcaatgaatcaacgatgcgctcgccgatgagcccgcgctccagaccgagattctccgggccaaaagccacgtcatcctccaacacggtggtgaccagctgatcctcgggattctgaaacaccataccgatgccgcggcgggcagcgcgataggcgtcggcattcgggccggctgcgtacacgcgctgttccagtagcgtcacttcgccaccgtccggcgcggtcaatcccgcaatcagacgggccaacgtggacttgcccgatccattcggaccgaccaagcataggcgctcgccggcatggaccgtgagcgaaacgccatccaaagcccatgaagtgccgcggtcatagctgaaacgaatgtccttgagtacggcggcggggggagcgggctcggcggaatcgtggaactcgtcggcgtcgaaggaatggggtgcaacggtcatgaaacagcaatccgtaactgataggcgaaaacgcagaatcccggcaagggccggagttctgcgttcttgttctttgagtggtcgttgagtggtcgttagtcgtggcgggcataggcccgtctcaggccggtcactgctgcttggacagcaggttggagaccggcttgtagatcaggaaggtgatcacggcgtgaatcgccatcttagccacgttgaacggcagcagaatcggcagaatcatcgcggccacagcctggtagggcatgtgcgcgtaaatcggcgtgatgatgaggttgcccaccagcgccaccacgatggccagcaccgcacccaccagaatgccgatggcggcacccttgcgcgtacggatcttacggtagatgaacgcggccggcacagacaggaacagcgccaccagcacagccatcagcgaaccccacgggtcggcgaacatgtgcggcacaaaaccgagcacagacacgattgcggcggcggccggaccgtacgcaaagccggcgatcaggcagacgatgccggacgggtcgtacttcagccaagtgaccggcgtaatcgggaattcaatgaagctggtgaccatcgccagcgccacgaacagtgcatacatggcgatacggcgcgtggaccagcggccggaatcggccacaccagtggtgtgcgagccgagtttggcgctggtgctggcggtggacgcgctggccgaaccctcggcctcgggcgccacagaacgaacaacttgcatgcggatacgcgaagatacgctcataatgagccctcgtttcttccatccggactataccgttggctccggaatctcaccggatcagccgcttgcgcgggtcgcgggcttcctaccatccccgttatgaaacccggggtgcaggttaccgccagtaaggaattgcaccttccctgaaactgacaggcttattcatacgccatgcgccggacgtacgcaacccgcgtttcactgtgcagaaattcgtcttgtgccggtcaagtgcaacaatgggagccatggctgaagtgaagaaacccaacaacaccattgacaagcttgccctgatcgtcaccacctacaaacgtcagcagctgctcgaggtactgttcgattcgattctggcgcttgagcaggcaccgtggcgcattgtcatcgtggacaatgagcagtccgatcagacggcggacatggtcgctgcgtttgccggcaaggtgaccggccagtggggcaccaccgtggccgaccagtccggcaacgaagagcgcgtggtctatgcgccgcagaccgagaacctgggtggcgcgggcggtttctccgccggcgtggccaaggcgtatgatctgggcgccgcatggttctgggtgatggacgacgatgtggccgtgctgccggacgccattgccaagctgtccaagtggaccgacaagcacgaggtgattcagggatcccgattcgattacgatggcggcccgttctactggcagtacgacttcattgtgccgctgggcattccgaacccgatcgcgcccgccgcatttggcccggccgggtatcgagtgatggacacgctgtgcttcgaaggcggcctgttcaaccgccgtgtggtcacggaaatcggtctgccggacccgcgcttcttcatctactgggatgacacgatgtatggctaccgcgccagcaaggtcaccaacccgattgtggtgcccgacgtgatcctgcgccgtacgcgcgaaatcggcaattgggatatcgccggcatgcgccagctcaactccacgtccgacatgaaccggtatcacatcatgcgcaaccgcggatacatggcccggtacttcatgacctacggcgacttccgtccgctggtgtttggactgggcaccgtgctcaccgcggccaaggaagtcattcgcctggtgatggtggatcgcgaacacctcaagaccggtttggtgcagattgccaagggctggtgggactcgcgcaagctgatgcacgaccccacctggaagcccatgccgccgcttgaatgacggccatgccccggcccgtccggcgcgtccgcgtgatggtcgcgttagactgggcgcaaccctacgaactgatgaaaacgtatggaaaggaaggtcaacgatgattgaaactgcacaggctttcggtgttgacattggcggttccggcatcaaggccgcacctgtcgatctgaccaagggcgatttcgccgagccgcgattgaagattctcactcccgaggtctccacgcctcaggccgtggccaaaatcgtcaagcagcagctcgaccacttcgaagtgcctgaatccgcacccgttggcatcgccttccccgcgccgatcaagcccggccagaagctcgacttcatggccaacctcgaccagtcttggattggcgtggacgttactgaagtgttctccgaagcctgcggccgcccggtcgtcgtggtgaacgacgccgacgccgccggcctggccgaagtccagttcggtgccgccaagggccaggatggtctggtcatcgccaccacactgggcaccggcatcggcaccgccttgatctacaacggcgtgctcatcccgaacaccgaactcggacacatcatcctgagcgccaagcatctggacgccgagaagtatgcctcctccgcgattcgcgagaacgaggaactgggctacaagaagtgggccaagcgtctgaccaagtactacggccttatggaaaagtacttcaacccggacctgttcaccgtcggcggcggcgtgagccgtcagagcgaaaagttcctgccgtacgtggatatcaagaccccgattgtgcccgccaagctgcgtaaccaggctggcatcgtcggtgccgcctactacgccagcaccaagcagcagtgagctgagttatttctgctggcgcaggagccgtattgaccatatgtaaggccgtccaagtatttcgggcggcctttttttaatgagtaattcgttcattaggtcgattatgtgttcattaggtcactcccattccaaacctgaattgcaatgggctcggaatggcggcgtttcaagcatcaacaattgtgaggctcgactagcagtgacctaatgagcgcgaaaatgacctaatgaatgtagctaggccgttattcgatgtggattgaagtcatagtatgtctgacgactccgctgccgtgccgcacgattgtcgtagtgctggatgctggtggatatgaggcctcgatatacctggctcggcaggggtggttttatcgtggagggtatgagcgtgcatttctcttctcgtgtggatatttctgcgccgaatcccattgcggcggccgaggcggcagccaaggcaaacggcatcgcactcagcaaactcaacgattccaatccgacccgccacgggttggcacccgaattggtgccgagcgtgtatacggccgacccgcgtggaccgcgtgcggcacgagaatcattggccgcattcctcaatacggcaaacgtggtagacgcaagcagccctcagttggcttcgcccgccgccggcgagggcaggaacgagcgccatgccgctttcaccaatgtgaataccgccatcgagggcgccgacccggacgccctgtacctgctgagctccacgtccgaggcgtattcgtggctgattaagttactttgcgatgccggcgacgcggtgctggcacccaaacccggctatccgctgattgagtcgattgcacggcttgaatgcgtcgatacggtcgaataccagttgcaattcgacggctcctggttcatcgacatcgccgaactcgagcggctactcagcgagcccggtggcgaacgcgtcagagcattggtactcatcaacccgaacaatccgaccggttcgtacgtaaaaccaaccgagcgtgcacgtatcgtgacattgtgccgtgagcacggcatcgcccttatcgccgatgaagtgttcttcgattactctctcgaacctttccccggcgacgcacggctcgcgggggagcgcggcgtgctcaccttcgccctagacggattctccaaaatgctggccgcgccgcacgccaaagtcgggtggattcaggtgtccggacctgccgaggacgttgccgaggcccagcgtcgactggacgtcatcgccgacgattatctgccgatgggcgacatcatcgccgaacggattcccgcattattgaacgccgcgcccgcacagaccagacgggtgggggagcgcgtgcgcaataacctggccaagttgcacgagttgcttgacgccgatcccaacgggctggtcagcgtgctacgggccgaaggcggctggaacgtgctgttacgagtgccttccgtcatcgatgagaacgaactggtgttgcggctgattgacgagcaccaactcaccggacagcccggctacttcttcgacatgacctccaatggatacctggccgtttccctgctgcccgaaccggacgaattcgagcgtggcatccgcgccgtgctcaataccgtcgccgctttgctgcgataggccggtgtttgccggcaccacacctgtactccacgtacaatggcggcatgggattcttgtttagaccgaaagaactgccacacccggcatcgctgacgttcactttggaacaggccgggcatacgtatgatgatgggcacgtgggacttgctcccacggacatcaccatcagcgagcggcgggtggccgtgatcggactgaacggcgcaggcaaatccacattgctgggtctgctggacggttcgttgaaggccaacgccggcacggtgaccattgcgggcggtgaggaacgtcttgacccggctgtgaagaaggacgcgaagcgcatcgataatctggtcggcaaagttcgccgcgaggagattccgaacagtttctaccaagcggcgaatatttccgaggctgtttccgaagcgttgaaaaagcacaaggtgcccgagtcagaacgtcatgcgcgcatcggtaatctgttcgcgcattttgatttggcgcaggtctccaaggccaaggccggcgaattggactccgagaaacggcacctgctggctattgcggccgcgctgagctttgagccgagtgcgattgtggcggatgagccgagcaagggattggatgagattggcaccgcgcatgtggccaaggcgttgttcagctacaacaagcaggtgattttcgccacgcatgacacggatatgatccgccggcccgaatacgccatcgaccgcatactggtgctggacgagcacgcggtcgtgtttgacggagcgccggctgaggctgtggcgttttatgaggatctgattcgacgccgatacgagactagagcatcgtgaaccatgcctgaacctgatgccagagcgtcggattgttgtcgatcatcgaatcgctgcgcgactgcacgaagcagctcagtatggctatgcccagcgcccacaatacggccagcaccacgacccagcgcatcagccaacgccacggagtgacgcgggcgatgccatcgtctgaagcggcgtcgttggcccccgccaatgaccggctcggttcgcgcccattgaccagccacagtagccccggtatggacgccagcgagatcagccagccgaaatcggcggaataccgccatcccaaaccgccgacacggctgtcgaatacgaccagcaccgccgccacggccaagcaagacatcagccatggccgcatgccgtgtgtttccaatctgcgcagcaggggcagcgccaaagccatcaaggtcagtggcgtggccgtgaaaatcgcgccgaccatcacctcgtaataaccccattgcggcatcggggcgggagagcccgccagccacgggaaacgatccatgaagcgcagcggcaggaacaggtaataccagatgttggcgggcatatccgcggacggggtggtataccgggtcatatcggatacggagaactgatacgcattgccgaaattgaacggggaatcgaaccgaaccatgttccacgccatcagaggcgtcacgacgagaatggcgggaatgattaccgccagcggcgcgcgcaacgcctgcaacggcttgatgcggcgtgtgcgcagaccggtgcccagcgcgcgaatctgcggccagaacagggggaacgcaagcaatgcggccaaggtgaacgtcggtcggcatccgaaattcgccgcaatgcacaaggcgcccaaggccagtcgtggcagggagagaggcttggcatcgcccgcctgccatcggtccgatggtctcagcggacggcgggacgtgtccgcgccgagccatagccatagtcccagcgacgtcaacgtcagcgatgcggcgaacggtatctgatagaagttcgtgcgatacagcaaataccccacttgcgcgctcaccaacgatgagaccactactaacgacgcggccgccaccgaagtcttcggcatcacacgatgggtgacgcgcagcaccagcaaggagaagaagatgatgaacagcagcacgagaatatactcggcggcggatgtcggcagattatgaccggccagcagacgataggggacgaacagcagcactgcgggcaacacgccaaaataggaataccagtgaccgtcataatacgcgtaatcccagtagagcggactggctccattggcgagtagctgggcacgtgtggctacgtcataggggtgctcggtggcggccagttgttcgggaaccggcaagtcgagccagggccggccggcgaccagcgcatcggccacatgcccatactggtcgaaatcataggtgtaatcgccggaaacgtggaagacgagcgaagacgcgtaccacagttcgtggatgatggatacgccgataagcagggtaggaatcgccagaagccccacgaaagcaagtcgttgccgagtgctggacgggtcaagcgtgatacgccacaggcgcgatcccggcctccaggcggcaatcatcagcaacaccaaggccatggcgagcacgcgcatccaattgatgacgaacggtacgcgcacgttggcgcgggcgtcggtgaccggtacgatcgcgccgcgctcttcctgaatccaaatacgcacgatgccggcacccggcgccttgacataatggctgcgaatagcgtcgggattcatcgactgggccttgccggtgatgccatcgacatccgcgcgcacatgaatggtcgccagcggtttgaagacttccttatcgtcgttcgctttggattcggcctcggcctgctcgcgggccttatcgatgaccttgctgctctcggtatcgatgcgtaggtaatccgacgtgccgtccgcggtcagttcaagataggccttggtcggatcggtgacggtcaacatgccatcattccggcgcgtgagacccgaacccagcgtgttatgcacggcgttcgtatccgtgctcgctccgagcgtacgccagaacggcaggttgaacacgatgcactccatggcggcgatggcggcgacggcggccagcaaggcgatcagcaggcgcaccaaacgcagccggtgccgggtatccgggcggctgggcaggtgccgttcatgattcgacggcatcggacggtctgcgcgagtgtggtctatggaatgcacgcatttattctataggctttattcgggcttgatgtcgggcaaacaagagacaatgtgaatcatgccaaaacgtacatcggaccatgggaagcacaaccgcacgccactgctgggcgggctgaaggattcgatgaacgcgctcgcggccgatctgggactgtccaagccgaaaaagcacgatacgaatccgttcggcgatgccttgcgggagaccagtgagcgtaaaggcggcattatcgacgaactgactcgccatgcagtggcgctgagtcctgtaatcaagcgacgcaccttccccgaattggagaacgtgccggaagggctggtgcttggatgggcgcagctgccctccaccagaggccgtggcttttcgcttggcattttccccgaccgcgatcattttgcgcaggtggcgttcgccgatacgcatggccgcgtattcgtgggcaccgaccccaacatggacgtgcaggatatgcaggcgcgattcatgttcggcaaggaaaaggaagtgactctgccggacggtgagcggctgggcgaaagcgacgagccgcgttcacgttccggtttctcccgtgcaggccatggcctgggaagtgcgctgcatcatgggcgtggtttggggcgtggccttggtcatggtgctgacggcgtgaaggccattaccggtggcgtggtggggcgtgacgacaccggacgcatgacgtggctcgcctcatggctcaaggccggcaaccggtacacgcttgagcagatgcgtgccaatctgccgcctgtgatgcgtcatgatttggaataccgcgatgccattaccatcgcgttcttcgccacgtatatgttgccgcagatcaatggtctgctcatcggattcggttccggcaatatcttccgccgtctcaaccgtgaggcgccaatcggtgcgattcgccgttcggtgcgtgacactttggcggcacgagcccacggcatgcgggcctccggtctggaggatcacttcgccgatctgatgcgcgaagccggcgccctcgacaccacgccgggactggaagcggtgcatggcgccgaaccgttgcacctgtacacctcgacgtattcgagcggctatttctttacgtgggataagtccttggcattcgggcaggcgctgaaatccttgaagatcgaaggcaacctcaaccgattcgctgcggtgagcgcttggctggagcgcaacgcttccttggggcgcaaccctacggaagatacggtgacccgtgccgaggccgcgcaaatcgacatgaaactcattgagaaccctgcgattatggcgcttgacccgtatgatggcgagcaggagcgtcgggccgtgctgagcctggtcgatatcgccgcacgcacggctgggcagattcgcagtgaattccctgatcctcgagatgtgctgacccagcagaacgtgccggattcgggtgtgacgaatgctgcgggcgctgaaagtactgagagtgttgagggcgctgtagagcggaccaataagagcgacaccaacactcaagccgctcggccttcgtattcgccggcgaggagcgacgaatgggtgtatcgtcagaccctctcctcactgttgcgccggttacggttgccgtatcggtttgatgtggagttccggtcgcgcttggattcgggtgaagtggccattggcttcaccactgccggcacctcgatgatgcccgatagccggtatgacaccactcgccgtacgtggcgtgcgctgagcagcgccgaacgcgcgtcgatgagcgccgcctacaacctgcgtgtcggcctgatgatggcagcgctgagtttcggcaccagcgaatccgtgcgccaggtgtcgttgcacatcgattccattggtcttgaagaggcgattgccgaacaggattccgccatcgaggcgatgatgagcgaggccctaagcgccttcgaacatctgcgcagtggcgatttggggcgtgtgggttccaaagccgaccccaaagatggtgatttccatggcgacccgacccgccccatcacccatgaggagacgttcgggcaggcggcgtccggtgacgaacgcggcacggccgggggaataggcaacggtaccggaccgtctgcggatgctacggatcaggccgcggccgaatccgctgacgccgatggcgccgcgtccatcgattcgcagttcgaagacctgatgaagggcgtcgatatcgacgaaatggcgttcggcatgccggacgataccggcgcaggcgacgacctgggcggtatcggcggcgagggcgtcggcactgacgatgctgatggggccgccggcatggacgatgatccgatgagcgtgctgcgccgcaatcccaccgtgcgcaatatggtcaccgtcaccttcacccgtgatgccttcctcaagcgactggacaccgatgggcttgacaatcccgaggaaacctaccgcatgttcggtgccgtgatggacgtggacggcgaaggcggcctgaaacccatcagcgccgacttcgacttggcggacagccggttctctcccaccggatcccaggaggagcccgaactggccgaccgtcaattcagcccggcgaccgctcacgtgctgggcgcacagaatagtgccggactggctatccagcgagtggacttactgcagcatggcgtcaacgaattccacgatatcgccaggaacacgtcgctcggctccgtggaaaaggcccagcgagccatgcagatcatcgaatcgatatgcgatcccgaactgaccggtttggcctctcaggtcaccagtgcgttgatcgatggcaaggacaccccggacttcacgttcacgcttgccgacgatcttgacaaggagcgtctgcgcgcccgagacatgctgttctcgggccaagccgatcaggccatcgaagcggccgaagcggctgtggcccatttggatcaggtgtatgcggcaggccatggcgtacctcgatacttcaactcctatgccgagcgcgtggtctacaaccgactgttcgccacattggacgagcgtacggtgctcatcccggacaatctgttctacgcacacatggagctggctgacgtgttgagccagatcaagggtgccgaggcggccatcccgcacctcaaccgtatggtggcgtacgcgcccgcctacccgctctcacatctgaagctcgccatccaactggcccgcaatgaggattgggattcggcacgcgccgcctgcctgaatgctctgcgtgtggccttggaccgcgacgatgccgcgttcgcctactaccggtttgcgtacgccgaatggatgcttgaccggttcgacacagccgccgcagcctacattatgagcgatcacatcgctcccggggccattggttcgttggaaagcgaactgcaggaactggtttcccgtgcggactcgcagtgcatgccggtgcctgaatcggtggagacggccgcccatgtgcttgccacgcatgatctgccggtctggccgcataacgaagtggctgacatcgtgcgtgacgccgcccgcgtgtgcgtggatgaaggcatgttcgtgccggcccgcacgctctcggtggccgtggcccgcatgaatgacggtgaaggcgacaacatcgacatcatccaagcccagttcctgcgctcgctatccgcgtagccgcctgaggggagttgacggtatagccggccgaggggagccgagcccgctaggatagacaaccatgagcacgaatgaacaactggcatgggatttcgacgatggggatgtggccgaggtccggcctgataccggtattgcacgttttgcccctggctccgaacaatggatagccgcactgcagcccactgacgacgacgcgatacgcctcgaccgtttcgacgtgaacacgatgaccgctgaggccgccgcccgcctgtgggctcgcgtggccgcatgggtggaatccgatcagatcgcctactacatcgacgactcacccgtcagctccgacgccgcctacgacgcgcgcatgcgttgcctcgaacgactcgaagcggcgttcccctcattggacaatccacagtcgcccacccatcgcgtcggcggctccttctccaacgacttcgcctccgtgcgccaccccagtcgcatgatgagccttgacgacgtcttctccatcgaagaactcaaggattggtacgactcggtgattcgcgacctcgattggcccgaatccaagcccctgcccatgagctgcgaggtcaaaatcgacggcctcgccctgaacctcatctatcgcaacggcgtgcttgaacagggcctgacgcgcggcgacggcgttaccggcgaagacatcaccctgaatgtgcgaaccatcggctccattcccgccaacctcggcggccccaaggaagacgttccggacttcgtggaaatccgaggcgaagtgttcatgcgctgggatgacttccacaccctgaacaacgagcaggaggacgccggacgagcgcccttcgccaacccgcgcaacgccgccgccggctcgctgcgtcaaaaagaccctcgcatcaccgccacccgtcgcctgagcttctatgcgcatggtctggggcagctcacctggggggcggaccatccgcgcggcacccatgatgtggtcgccgaccagtcgcaagcctacgatctatacaccaggtggggcgtgccggtctccccgcacaatcgtgcggtgacctcattccaggagatcctggacatgatcgagtactacggcgagcatcgcggcgacatcgagcacgcgctcgacggcattgtcgtcaaggtcgatgacctgggcctgcagcgcgccctcggtgccacctcgcgcgcgccgcgctgggccatcgcctacaaatacccgcccgaagaggtcaacaccgaactgctcaacatcaccgtgcaggtggggcgtaccggccgtgtgacgccggtcgccgtgctcaaacctgtctacgtggccggctccaccgtggctcgtaccacgctgcacaacggatttgaagtcaaacgcaagggcatcctgatcggcgacaccgtggtggtgcgcaaggccggcgatgtgattcccgaattggtcggtccggtgcttgaacggcgcaaagggcgtgagggccagctgcgcgaattcgtcatgcccgagttctgtccttcatgcggcgcgaaactggcacccgccaaggagggtgacaaggacatccgctgcccgaatgtggaaagctgcccggcccagttgaccgagcgcgtgatttcgctggcctcacgcaaggcgttcgacatcgagcatctgggtgaacagtcggccatcgctctgaccaacccggaggagaaccggcctgattcggtggcgacctacgcgccgaacatcaccgaggttctggtcgcccccggcgaagagcccgaaccgtacgagccggtggaggggctggaattgccggccgcgcagaagccggtgttgtccaacgaatccgggttgttcgacctgaccgccgccgatctgcgcgacgtgcgcgtgtggcgtgaggccgcaatcgtcgaggtgcatgagacggtcggtgcgaacggtaagaagaaaaaggtgcgtaagcgtgtcggtggctctggcctgtggcatcaggtgcccgccttctggaccgcgcccacgccggccaagaagctcacggccaagcagctggccgaacgcgcgcaagaagaggccgcagtcgaatctgccggaacacagggaggtgccgccagcgagacgaccggcgcacctaccggggctgaggctccacttggtactatgccgggctttgccgcagcctcctatcccgagtatgacgtgccggccgatgcggtcatcgtgcgcgtggaccacaagaccacgcgcaccggcgtcacggatgtgccggtgatcattcggcccggcgaaaacacgcgcaagatgttcgacgaaatggacaaggcccgtcacgccgacctgtggcgtgtgctggtcgcgttgtcgattcgccggctcggtccgcctaccgcacgcctgatcgcctcggcgatgggctcgctggcagccatcgaaaacgccacgattgaagatctgacggccatcgacggggtgggcccggaaatcgccgaatcggtggtgaactggttcgccgccacccgcgagcccggcgactggcgcggcgcgactttgcgtgcttggcaggccgccggcgtgggcgtcgacgaggccgagaccagttcgctgccgcagacgctggccggcaaaaccgtggtggtcaccggttctctggaaggctattcgcgcgactccgccaaagaggcgattatcgaacgcggcggcaaggcggccggttcggtgagcaagaagaccgattacgtggtgatcggcgcaaacgccggctccaaggccaccaaggccgaggaactcggcatccccatgctgggcgaagcccaattcgcccagctcctagccaccggcaccatcgactgacttggctcccctctctgaggggagctgtcgccttgcgcgactgagggaagtagtcgtccgcaaaacggatgcgggaatgggagaggtacatccgcagcgcgtgcgcagtgtgacttactccactccctctggcatgccgccgcatcacacgctagggtagaacaggccctaaaggaggatacggatttatgagcgacgcacgtcagatcgaagccgacatctacgaacgcctgagcaaggtcatcgaccccgagctcggtcgttcggtcaccgacctcggcatgatcgccgctatcgaagccgcgcccgcatcgtcggacgccggcacttacgacgtcaccgtgcacgttgagctgacggttcccggatgcccactgagcgagaccatcaccaaccagatcaacggcgcggtcagctcctatccgggcgtacagctgctgcctcatatcgaagtcggttcaatgagtcgtgacaagctggccgatctggttgccgacctcaaggccgaacgcaagcggaaccccttcagcaagccgggcgtcaagacccgcatcttcgccatcgcctcgggcaagggcggcgtcggcaagtcttcggttaccgcgaacctggccgccacgtttgcggccctcggcttcgacacggccgccatcgacgcggacatctatggcttctcactgccgcgcctgttcggcgtgcacacgcagcctaccaatctgaacggtatgcttatgccggtcaccgcgtggggtgtgaaactgatctccatcggcatgttcgccggtgccgaccgggcgattctgtggcgcgggccgcgactgcagcgctccttggaacagttcctgtctgacgtatggtggggcgagccggacgtcctcttgctcgacttggctcccggcaccggcgacatggcgatttccgtggcccaggcgctgcccaacgccgaactcgtggtggtcaccaccccgcagccctctgcctccgacatcgccgtgcgctccggactcgtggccctgcaggtgccgatgaaggtgcgtggcgtggtggagaacatgagctactacgagcacaagggcgagaagctggagattttcggtgccggcggcggtcagcgcgtgtctgaacagttaagcgcggcgcttggctatgacgtgccgctgatggcccagctgccgctggaacccgaagtgcgcgagatcggcgaagcaggccgtcccgcggtgctggatgtcgatggcgccttgcgtacggatggcattggccagaccttccgagggttggctgaacggctgttggcagtgtgagcctgcgcagcctcacacttttgtaggcggcgctggcgtttaagtccggctcgctgctggtgggcgaatcgcttgaccacagcacccgcgacctggtggtcgaggcagtggagcgcactgccggcgtggataggctgcattaacctgcaggccattcacatggacgaggacgccgtgccgcgctgccttggtatgaatgggggatttacgtcgagcccgatgtctggcgggcacctcgcggtaaatagcggcatagcgcattatcggtgcgatgctaagaggtaatggcccatgagcggttccaatcggcgagattgcgttgccgggacaccacgacatgggccatctcgataaaacgatgccgcgtgtcggctgttctcaggtcatccgcagtgacgagaatggcgatccagccgagcagttgcaatgcgtttcgctttgccgcgtcaattcgcatttgtgccggatcggcgtgataggctccctgatattcgaacgcgacgcggcagtccggatatgccatatccaatatgacgtatgagttgccgatattcacgcgatagttggcggtggggcatcccaagcccgaatccttcagcatcccaaacagcgtgttttccggcggagaatccgtgttctctgtcatgtagggcagtgcctcgtggcatttgttacgacctatgaaccgcggactgatttccaagtaagtatcgaaatccttgcgagtggccattctgcgccgtttatcgcggctcatcaaagaggctccaatggccgcaagttcctccaatgtggagtattgggccatctgagcccacatcatgaccggcgaggcaatccagaaatgttcatagtcctttttgcggatatccagttttcccttaaacacatggaagaccacgcctttgattcgtctgcgtttgttggcactggaaacacaggcgtgcacggcatcaacagatagcgtgcaatgtcgggggatgggcgcgccgtagtagttggccgcattgatgtatcccaccagcaatggaccttttgaacggcgcgcagcatcattgcaacgttcacgttctgctcggcgtcggccgacaatatcctcatgcataaaagagctcatgatgcgaccgtaaagctgatttggacttgaatgcaagccaggcagggcaatgtggttccagcttatggagttatccacattgtctatttgcgcagagaacggttctcagtagtatctgtgcgctcaaatgaacaagaacataacaatctcacatcatcgcaaatggcgacatggcagtgattagggcatatcccatgtgcgcttcgggcgtagagaagtgcgcacagatattattgagaaccgttctctgcgcgcctactctccggtggagcctctggccacgacctcggtgggcaggaacaccgtgcgctggaacggtcggccctcgatctggtcaagcactagggtggccaagctgacgccgaatgcgtccattggctggtgcacggtggtcagctgcgggtgcatggctgtggcgtcggcgctgtcgtcgaagccggcaatggcaatatcgtcgggcacacgcacgccgcggtcgagcagataattcatggctccagcggcgatgcaatcactgccgcatatcagcgcgtcgatatgatgctcggcgaggagctcgggcacgctggcgtcggcgccggcaagtcggctacccgacggctcagccagcgagtccagcagccgcacgacggcgttgcggccatcgggccgggtccagccgtcggaccgaatgaccagtgccgggtcgaaatcgccggccatcgcatcctggaatccgagcagtcgttcgtcggaacatggcaagtacggcggtccgatgatataggcgattcgccgatacccgcgccccaacatatgctcggtgagcttgcgtgaagcgagtcgattgtcgatatcgacggtggggaaggggatggcgctgccatagccgacgccggaaatggcgaccggcacgctgatattggcgaatctctgaaatagcgggtcatctttatggaacgtgttgagaatccatccgtcggcgaatccgctggaggcgagtctggcgatgcgtgcgccggccgcaggggagtcggagatcagcgtgatgagttgataatcggcattgccgagcgtctggttggcgttgagcaggatggtgttgatattggggtcggcgattagcgaatccggctgcccgtgcaccacgaacgccacggtttgcgtgcgttggcgtaccaatgatcgggcggcgttgttcggcgtgtagttcacctgcttgacggcggcggcgatgcgctcggctgccttggccgagacatgcggattgccgttgagataacgggagacggtggcgtaggagacgccggatgccgcggcgacgtccatgatagtggccggcttacggggtatgaccatgcccgtctccttcctgtcctagggccgttcacagtgattgtaccgcgcgattttcctgatgattccgcatggcccctgtccggtgcctgtggattgccgtgccggcgtatgaaagtcggtaaacattctctgccgtaagggtgtacgaagtaaatagtaaaagagatttaccgatattaagtgaagtacgacacgcacatgatatttgtaaacctttacgtgagtgttatactccttctcgtaaacgtttacaagaaatcaccagtcaatggagacggccagatcaagcgagccgcaacggttcacaactggacgggaaggaacatcatgaagcagcagcacaacgtacgccccgccatccgcagggtgctccaggccacggccattgtcacggcagcggcccttaccctcgccggatgctcgatgggcgcaccatcctcggacaccggttcgagcgatggcaagctcaccgtctgggtcatgcagggcgatcaaagcgaggccaccatcaaggccatcaacgaccagttcaccaaagagaccggcgtcgaggtcaacatccagaaccagcagtggaaggacatcagcaccaaaatcaccacggctctgtccaccagcacccccccgacgtgctcgacctcggcaatacgcaggtcgccggcttcgcggccagcggcggcctcatggacctgaccgaccacgctgacgagttgcgccagggcgtcacctggctctccggtctggaagagcctgccaccgtggacggcaagctgtacggcattccggccctcggtgccgcccgcgcagtggtctacaacaagaagacctgggccgcggccggcatcaacgagccgccgaccacctacgccgagcttgaagccgacctgcagattctcaaggacgcgcaccaaggcgaggacttcaccccgttctatgtgccgggtgccgattggaagaccgccatccagtgggtgtgggacgccggtggcgactacgccgtgcagaaggacggcaaatgggtcagctccctgtccaccaaggaatcggtgtccggccttgagcagtggcgtgaattccagcacaagtggtcatccgaagcctcccgcccgctcgacaccgatagccccgacaccagccagctcatggccgaaggcaagatcggcgccgtaatcggcaacagcgcctccatccgcgtgattcaggaatacaacaaagacatcaccgccgacgaactcggctccttcccgatgcccggcctgagcggccagaaccagccgtcgatgatggccggctccgtgtggggcgcggcccagaagagctccaagcaggatctggccctgaagtggatcaagatcgcctccagccctgacatccagaacgactacgtgttcgccaaggacggctacctgcccaacaacgtcgaaggactggacaaggccatggcctccgacgacttcccgaccgccctgaccggcttcttcgaggccgccaagcgcaccaaggccacgcccgcctccccgcagtggaccaccatcgaaagcgacggctcgctgaccctgttcaaggacatcgccaccgacaccagcaaggccgaggcctccgccaagaagttcgacgaacacgccaacgagctgtatgccaagtgatgggttggaccatgacaagctcaacgcaactcgcgcacggcgaggccccggcctcacggccggctaagaaacgcggcaatcgcgccccggcgttcctgctgacgcccgccggcatcgtcatcatcgcactggtggtcatcccgctgggattcatgatcttcacgtccttcacggatttcagccagcgcacgctgttcaccggcgaattcgacttcgtcggcctcaagcaataccaatccgtactcaccgacccggccttctatgcggccctgctacgcaccttcggcttcaccgcagccctcgtggccggcagcgtgctggccggcatgggagtcgcccagctgatgaccaaactcggcggtgtgatgcgctacctggtcatcttcgtgctcatcttcgcgtgggccatgccgaacgtcgcatcctcggtggtctggaagtggctgttccagcccggttacggcgtcatcaactggctgctcacccagctgcacgtcttcggcgacatgaccaacacctcctggatcgacaacacctggctcgcatttctggagatctggctgctcgtggtctggcaggccgtgccatacatcgccatcacgctgtacgcggccaccacccaggtcgaccagtcctgcatcgaggccgcccagctggatggctgcagcaagctgcgctgctactggcagatcgtcgtgccgctgatctccccgagcatcatggtcatcaccatgctctcgattatctgggacttcaacgtgttcaaccagatctggctcatctcgcagggcggcccacaggacacgaccgccaccatcggcatcttcacctataagaaggcgttcgtcagcttcgaaatcggcaccggttcggccgcctccgtgctcgtgaccatcgtgctgctcgcgctgacctccgtgtacatccgttacctgctcaagtcaggagaggacctatgagtacgtcaatgagtgcaagtcctgcacaggccgtatcgcaggccgcagcgcagtccgcatcaccccgccgccgaaccaaccccggcaagatcgcgcgccgcgccggcaccactatcctcgccctgctgttctgcgtcgtatggttcttcccggtctactggatgattatcaccgccgtaaagcctcgcgatgagatcatgaccacgacccccgtgttctggcccacgcacctctcgttcgacaacttcatcgttgccgtgacccagacctcgttcctgaccaacctcaagaacagcgtggtcgtgaccgccatctcgatcgtcctgtcgatcatcgtcgcgttcttcgcgtgcgcggccctgaccctgtaccgcttccgcggccgcaagccgatcatggtgttcgtactggccatccagatgacctccggcggcatcatcccgcagttcatcatctacaaccagctcgggctgctcaacaaatacagcggtctgatcttggcgtacatcgccatggtgctgccgttcgcgatctggaacatgcgtgggttcttcctgaacatcccgaaggacatcttcgaatccgcggccgtggaaggcgcgaacgactggcagatcctgtggaagatcaccttcccgctggccgcgcccggcatcgtctcgacctcggtgttcgcgttcatcaacgcctggaacgactacatgattgcctatacgttcatgaaggaccagtcgaagtacacgctgccggtatggctgtcgtccttctcgacacccaccatgggcaccgatttcggcgggcagatggccgcttcggtgatcttctcgctgccggtggtggtgttcttcatgctcatccagcgtaacatcatgaagggcgtgacgaccggtgccgtgaaatagcgtatgccgccgtacctcaccaacgattcgtccgctgatggcggcgcgaccacgtgtcgcctgccattagcggacgaacgataataaaaacagtatgaaaggaacagctgtgcccacattcgaatatacagtcgatgccgcaacgctgtgtctcaccctgattcccgctccggtgacattggaatacacgcatggcacggctatgatcgggtctctggtgacgatcgagaaacgaattcccgaatatgccgccaccgaaggtgccgatgagacttgggaaacgctgccgattgagcagctgtccagcgagctcgagcgttactgcggcgtcaccgtccgtacgcgccgtgtccgtgcagccacaggtgaagacgacgccagcgccaatgccgccgaagatgcgcgagatgcgcgtgcgggtgcgccggcagcgatgaacggcaccgtcatatccctgggcctggattcacgattggcgcatgacgaatacacgctggatgtgttcgcctcagataccatcgccgtgcgtggcggcggcgaaagcgggctgcggtacggtctgcagacgctgcggcagatcatcgggcagacctcgcgtgccattccctgcctgcatatccaagacaagcccgcgttcgcggtgcgcgcctacagtctcgacgtgacacgcggacgagtgccgacgatggagttcctcacctggttcgtcgaccagctggccttatataaatacaatcagttccagctgtatgtcgagcatgccttcgcgttcgtcgagctcagcgaggcgtggcgtggcaccgatccgctcacggccgccgacatcacgtatctggacgagtactgcgcgcgtcgcggcatcgagttggtgccgtcgttggccacgttcgggcacatgtacatgaatctgcgcacccgtgagcatcgcgggctgggtgagttccccgaagacgccgaccgcccgttcagcttcatcgaacgcatggagcatcacacgctgaacgccgccgatcccaaggcccatgatttcgcctcgcgcctgattgaggaatacgcgccgctgttccgttcgaagtccttcaatatcggcggcgatgagacgttcgacttgggacgtggcaggtccgcgcaggacgcgccggaagccggccgcgatgaactgtatgccggtttcgtcagggatttgtgcgaaacgctcgcccgccatggtcggcagccgatgttgtgggcggacatcgcgctcgaaagcccgcgcacgatggatctgctgcccggcgacatcacgatgctcaactggatgtacgagccgcagatcgacgagagcaacatccagaccatcgccgcgcagggccgtcgccagttcgtgtgccccgcggtgcgggcttggagccggttcttccccgattatgcgggtgcctggctgaacacgtatcacatggcattggcgggtgtcaagtatggcgcggaaggcatggtggtcaccgattggggcgattacggccacgtcaacgatccgcgtctgagcgtgccgggcctgtgttatggcgctcagaacgcgtggaatccgattgagatcgatgcgcatgagatgaaccgtcggatctccgttctggtgtatggcgacgagtccggtcgcatcatggattgcctcgtccgcatcgactccgatggggtgtcattcccctgggaccttgccgtgcaggtgctggagctggaatacggttccggcaccggcatgctgaatacggatgtggcatcgtatgtggaacggtcgtgcgggggagagctcgtgtttgaccgtacgctgggatgcgccgatgcgcgccgccggctgctcctgcggaaccatgcccgactcgaacgacgccgggattgcgaccgggcgttgatcgattgcggcagtgcggttgttgcggtgctcgatggctcggcacgaggaggattgaacccggaactgctgtgggtgatgctggatgggcagcggctgttcaatagactgggcgaggaactgctggtactggctggcggcgaggacgcctgtgacaccaaggatgtgaccggccgtgcgctggatgcctcgcgccgcgcccgtcttgccgccgatctggagttgtggttcgaacggtaccgtgtgcagtggctgtccatcggccgctacgccgaattggcgcgtatcgcccatgtggtgtggtcgtttgcggacatattgcgtaggggagcgctatagggagctcacagaaattcggtcctgctgagaacaaggtgaggcttacgcgccgtcaaacgcacatggtgatttcaagaaatggcgaattgctgccattcttgcacctgtgcgtttgatgggaaatgtgcgtatgcctcacatttttgcataaagcatgaaaatgtgtgagaccggcgtatataacgtatgataaagagtcaacattcgtggtgtggtgggtccattaagggggtgtggtggtggcaggtatcaaagatgtggcggcacgtgccggcgtatcgattagcacggtgtcgtatgtgatgagcggaaagcgctccatcaaagaagagaccaaacgaaaggtgctgaaagcggcgaaagagctgggatatatgccgagtcgcactcaggagctgcggcatagcggcccgaccaaggttctggcgttgagttcgccgctccatgaatacaccgattactcgaattacgccgtgttcttctttgcgctcgccatacgcgccaagcgatatgggtatgaccttctgctgctcatgcacgaatacggcgatcaggaactgacccgggtcgccgccgaaggcatggtcgatggcatcctgctgttggatgtgctgatgtgcgatgcccgtgccgatgtggctcgcgctctcgacatgcctgtggtggcggtcgggtacccgagcaattccgatgcggtgtattcggtggatttggatttcgagcgtatgggtcgcgaggcgatggagaaggcgtatgcgctggggcatcgccatgtgctggtgtccggcgtggacagcagcgcgtatgaagacggctccaattacctggtccgttttcttgacgccgcaaagaaaaagggcgatgatctcggcatatccgtgatcttcaagccctctaccggcaatgggcgtgacgacgtcaatctgatgttggatgagacattccttgaagacccggcgatttccatgatcatttgccagacgaatgcggcgcatgtggccaacgtgctcaacggtctgcaggatcgtggattgcgcgtgcccgatgacgtttcggtgatggccgcatgcacgcatgggctgggatctttgccgcgtggtgtggatgagatgccgatgatgccgaccgaaacctgctcgcgtgcagtggatctcatgatggaggtgctcaacggcgaccgtgacgatgtcggccgtgtggagatgcttccttcgcgttatatcgcacgtggcaccatggcgaaatgctcgcgcagctgacaggagctcgggtgtttatggctattcgccttatgtgaatagtcacattttatgcagtattccgaacatgaattaacagcgttaagaatgagagcgctcacatcgaaaagtcgttgaaattaacgtcgaaatttatcgaaataatttgagaacgtcgttgccaatccgttatatttccagtggatggcatttcgactggtttcaataatcgtcgaaatgttctctcatcagtaaagaagctgaaaaggagaaaacgatgaagtcgactcgcaaatttatcgccgctggacttgcagttgcgaccatgatcggtgttgctggctgtggtggcagcggtgaagtcgcacaggaggagaaccccacctccatcaagatctggcactacgaggaatcgaccacagcgcaaggcaaggcgtgggacaaggctatcgaaatcttcgaaaaggagaccggtgtcaaggtcgaattcgagaagaaggccttcgaacagattcgccagaacgcctcccagatcctcaactccgacgacgctccggacgttatggaatacaacaagggcaacgccacgtccggcctgctcgccagccaaggcctgctcaccaatctcaacgattacgtgtccgaatatggctgggacaagatcattaccggttccttggccgacaccggcaagtacgatgagcaaggcgtgatgggctccggcgactggtacggcatcaccaactacggtgaggactgcctgctctacttcaaccaggacatgttcgacaaatacggcatcgcgattccgaccaccttcgacgagctggaaagcgcgatggccaagttcaaggagaacggcatcaccgcactgtccgtcggctccgccgagtacccgacccagcacctgtggtggcagctggtgctctccaaggccgatgacaagttcatcaaggcctacgagatgtacgacggcaaggtcgattggaattccgaaccgctcacctacgcaaccgagaagatcaaggaatgggtcgacaagggctacatctccaaggattccaccaacctcaaggctgaggacgccggccagaacttcatgaccggcaccaatccgatcttcttctccggcacctggtggcacgctcgcttcaaggaagaggccgccggtctgaatgtttcctactccaagttccctgacaccaagaagattgtcggctcctccggtaacgtctgggtcattcctcagaactccgccaagaaggatctggctgccaagttcatcaacatcaccctgagcaaggaagtccagaattacatggccgagcagggtggcctggccatcaactccgacgtcgattccatcaaggatgagggcaccaaggaattcgtggcccagttcgatgacgccgtcaaggaagaccagctcggcttctacccggattggccgacctccaccttctacgatgagctcaatgcctccctgcaggagctggtcaacggcaccgccgacgtgaagaccgcgctgaaccagatgaaggacaactacgacaagggccttgaatcttccggcatcgtcgtcgattagcattcgattctttcctcttcccttcctccaataggcgaacgaaggcgtgtggtcggtttctccttcccttgccgccacgcgtctccgttcgtgtcccaacaatcttgcatgctctacgtttagaagtgtctgatgaaaacaaagaccaataaagccaagcacccggaagaaaccgcaatgtcgcgcatcccgggcagcccttcgaatcgtttctggttgtacctgattcccggtgtggcaatgctcacctggatcatcatcgttccgggcatctggaacatctatctgagtttcactaactatcgcggcattaggccgccggtctgggccggcctcaagaactgggtccgactgatgaaggacgataccttctggatttccttccgcaactcgatctggatgatcatcgccatggtggtgatcccgattctgctcggtctgatcctctcctcgctgatcttcgacgttgtgcagaagaagttcagccccaaggccgcgtccacgatgcgcgccgtctactacttcccgcagctgctgcctatcgccatcggctccctggtcatgggttggattttccgagctgagaacggtgctctgaactcattgctcagtgccataggccttggaagcctgcaacatgactggcttggcaaaccggatacggccctgatcttcctgatgctcatcatggtctggattcaggtcggctatccgttggtcatcttcatgtccggcctgcagcgcgtcgatccggaactgtacgaggccgccagcctcgacggcgccaactggtggcagcgcttcagggccatcaccctgccgtccatcaagccggagatcttcgtggtggccctcacctgcaccatcgcggcactgaaggtgttcgccccggtgtacatgctgaccaagggtggccccggcactaccaccatcgtgccgtcctactactcctacacccagttcttccaggtacagcaggtcggctacggcgccgcgattgcgaccgctctgacagtcgtcatcattatcgtggccatcgtgttcaccaaccttcagcagaaggtcgaagctgaggacggagagtgattgaaaaaatgagcactatgagcgcagctgaattgaagaaaatcgccaaagtcaagaagaaccgcaccgccggcgactggctgatcatcgtactgctgattatcggcggcttggtgatgctgttcccgttcgtcgttctttgcctgaacgccttcaagacttcggccgactacaacgccaacggcccgctgtcctggcctgcctcgttcacgcttgatggcttcatcaagttctggacccgcgtcaacttccccgaaaaggtgtggaactcgatctggacctccggcctggtggcaatctttgccgtggtgctgtccgtgttcaactccttcgccctcggcatcggccgagtcaagggccgtcgctggatcattctgttgatcatgctcgcgaacatgctgccgcaggaagccctcctgtacccgctgtacatcatgttcaaggaaatcggcctgtacaacaacccgtggtccatcgtcatcatcttcaccgtgatccaaagcgcattcggcacatacctgttgtcgtcggtgtacggcaccttcccgaaggcgattctggaagcggccaccatcgatggcgcaagccgctggaagattctcaaggatatcgtcttcccgatttcgaagccgaccctggccgtcatgctggtgttcttcttcatctggacttggaacgactacatgattccgatggccttcctgatcgacaactcctcgcagaccgtcccgatcgccatcgcctcgctgtccggcgaccgtctgatggatgtgacgaccacggcctccgcctcgctgatcagtatcgtgccgaccttgatcttcttcctcctcttccagaggacgctgtcgaacggcatcaccaccggcgcggtgaagtaaggtcattcgcacaacaggcaattcaatcaacaagcagtacatattgattttggtttcggccgccttgttccctgggggtcgaaaccacctctccaccaaggagcagcaacaatgaagttcaccaacggctactggatgattcgtgacggcgtcgacgccctctacgctcgtgaagcctacgaactggcggcggatgccaccaccgaaagcctcaacgtcctcgccccgacctccgtggtgcgcggccgatacgataccctgaacctgcccacattcaatgtggacatcaccacacctgcggaaggcgtgattcgtgtgcgtgccgaacactggcagggtgccaccgaataccccggattcccgctcaacgccgacaagcccggcagccgggattacgtgactgtcagggctgacggcaatggcgacggcgaagtcggcgtcaatggcgcggacgtcacgctgaccaccggcgggctcacggcgaaggtcgtcaagggcgcgccttggaaccttgccttccttgatggggacggcaaggtgctcaccgagtcagcaggcaagtcgctggcccggttcaatcttggtgccggggcgaacgtcaccgcccagccggtcggcgaattcggtgtgagcatggacggctccgcccatgacgagtccgacgtgttcaccgccatccagctgcatctgtcggtcggcgaagacgtatatggcctgggcgaacgcttcggcgcgtacgtcaagaacggccagagcgtcgacatctggaatgaggacggcggcaccgcttccgaacagggctacaaggacatcccgttctacatgacctccaatgggtatggcgtactggtcaacaaccgcggccacgtctcctttgagatcggttccgagaacaccgaggccgtgcagttctccgtgcccggcgaggccatcgacttctgcgtgatctatggccccacccccaagcagattctcgaccgctacaccaagctcgtcggacgcccggcgaatgtgcccgcatggagctacggtctgtggctgaccacctcgttcaccaccaaatacgacgaggccaccatcaactccttcatcgacggtatggccgagcgtgatattccactggccgccttccactacgactgctactggatgcgcgagttccactggtgcgatttcgagtgggacaagcgtttcttcggcgacatcgaatccacgctgaagcgcctgcacgaagacaagggcctgcacatctgcgcttggatcaacccgtacatcggccaacgcggcgaaatgttcaaggaaggccgagacaagggctatctggtgcgcaagcccaatggcgaagtctggcagaccgacttctggcaggccggcatgggcttggtggacttcaccaacccggccgcctgtgaatggttcaaggacaaggtcaaggtcctactgaatcagggcgtggacgccatcaagaccgatttcggcgagcgcatcccgcgcgacgtcgtctggtatgacggctctccgaagctctccatgcacaactggtacacccagctgtacaaccaggccgtgttcgaagccatcgaagaaacctacggcaagggcaacgcctgtctgtatgcgcgctccgccaccgtcggcggccagcagcagcccgtgcattggggcggtgactgcgagtccaccttcaacggcatggcccagtccttgcgtgccggcctgtcgctgacctcctccggcttcggcttctggagccacgacatcggtggcttcgaaggtgcgttcccggatccggccgtctacaagcgttgggtggcgttcggcatgctcggctcccactcgcgactgcacggttccaccgtgtaccgtgtgccgtggctgttcgacgaggaagacgagaagaacggcgtcgcattggtgcccggccagaccgccgtggatgtggtgcgcgagttcaccaagctcaagcttgaactcatgccgtatgtctaccagcttggcctgcagcctcatgtgaacggcaccccggtcatgcgttccatgttcgtggagttccccgatgacccggcatgccgcacgctggaccgccagtacatgttcggtccgtccatgctggtcgcccccgtgttcacctactccggtgaggtttcctactatctgccggacggcgtgtggaccaactggctgaccggcgagaaggcgcagggtggttggcgcaaggaaacccacggctacgattcgattccgctgtgggcgcgcgatggcagcgtcatcgtcaccaaccccggcgaaaccaagccagaccgcgtgtacggtgagaacgcgctggtctccgtgttcgtggatgatgtggagaccgccgaagccgttattacggaaatcgacggttccgccgtaaccttcaccgcgcgccgtacgccggctggcatcgaggtcgcgagctccgatggccgtccgttccgtgcacgtttgggcgcgtctggcgatatcgtcgacgttccggatggcagcgtgatgctgtgacgcgtgctgtgcgtgacgtgcgtggtgcatgtggtgctgtaacacttcggtgttgcggcaccacgcttttgcgctgatatagggatttgtgctagtcgaatccgcgaaatgttcagtaaatgttcacgtagcgaaatcggcatagaatgcgagcaaacgcataacggcacggtgctgttcctgcgtacgccaacgccaggcgaaccgccggaaagaaggggtctccatgattgagacagcggacgatatcaagacgattgcgaacgtcggcacgggaacaatgggccatgcgatcacgttgcagttcgcgctggccggatatccggtgcatctggtcggccgcagcgaggcctcgctggagaaggcgatgaaggcgatccgttctgatgccgaggacttcgccgaagccggactgctcaaggccggcgacaccgtggacacggtgctggcccgcatcaccggttacgccgactatgcgagcggcgtggcggacgtggacttcgtcatcgaatccgtggccgagaaccttgacgtcaagaagtccgtctgggccgaagtggagcacgccgcccccaaggacgcgattctgtccacgaacacctccggcctgagccccaccgcgctgcagtcggtgatggggcaccccgagcgcttcgtggtggcgcacttctggaaccccgcgcagttgatgccgctggtcgaagtggtgccgggtgaaaagaccgatccgaaggtggtggacatcaccttcgacctcatggccaagatcggcaagaagccggcaaagatcaagaaggaatcgctgggctttgtgggcaaccgcctgcagctggccgtgttgcgcgaggcgttctacatcgtccagcagggcatagcggacgcggccaccgtggacgacgtgatgaagtacagcctcggccgccgctggaacctggtcggcccgatcgccagcatcgacctcggcggactcgacgtgttctacaacatcagcacctacctgttcgacgacatggacaacggtgccggcccgagcccgctgctcgccgaaaaggtcaaggaaggcaacctcggtgccaagaccggtcagggcttcttctcttggcagggcgaggacggcaagcgcatcatcgaaacccgcaacaaggccctgctgcgtgcgctgaaggacgatgccgcggaagcgtaaagcgcgagcgacgaattctcgcgtaacgtgtgctacgatggaaggctcccttcggggagccttcgttgtgcttgcgttgttcttcggtccaacttttcgacatgcgtatacgttgttgatagcgacaattgcggaaaacgcttacagtatgatgtgcacacggacaacaagccgatgattgcaaggagcggtgacgacgatgacatccacagaacacaatacgcgagccgacatgttggcccacatgggcagccttcagcaggccgcctacgtgcgcccgatcgagtaccaggagggccgtgcccacggcctcaaggccatcgaggtgaagaacggcccgctacgcttcgtatccatggccgaccgcgccctcgacgtctgccagttcgaataccgcggcgagaacctcaccttcctgtccaagccgggcctgaacggccgcaaccagttcgacaccaacgggctggaggcgcagcgctccatcatgggcggcctgttcttcacctgcggcttcgagaacatctgcgcgccgtacgtcacgcctgagggcggcaagtacccggccggcagcttcccgatgcacggccgcatccgcaccacgccggccgagcatgtgggctccgacgcccactggaccgccgaaggcgactacgtgctcgaggtctccggcgaaatgcgcgaggccgaactgttcggcgagaatctggtgatgcgccgcaagatcaccagcgtgtacggccagccgtcgatcacggtcgaggatgaggtgaccaacgaatccttccgcgacgagccgctgatgtggatgtaccactgcaacttcggctggccgttgctcgccgaaggcgccgaagtcgtgatccccagccgcaaggccaccccgcgtgacgagaccaccgcagccgacaccacgccgtggaacgaaatccaagcacccgaggcgaaccgccccgaaagcgtgtacctgcacgagctcgccgccgacgagaacggccgcagcttcgccgccgtggtcaaccgcaagctcggacttggagtcgtcatcgacttcgacgccagcctcttcccatacttcatggaatggaagtcgatgggtgcgggcgactacgtggtcggcctcgaaccctcgaactccagcgtccacggccgcggctggcacgagcagcgcggcgacctgca

SEQ ID NO: 1103 - DNA, 43511 bp, Unknown
  R13_10m  MAG No. k141_18018
cgcgtcgggcaacgcggcatcctgtgaaacgcgaaccaagcgacggcgtaagccgtgtgagtcttggagctggcctcggcaacgaggccatgcagatgacttcgctctagcgacaagctaaaacaaagtcatctacaacggttgcaggaataaggaattcctccctgcaagcccatcaccgagacgtgcgttagcactccatgccgatttcggtgaatcagtgcaccacagtcaccgtgcattcggcgaagttcacgatctgacgggacaccgatcccaggaagtgcgcgtccagaccggacaggccgcgcgaaccgaccaccagatggctggcgtaccgagatgccgcaatcagccccttggacgcgggaatatggaaggcattcgcgctgaccttgacaccatcgggaatctcggccttggccatcagcccggcgagaatctcctcggcgcggcgctgaccgaccttcaccggtgccacggcgttctcatagcccggaataacgcccaaatccttgagctgccagcagaacatcacatgcagcggcgcgtcgtgcagtcgtgccttttccagcgcgaagtcgaacgcgcggcgggaagtctcggaaccatccacaccaaccaccaccgggcggcgagcctcctcgaccaccggctgaggctgcgtgtagtggaccggctggtctcctggcgtcagggcattggcgatggcatcggtcacggtctcatcctcgctgccggcaatgcgcaccacggtcaccggcacttcggcggcctcggccagcgaagcggacagggaccccatgaaccagcgggccacacggctcagcgagcggcggccgaccacgatctgctgcgcatcatggccgatctgcagcagggccgaagtgccggaggccttcaccgaggtgagcttcagattcgccggatcgaagtcgatgcctgcagcggccttgtcgacccacacacgcagctcgttggcaatatcgtggcggaccttggcccaggcctcgtcgctgtccggttcggaccccatatcccaggaatgcgtccagccaaacacggcgttgacgctctgaccggttaacgaagcctcctcaagcgcccacttcagcgcggcaaaggattcatcggaaccatccacgccgacaacgatgtcgggcttggttgcagcttcactcatttcgagcctccttgtaatcgactacgggtgaatctagaaccagcatatcgttttcttctcctctcacggcgcaattcatggaatccgatgaataaacgtcatcgtgaatcggtagagtaagacggaatgtcaattgaggaaggacaagcatgttcgaacggtttaccgaccgtgcacggcgcgtgatcgtgttggcgcaggaagaggcgaggacccttcagcacaactacatcggcaccgaacacctgctgctcggcctgatccgcgaaggtgagggtgtagccgccaaggcactcgcctcgaagggcgtggagctggatgccactcgcaagcaggttgaagaaatgatcggcaagggcaacgcggctccgaacgggcacatcccctttactccgcacgccaagcaggtgttggagttctcgctgcgcgaagccctgcagctgggccacagctacatcggcaccgagcacatcctgctcggcctgattcgcgaaggcgaaggcgtgggcacccaggtgctcatcaagatggacgtcgacctgggtgagctcaggagcgcgaccatcgatatgattcgcggcaactccggcaccggcaccggtgacggcaagggcgatctggccaacgccggcggcgtgacagacaagcagaacaagtccggttccgccattctcgatcagttcggccgcaacctgaccgtcgaagccgctgaaggcaagctggacccggtcatcggccgcaccaacgagatcgagcgcgttatggtcgtgctctcccgccgcaccaagaacaacccggtgctgatcggcgagcccggcgtgggtaagaccgccgtggtcgaaggcttggcccagaagattcaggccggcgacgtgccggaaaccctgaagggcaagcaggtctactcgctggacctcggttccatggtggccggctcccgctaccgtggtgatttcgaggagcgcctgaagaaggtgctgaaggaaatcaagacccgtggtgatatcgtgctgttcatcgatgagatccacaccatcgtgggcgccggctccgccgacggcgcgctgggtgcctccgacatgttgaagccgatgctggctcgtggcgagctccagaccatcggtgccaccactaccgacgagtaccgcaagtacatcgaaaaggatgcggctctggaacgccgtttccagccgattcaggtgcacgagccgaccatcgccgagaccatcgagatcctgaagggcctgcgttcccgttacgagaaccaccaccacgtgaccatcaccgatggcgcgctgcagtccgccgccgagctgtccagccggtacatccaggaccgcaacctgcccgacaaggccatcgacctgatcgatgaggccggtgcacgcctgcgcatcaagcgcctgaccgccccgcctgagctcaaagaactcgacgagaagatcgccaagatcgccgccgacaaggacgaggccatcaagggtcaggacttcgagaaggccgccgaactgcgcgacaagcaggagaagctggaagccgatcgcaagcagaaggaagactcctggcgcgaaggcgagtccgacgtcaagatggtcgtggacgaggacgtgatcgccgaggtcatcagctccaccaccggtatcccggtgttcaagttgactcaggccgagtccaagaaactgctcaacatggaagccgaactgcacaagcgcatcatcggccaggacgaggcggtttccgccctgtcccgctctatccgccgtactcgcgtgggtctgaaggacccgaagcgcccgtccggttcgttcatcttcgccggccccaccggcgtgggcaagaccgagctggccaagacgctcgccgaattcctgttcgacgatgaggacgcgctgattcgcgtggatatgtccgagttctccgagaagtacgcggcttcgcgactcttcggcgcgcctccgggatacgtcggctacgaggagggcggcgagcttaccgaaaaggtgcgccgcaagccgttctccgtggtgctgttcgacgagatcgaaaaggctcatccggacatcttcaacacgctgctgcaggtgctcgatgacggccacctgaccgacggtcagggccgcaaggtggacttcaagaacaccatcatcatcctgaccaccaacctcggtacgcgagacatcgccaaggccgccaacacgggcttcaacctgggtgctaacaacgagtccagctaccagcgcatgaaggaccaggtcagctccgaattgaagcagcagttccgcccggagttcctgaaccgtctggacgacatcatcgtcttcaagcagctcaccgagccgcaggtgcgccagatcgtggatctggacgtcaagcagctcaacgaccgcctgttcgaccgtcacatgtcgctcgaactcaccgacgccgccaaggacctgctcgcgcagaagggcttcgacccgctgctaggtgcccgtccgctgcgccgcgtgattcagcgcgacatcgaggacgccatctccgagaagattctgatgggcgatctcgaagacggtcagcgcgtgattgtggatgcggaaggcgagggtatcctcggcgaattcaccttcaagggggagaagttcgaggagccggccgccgccgataagcccgccgaagacggtgccgccaccgatgccgaaacttcgtccgaagccggcgcctccactgatggcgagactccagccgacgccactccggccactgaaccagccgaatccgctcccgccgattccggcgacgctccgcagaagtagtccgtttcgatagcgtagctagcgcataccagcaaagctccccttgacaggggagctgtcagcgaagctgactgaggggtagacctacgcacacatgatgtgcacgtttttggtctacccctcagttgcctctggcgatagctcccctgtcaaggggaactactgtttgttgtcgggttattgcagcagggcgagtccggtgtcgatggtctcctcgcgggtaaacagcgtgcggccggcgcgcaccgaacgcaataccgagcagcgctcatacacggcgttgaacacactatcggcgtccagcacaatgaagtttgctggcttgcccgtttccaagccgtacatatcgcgcaggcccaacgtagtggcaccgttgacggtcaggaacttcaacgcatcgtcgatttcttcaaagctcatcatctgtgccaaatgcagcacataatcaagaatgagcatcatattgccattgcccagcgggtaccacgggtcctgcattgaatcctggcccaatgacacattgacacccgcctcagtgagctccttgactcgcgtgatgccacggcgcttggggaaggtatcctgacggccctgcaaatacaggttctcggtgggggcgcaggcgaagttgatatgcgccgccttaagcagcttggtcaggtggaagaagtaggcgttgtccgccgatcccagcgaacaggtgtggctggcggtgaccttcgggccaatgccagccttatatgccaacgccgaaagcagctccacgtaacgggaattcggatcatccgtctcatcgcaatgcacgtcgatgagcttgtcgtatttcgaagccaactcaactaccgtgtgcatggaatgctcgccaaactcacggcactgttcgaaatgggggatgccgcccacgcagtcggcacccatcttgagtccttcctccaccagctcggcccccgattcgccatgcgggccctcgtaggagtacatgccctcctgcgggaagctgacgatctggagagtgaccgtatccttcaattcctccttaagctccagcagcgcctttaatgaggtcaggttcgggtcggtcacatcggcatgggagcgaatgagctgcacgccatgcagcatttctttcttaatgccgattttcgcgcgctgcttgatctcgtcgaccgtcaagtcggacttggtctcactccatcgctggatgccctcaaacaaggttccgctttcattcaccgcaccgggcttgcgggccgtgaatacgtaatcaaggtgcagatgcgtatcgcagaacggtgggcagacaagtttgccgcccagatcgaccacctcaatggccgccagatcaccaccctgagcctcatattgttgcgcgagtccggggccgaatgcggtgaacacgccatccgtgacgagaatgtcctgcaatggcagggtgcttgcagccgtgctgccgggttctccggtggcgatatgtgcgttggtgaacagtgtggtagtcatcgtcgctccttcaactggtgtgttgccgaacggttacgtgaaccgactgcccgcgtaaccaactgaggttattgtcaacagcacgctttgcggtgaggttaaccggaacgaccggtgttccgcgggggaatggacagattgtatgactgtatcgattcgcagtgcgcttcataacacgcagttcaaacgagccgatcctgtggtggaggtcgaaggcaaagacctcgatacgccagtgcgatgggtgtttaccaacgagcgagaggatgtctccagtttcctttcgggcggtgagatgctgattatcgagggtaacgctctgctcgccgccgattggcacggcacgttaggacaatatgtagcaagcctggcgcaggctggtgtcgccgctctggtggtcgaactggtggagggtgtggtgcggatgccggacgaactggtgtctgcggccaggctgcatgggttgacgttgattggtctgaaatctcgcgtaccttttgtcgacatctgtcagagtgtcaataccgctatcgtgcacgaacagatgcacttgcaattggaggtggacacaatgtccacttcattacgtgagggattgtcccgtaccggcaatatcgaggctgtggccgaaaccattgcgtcgctgttcggcgaaagcgtcgccattttcgatggtgacggtctgttggccgctcgagcgggtcgtgcgttcgatgccggcaacgaatcgagcgccgtcatcgcccttgaaagtcgctcccggccggtgggagcattggagatcacgcaacgcaccatgactttcgacgccacgatgcgtcgggccatcgccaccatcgtgtctccggtggccgccctctatattgacggcggcgcgcgcatgggcatgatgcatcatctgagtatgggcccggccgacggcgtgcacgtcaatacatttgaggcgcaggaagcgcatgcgatgctcgacgcgctgggttttgccggatcatgcatctatatgccattcgcttttcggttcagatcggtggtggaaggcatcaaccatgtatcgacgatggtcgaacggttcgaagaacggtcgggatgcgccgtctcctgcatgctggaaggtgacttgatggtcggatggtgctccaccaccgattcctcagacggtgcggccgcattcggacgccattgcatggatgcgcttgccgtactggaaggcgacggtgtgtacgtggtgcatggccgagtggcattggacacggtgacgctggtcgacgggttcgcggtattgcgtgacatcgccaatcaggaaccggcatacgggcgaatcgtaagtaccatgtccgcactcgtcgaccgtttcgtcgcatcctctgatatggacaaggcgatgcgcatgctcgtggtgcagaccatcggattcgaggtcgccgcctctccgttgttgctggacacactgtgcgtctgcttcgacaacctcgatagcaaaaccggcgcgtgcgagcaattgggtatcagacggcaaaccctgtacaaccgactggacaaagtgacacaaatggtcggcgtcgactataacgacaaaccgaactggtcgatgctgctattcgccgccaaactcacgaaatcatggcaagaacagcatggtgaataatgcgccagcaccactgggcaacctgtccacttctacgccgaacgggttaatcgacgattcacgtttcagcaaatactcaagggcatagtcgaggctatcgcggcgctggtcgacctgctgcgaaacgaattcccacttgaatcccattcagtcacacgaacagcacatccttgaaaggacggtgacatcatgagttccgcaacgattactacatctgcacgactgatgaatttcacccctcaaactgaagaacaggccatggtcaggaaagtcgcggtatcttccttccttggcaacttcatcgagtggttcgactacgcctcctattcgtacttcgccaccaccatcgccctggtgttcttcccaaccgacaatcacaccgtcgccatgctgcagaccttcggcgtgttcgcgctatccttcatcctgcgtccaatcggcgcactgttctggggtagctacggagataagaaaggccgtaaagccgcattggcccactcgattatgttcatgtccggtgcgagcttcctgattggctgcctgccgtcttactcggtgatcggcgttggcgcgccgattctgcttctgctgctgcgcatggtgcaaggcttctccgcttccggtgaatatgccggtgcggccacattcctcggcgaatatgcacccacctcaaagcgtggcatctactgctcgctgattccggcgtccaccgccatcggtctgctcgctggctccacgctggccacgctgatgaccgccaacatgaactccagcgcgatggtcggttggggatggcgtgtgccgttcctgctggccggcccgctcggcctgattgtgctgtacatccgtaccaagctctccgattcccccgtgtaccagtcaatgaacgatgctcttgagtccaagagcgccgcctccgctgacggccaagtcgtttccaagagcggcatgttcgccccgctcgccgaactcttccacaaccatctcaaggccctgatcatcagcttcggagcctgcgtgctgaatgcggtcggcttctacaccgtgctcacctacctgccgacctatctgtctgacaccgtcggcatggacgccacccagtccggcaccatcaccaccatctgcttggtcgcctacgtgttcatggtgttcggcatgggccacatctccgacaaattcggccgcaagaaggtgctcatcggtgcttgcgtggcgttcatcgtcctcaccgttcctgccttcctcatcctcaacacctcccagttctggcccgtgctgctggttgagctggcaatgtgcgccaccctgaccgccaacgacggtaccctgtccagctacctgaccgagacgttccccacctccgtgcgcttcaccggattcgcgttcagcttcaatctggccaatgccatcttcggtggtacggcctcgttcatcgccactggcctgattgccctaaccggttcatccatcgccccggcctggtacatggtgggtgttgcggccatcgccttggtcgcgatgattctttcccatgaaaacaccgacaaggatctgaatcacatctgatctcctcagctccggctcctttcccgagggagccgggcgcattcattgaccatccaatccaccaccaacccaaaggagtactgcaatgggtagcaaccgccgtatggaccacatgacctggccggaattcaaggaggtgaagactcatcccgtcatcgtgccgatcggttcgaccgaacagcacggccagcatctgcccatcggtaccgacgcggtactcgccacgcgggtcgccgaagatctggcggaacgcatcgacggcaccgtgatgcccaccctgagctacggatacaagtccaagccgctctccggtggcgggccgctgttcccgggtactatcgacatgaacggcgtgacagtgatcacccaaatgcacgacgtgctgagcgaactcatcgccgatggcttcaccaagatcgtcgtcatgaacgcgcattttgaaaacgaggcgttcatcgtcgaggccatcgacctggtcacccgcgaaaccgggggagtggccaccatcgtggaaaccaattggtgggacccggttccgcagtcggttatcgacaaggtgttcgatggattggtgttccccggctgggcattggagcatgcggccgtcaccgaaacttcgttgatgctccactacgcgccggaactggtgcacatggaccgtatggtcgaggaagccggtgccacggcgaaatcctatgtacgctacccggtgcgccaaggtgacgttcccgctcacggcggactcgccaatccggccggctcaagcgccgaacgcggccgcctgattgccgaggcgtgcgtggatgcagtagctgagatctgcgtcgaggaatttgccgagtaatctccccttgccgacgcattcgtagtgacacgggttgcaaaggcctgaccctgatagtacggggtcaggcctttcccatcccaagacgccgctaagaattcacctgagagtcgccttcctaggcatggccgttcaatcgacgatcctagcgtgactggtgtgagcaggaatatgaagaaccggcggtgggccggcaagcgatcggggatcgcttttggtgcagtagcgcttatccttacggctctggtggttccttatgcttgtgcgggaaccacgggagccgttcctttttccggcgataatccatcttccggcacccgtacggtgaccatcgccgacatcactgattttcacgggcatatcgaacgtggtgcggacaacgccaccgccttcaccgtggccgacagccataatcccggcaatatgatcccggtatcgaccggcgatttggtgggaggttccccgtatgagtcggcggtggagaaggaccaacccacgctggacatggccaaagcgtggggattgacgatttcggcggtaggcaaccatgagttcgaccgcggtgtcgccgatttcaacaatcgcatcgctgatcccagcaatggcatcgactggctgtgcgccaacacgtctgccgccagtaagtcgcctgacggactgctgagccatgtacgtgactctacgattcgaacggtgaacggcaagcggatcggtttcgtgggcgcccttactgatgcgctcggctcggtagccactccgcagattacgcgtgatgccgatcttgacgaacgggcggtggacgcgatcaatcgcgtggcccgtgaactcaaacgctccggaaaggtggatgcggtggtggccttgctgcacgccgatgcctcagccgccgccgatattgggcgagatgttgatgtggtatacaccggccacaatcacgcgatcaagcgtggtacgaccgctggtggcgcgcctatttacgaggcgggcagcttcgggcggaatatggccgtgcaggatttgatcatcaccggtgccgggcgtcgcgccacggtgcgagtggccgatgtggacctcggcaatggcaccagccatacggcggttgacggcgtgctgggcgtggaagggcttaatgcgcatccggcgcaagccgcttggatgtctgccggtgctgaggcgaacgatgaggtatcgcgcgctcagcatatttaccaggcggcggcaacatattcgaatcatgccggcaacgcggtgattggcaccttggcctccggcgtgaatttcgacaaacaaggttcggataagcacgggaatacggtcggtgtgctggtggcggacgcgaaccgcgagtcaatcatgaagcatgtgtatgccggaaatcgtttgccggtaatcggattttcgaataatggcagtctgcggactccacggcttgatatgaatggcgatggcaaagtcaccgtgcgcgaggtggatagtctcatggccttgcagttcaaggccgcgcatgagacgctcaccgggcgcgatgtgaagagagtgctcgccgagcaattccaccgtgacgatgggcgactggagcggcgctggctcggcatctcctcgaacgtgacgtatcggtatgccgaatgcggtacgaccggtgggagcggcaatgccgatgccgccgctgataccaacgctgacgctgacgagtgtgctgccgacgaacatgcggcggttcgtatcgtgaacctcgccgttgacggtcgaccgattgcggacgatgacctggtgattatcgcatccaattcatatctgcttcagggcggcgacagttaccccgccttccgtgccggaaccaattacggcgagctgaatatgccatacagccagccgttgcatgaatatctggccgcacatcaagggctcacggcaattgttgcagcaccggtagggactcaggcgtaagacaccaattgctgggtgactgaggaactatggggtggagttatgagtatagggcagaagaaaacggcataaatatgacgaagctcccctcgctgaggggagctgtcgccgtaggcgactgaggggagcttgcggtataaccgtaaactcccctcagtcagccttgctgccggcttccctcagaggggaacctggcacgagacccttacttgatggcgttcagccactgctccttggtggccttctcggcttcgagcttggccttcttcttcgggtcggattcggccgcgatcttggcgtcgagctcggcgagctgggcgttgagctgctcctcgaagctggacttgcgggcgtcggcctccgggtcggtctgcttccaagcggcatcctcgatggccttgatctgcttgtcaacggcgtcgagacggttctcgatgcggcgcatatcgtcacgcggcacgtaaccgatctgatcccactcttcctgaatcttggccagctcctggcgggccttcttggcctcggcgtcggtcttcaccggcaccagagcctcggccttgaccagcagagcctccttggcagccagattctccttctcggaggagttgatctgatcgcgatcagcctgacgagcgttgaagaaggtgtcggcggcttcgcggaacttggcccacagctcgtcgtcctcgttacggccagcgcggccggccttcttccaacggtccatcagatcgttgaacttgcgggaagtctcaccccaagcggtggaatccttgagctcattggcctcggcgataatcgcttccttggcttccttggcggctgtacgctcgttgtcgcgagcctgagcccacttgcggcgagcctggttgaaggtggtgcgggcggcggagaagcgcttccacagcgcctcggcctccggcttgtcgatgcgcacggtggtgcgctggtggttctgccactcgtcgaacaggttacggaacttgtcggcggtggagcgccagttggtgttgtcgcccagagaagcggccagtgcttcagccttctcgacaatggcggtgcgctcggcgacggccttggcctgagcggccttgcgcgcttcggcgatctcggccttcttggcctcaccggcggccttcagttccacgtaacgggccttgagggccgcgaggtcgcccaccaccgccggttcggcggtttcttcgcccagcagcttcacggactcatcgatttcacgggccttgatgttcggggaagccagacgggtggccagcagatcgagcttggccttgagatccaggaaacgacgggcgtacagtgccaacgcctcttccttggagacatccgggaactggcctacctcgcgctcggcgtcgccatccttgacgaagacggtgccgttgtcatccacgcggccgaaggcctcggcggccttgacatcagcctcggaataggtggcggtggcggcggccggggcggcagcgcgcggcttggccgacggagtcttcttggcgaaggcggcgggggagggcgcgtgcggtttcggcatggaagcgggggacggagtcggcgccggcgtggccgcgctggcttcgggtgcgggtgtcgttgcctgctcttcgggcgcagcggtgtttacgggttcggtgacagtttcgtcggccatggccagctccttaaagcgtagaatgcataagcgggagcgtctcccatcccgggcgaaccaggaagttttgacgcaaccctcacctattatattgatttcgtggctaaaggtgcatcaatatcaggattcccggagtggctcccctccgaacgtgttgtggagcagcgtgttatcgatacgcttcgtaaggtttttgagctcaacggcttcatcggcattgagacgcgagcggtggaaaccggcgcttctttgctgaaaaagggcgagaccagcaaggagatctacctgctgagccgtttgcaggaggtcggtcatgaatccgacactccgattgaagagcgtttgggcctgcatttcgatctgaccgtgccgctgagccggtatgtggtcgagcactcgggtgcgttggcgttcccgttcaagcgctggcagattcagaaggtgtggcgtggcgagcgtccgcaggaaggccgcttccgcgagttcgtgcaggccgatatcgacgtgatcggtgccggcgacctgcccgaccactatgaagtggaactgccgctggttatggtctccgcgctggaagagctgcgcgcgtatggcctccccaaggccaccgtgcacgccaataaccgcaagctgtctgaaggcttctaccgcggccttggcctgacggacgtcgaaggcgtgctgcgcgagatcgacaagctcgacaaaatcggtgccgatgaggtggcccgactgctcaccgagacctgcggcgccaccgaagcacaggcacgcgcctgcctcgaattggccgagctcaccgcctccgacggtgccgagcttgccgccaagttcgatgcgctgtgcgagtctcacggcatcgccaaggattccgaggcatacacgctggctcgtcagggacttgataccctggccatgatcgtcgacgaggccgccgccatccgccccggttccgtcatcgccgacctgaagatcgcccgcggtctcgactactacaccggttccgtctacgagaccttccttgacggtgccgcatcactcggttccatctgttccggtggccgttacgacaatctcgcctcccagggcaaccgcaagtacccgggcgtgggcctgtccatcggcctgagccgactggtcagctacatgctgcacgctgccggcgcgcacgccaaccgcgtcagcccggccgccgtgctggtcgctgtgtggaatgaagaggaccgcccggccgccaaccgtattgcgaaccaactgcgtgcgcgcggcatcgccaccgacgtggcacccaccgcggccaagctcggcaagcagatcaagtacgcggacaaactcggcattccgtacgtgtggttcccggccaccgctgccgaaggtgcggaaggcgcagagcccgctggcgacgaggtcaagaacatcgtcacgggcgagcaggttgccgccgattgcacgtcgtgggagccggatactgtggttgcccagcaaaccgtcgaaatctgacgtattcgcgcgaaaaatcgaggagaaacaagataatgagccagacggcttacagaacacatcatgccactgaagtgaccgaggccctggtcggccagaaggtcacccttgccggttgggttgaccgacgccgtgatcacggtggcgtggccttcatcgaccttcgtgattcgaccggcctcgtgcaggtcgtcatttacgacgaggatatggcccgcccgctgcgcagtgaattcgtgattcagattaccggcgaagtgcgcctgcgcccggatggcaacgagaacacccatctggccaccggcaagatcgaggttgtggccgagaccatcgagatcctcgccaagtccgacgccctgccgttccaggtttccaccgctcttgagaatgagtccgagaacaagctgccgggcgaggacgtgcgtctgaagtaccgttacctcgacctgcgccgtccgtccatgcagcacaatctgaagctgcgttccgacatggctaaggccgcccgccacgcgctggaagacatggacttcaccgaggtcgagaccccgaccttcattaagtccaccccggaaggcgcccgcgacttcgtggtgccggcccgtctggtgcccggttcctggtacgccctgccgcagtccccgcagctcctcaagcagctgctcatggtctccggtgtcgagcgttactaccagctcgcccgctgctaccgtgatgaggacttccgcgccgaccgtcagcccgagttcactcagctcgatatggagatggcctacgtggaccaggaagatgtgatggccatgactgagaaggtcatcgccgccatctggaagtccgccggctatgaggtccagctgccgctaccgcgcatcacctggaaggatgcgatggacaagtacggctccgacaagccggacctgcgcttcggcaacccgctggtggaactgaccgagtacttcaagaacacgccgttccgcgtgttccaggccccgtacgtgggtgccgtggtcttcaagggcggtgccgccacgccgcgtcgtcagttcgacgcttggcaggattgggctcgtcagcgtggagccaagggccttgcctacgtggtcttcggcgaaaacggcgaactcaagggccccgtcgccaagaacctgtccgatgaggagcgcaacggcctgcgcgaggccgtcggtgccgaggaaggcgacgccgtcttcttcgccgccggttctcgcgagtccgcccagctgctgctgggtgccgtgcgtgtggagctcgcctcccgcgaaggcctgctggatccgaagaagttcgctttcacttgggtcgtggacttcccgctgttcaagcccaccgacgatccggatgatgacgatgtggctgtcggccactccaagtggacctccatgcaccacccgttcaccatgccgagcaaggattggatcgacaagttcgacaaggatcccgagcacgccatgtccgattcctacgacattgtctgcaacggtgaggagatgggcggcggttccgtacgtatccaccgcgacgacatccaagcccgtgtgctcgatgtgctgggcatcaccaaggaagaggccgacgagaagttcggcttcctgcttgaggcattcaagtacggcgctccgcctcacgcgggtctggccctcggttgggaccgcaccgtgtccatcctggccggtgccgactccatccgcgacgtcatcgccttcccgaaggccggcggcggccgcgacccgctgaccggtgctccggccccgatttccgacgagcagcgcgccgagactggcgtcgactacgacccggacgccgacgaaaactaatctacggagcgtataccgcctttcctcagcactcgacgcaccttagtgcgccttcggcttcgaacggcggtctccgcatgcgtagattaattttcgaggagtaatgctccggtgctattagccgcaaatggcccttggaataattccaagggccatttgctttttgcgggtggggcccaatgtgccaaatacctgccaaggggtgccaaatactccgcccgatggcacctccgccatgcggcaaacctcgcaccatgcggtgtcccccttggcgtttgccgattatcccccccccatggggcggtaacttcctcatggggcggtaaacaacccatggggcggtgaaaaccccatggggcagtaggtcaaaatggcttaattccgcggttttacaatttcttcaaaccgccccatgggcaaattgccgcctcatgggggaattgccgccccatgaggagcgatcgcaactccgtatttgattaatgttgtgatgctttgttgtgttttgcttgtttccgcctcctgtattcccctttgcgcgcattgatggtaaggctgccgtctattaatacccggcatgaaggttgaggacggccaggaagcggtatttgcatcgcggtggcaacctcttgtgcgaaggcacgttgtttggcggtgttccacaggtcatcggcgaacacctcgatgacggtccagcccaattgccgcagacgtcgacgtttttgctggtcccgcacatattgtttgcggaagcgacggtgatgatcgccatcatattcaatagcgactttgtattgtggataagccatgtcaacggtataggtgtatccgttctctgaatcggtaatgccgtattgtgtttgcggtatgggcaggccgaaaagcataagcgccaagcgtgtacgagtttcctgaacggaatccgatggttttacgagcttcagcgccgcctcacaacgcgcacgaccaataacgcggtgaaaggccgttagtcgttgagtgaattgttcaatggcatatccataacgtctgatgagcgcttcagccagcaccactaattcagtgaggttgagatattgggcaaactgtatccacgcatccatgggatgcatgcaggttacgccgtttgaaaaagcgatactgctgaactttgcattccatatgcgatagtcgacattgtccaatgaagagcgggtccccttgctcctcaccgtcacataaaaatccttctgcggcaatgtgctgtgcctcggcaactccacgccgcataattccaatgcggtatacagcgagaaacacaacgtgcgtttcgtgcgcactttgcccagcagattccaacaggccgtgttcttggccgtggctttggcgtcaagatctttgcgcagatagttgttgatttcgccattgtgcggcgcttcgctgtatccgttcatgcgccgagcgtagcgcattccacggtggcacaggggcaaaactggaaaatggggataacttaagcggcgcgaaccggttatccaccggcatatcgtgtgccgcgcccggttatccaccgcgcttcgggagtgtcgtccaccgtataacagcactcatcgtgtgcgaacagctagccacgctcaaaatgcctagcacatttatacgaatacgacatgggaaacggcgagaccagccccacacaatacaaagtgaccgccagccatgcgcccgactgcggcatacacggcagcaacgccaacgacaccaaggccaaacatggaatcagcagataggacaacacatgcccgctttgccgtcgcagcaacgtctcagccaccacgcagcaggcaatcagcgcacagcagacgccgagcgatgcgcgactcagcgagaatgtatgccgatgcccaatgccgccttcacgatgtctgatgcggaaatgagacatcgactgagcaactgtgtggacatactgtgaacacgttggaaacgtcggtgtgctatcctcccactcatgtctgaaacgaacaatgaaacagcagtgcgttcgcgcacgacaagcacaacatcaccaagcaaggccaaattgaccccgctggttcccggcaaagaggacctgaaccgtccgctagtcgaactgacccacgtcgaaaagcacttcggtgctttgcacgtcctgaaggacatcaacctgaccgtcaccaggggtgaggtgctggtggtcgtgggcccgtccggctcaggcaagtccacgatgtgccgcaccatcaatcgcctcgagaccatcgattccggcgacatccgcatcgacggcaagcccctgccacaggaaggcaaggagctcgcgaacctcagggccgaagttggcatggtgttccagtcgttcaacctgttcgccaacaaaaccattcttgaaaacgtgacgttggccctcatcaaggtgcgtcacatggacaagaaggaggccgagcaactggccatggacctgctcgcccgcgtgggcgtcgactcccaagccagcaagatgccctcccagctctccggcggccagcagcagcgtgtggccatcgcccgcgcgctcgccatgcgccccaaggtcatgctgttcgacgagcccacctccgcactcgacccggaaatggtcaacgaagtgctcgacgtgatggtcgaactcgcgcatgaaggcatgacgatgatctgcgtgacccacgagatgggcttcgcgcgcaaggccgccgaccgcatcgtcttcatggcggacggccagattctcgaagagaacacgcccgacgagttcttcgagcatccgcagaccgaccgtgccaaggacttcctctcgaagatcctcacccactgacgaacccactgaaagacgggtacgcaatccaatgacattcaccaatacgttcaaacggaaggtttgccgcgtgatcgccgcgctcgccgccgtggcctgcacaatgtcgctggccgcctgcggcgcggacgaaaccggcaagatccgcatcggcatcaaattcgaccagcccggcctgggcttcaagaagtccggcacctacgtgggcttcgacgtggacgtggccaagtacatcgccaagaaactcggctattccgaagaccagatcatctggaaggaagctccctccaagcagcgtgaggccatgattcagaacggcgacgtggacatgatcctcgccacctactccatcaccgacgagcgcaagaaggccgtctccttcgccggcccgtacttcgtggccggacaggatctgctcgtgcgcaaggacgacaactccatcaacggccccgaagacctgaacggcaagcgcctatgctccgtcaccggttcgacctccgccgccaccgtcaaggagaagttcgcctccgaagtccagcttatggaacagcccggttacgccgaatgcgccactgccctgttctccggcatcgtggacgcggtaaccaccgacgacatcatcctggccggcctggcctccgcctcgcgcggcaagctcaaggtggtcggcaaaccgttcacgcaggaacactacggcgtgggcatcaagaagggcgacacgcagctggccaccaaaatcaacaacgccatcgtggacatgattcaggacggctcgtgggagaacgccatcagcgataacaccaagggcaccaactacacgcccgacgtacgctacaacccgcccaccccggacgaaggagaggaggcctgatgagcggattcctggaactcttcagccagtatgacgtgctcggcgcgtttctggtcaatatcgaactgaccctatggtccgccctgttctccctgatcctcggcgtgatccttgtggtgatgcgcatctcgccgatttcctcgctcagggccgtggccggtgcgtatgtggaactgttcaagaacctgccgctgaccatcatcatggtgttcatggtgctgggtgcctacgcgcagctgaagctcagcttctccgacaccttcaccacgaacttcttctggctcgcggtcaccggcctgagcctgtacacggcggcgttcgtgtgcgaatctctgcgttcgggcatcaacaccgtgccgattggccaggccgaggccgcacgagcgctgggcttgggcttcatgcagtccgccaccgagatcattctgccgcaggccttccgaggctccgtggcaccgctcggcaacacgctgatcgccctgctcaagaactccaccgtggccgccgccgcatccgtggccaccgaaacatcctcgctgatgagcgagatgatcgaattccgtcccgacgtgatcatccaaatcttcctgatcttcgcgctcggctacgtgatcctgatcatccccatcggcatgctcaccacgtacctgtccaacaaactcgccgtaaggaggtgacggatatggccgatacttcgaattccgtgctgttcgacgcgccaggtcccaagggccggcgcaccattcgcatcgtcaactggatcgcgggcattctgttcgcggtggtgctcgtgtttatcctcatgcgcctgcacaacccgccggacggcgagaaccagctcagctgggagctgtggaagcccgccgtcgaacgagaggcgtggaccgacttctacctgcccggactgtggatgaccatcaaggccaccatcgtggccgtggtgggtgccgtggtgttcggcttggtgttcggcgtgggccgactgctgccgaacccgttggtacgtggcgtctccgccgtgatcgtcgagttctgccgtgcggttcccgtgctgctgctcatgatcttcttctggcgatggttcgcgttcgcgggcctgcccagcccgtcctattgggccgtggtgctggccttggtgctgtacaacggttcggtggtcgccgaactggtgcgctccggcgtcggcaatctgccgggcggccagcgcgaggcctcgctcgctttgggcctgaccgaaacgcagtcgttgatggaggtcgaggtgccgcaggccgtctacgccatgctgccggccgccgtcacccagctggtcgtggtgttgaaggacaccgctctgggctcgatcatcatgtataccgacctgctgcaggaatcgcgccgactcggctcgatgtacttcaacatcctgcagacgctggtcatggccgcggtgatttacttcatcgcctgctggctgctgtcgaggctcgccgaatggctgccttcgcgcatgcagcagcgcacggccgcgcccaccgaggccgagcccgtggcgccgatcgccgccggagacccgtccaatgtcaatcagatcgcggtggccaaggagctcgaggagctgccgtttggtggtgcgccgcgcaaataccatgtgcatcaccgtggcaccaacgcctcgattcgcaactggcggcgcacccgctacgaacagggatatgacgccacccagcccgagtcacaggttgacccggaaaccggcgaattcccggcgttccgcaagtccgaagacgagtcagaggcctgacggtcagctcaatcgccgctaagccggcacgaagaatttactgagtgtttgactgggctccggctacgtagccttcacggaggataggttggaacatatgaagatgttccggcacctatcctccgtttttgctattgcgaccattgcgccgctggcgttggcggccacgctagccgcgacgcccgcaatcgcacaggccgaccagctgcccaacccggattgggtggcattgctctccgactacgaaaagaactattggcaggcccccaccgatgccgagcacggtggcaaggtgctcgacgccgatacaatgaaactcgacgaagatttggccgtggccattaaccacaaagccgccgaaaatctcgataaggatggcctgaacgcccaacgcaagcgtgcgctcgtcgactccgatctgcaagccgaggaagccatgccggacgcgctcggtccggtgcttggcaaatatatgagcgaagggctcaaatccgggaaactcaacgccgtcgccgatatcttctcctttaatgtggcctccacctacgcctcaaaacgtgcggccatgcatccgcgcccctatctgaaccgtgcggaaagcagctacggcggcactaacgatctcgccggactgcccgccacgcttgacatcaagcaatcaccctcatggctcgaacacgtgcccggctactcgaacttgcagaaaaacagttcctacccctccggccacactaccggcgcctattcgtggggtatcgcgctggccggcatgattcccgaactcgcgccgcaaatcatggcccgcacttcggaggccggcaacaaccgcatcgtgctcggcgtgcattatccgcttgacatcatgggcgggcgcattggcgcatccgcccagaacgggcagtactggcataacgaattcgcttcgtccatcgtgcccgcgtcccggcagctgcgggactatctggtgtcccgctgcgccgcggacggccacggcactaccctcgccgcctgcatcgccaacaccaaggcctccggttcgggcggctacaccaacgattttctggacccggtggccaccgagccggtcgcggaccaggcctcggccgtgcgcgtctacaccgcacgcctgacctacaccttcccgcaagacaccgcccagtccggcgctgatttcgtggcaccgcgcggggcggcggacgtgctgcgactggcctatcccgaactgcacgccgatcagcgcaacgcgattttgaaagccactgccttggattccggataccccctatggcaatcgagcgacggctggcagcgtatcaactgggccaaagccctgtgcgcccgcgtcaccttggataagcacggcgatgtggccaaggtcgagaccgccgaccaagtggcgcttaccggcccgagtgtggtcaatgcccagtacgccgacgcgggcaatcacccggcgtctgatggctcggcgggtgaaaacagcgccattgcggccggaccggatctcgccaccctccatgccgcgcaacgaccggcgttgatcagcgtagccatcggtaccgctgtaatcgcgattgtcggcggaatacggacggttcgacgcaaatccaagaaccagcttcagcggtaattcagccaaagttcagtttggagatctgccgagtttgccttcatacggtgtcggcttcatttctctctcatactctcggggtgtcatccgccgaagagcatcatgctgcggcggcacaacccgaggaaggaacgggagtaatgttccacaccaacaatttcaccgcgatgtcgcggcgcgccatcgcgctgctcaccgctgcggtgacactgagcagcatcgccctgatcggcgtgcccgctgcggctgcggacgagcagcaggccactgccgaacagaacacggctgccaaaccatccgtaatcatcaacgaggtctatgccggcaatacgaaagctgccggagacccggatagcaagcgttgcgattgggtcgagctcaagaacaccggctccacagacgttgacgtgaagggctggggcatctacgacagcggcaagaaagccaagaagcactacaccatcggcaccagcgaagtaacgaatacggacaccgtcatcaaagccggcggatatctggtggcatacatcgaccccgacaaggccgagcccggcctgggttccgatgccgacgaagcctatctgaccactaccagcggcgactttaccgatagcgatgtggtggattccacgtcatggaataccgatacaaccggcgtgaagaagatgagcgacagtcagtcgtggtcccgtaaggacgatggcactttcgcgctttccgatacgcccacgcccggtgcacagaacgtgttcgatgacccgactccgactccgcccgccggcgagaccatgaccgtggacgcatggtcgggattggccgatgtgaccacagtgggtgccgaaggcgaatttggcgccaaaggacaaggcggcgaccacactgacggcaatctgtctggtctggtgtatgaagccggtaaagacggcaagcaaggcgtgctgtgggcggccgacaacgatctgaaccccacgctcggcaacaccgctgataagggccctggctccatcaacaagttcgtctaccagaacggcacatggcagcaggatcccactgatggctggaccttcaccaacaacggtcagaccaagggcggcaagcagctgcacttcaaggacggcaagggcggtgtggactccgaaggcatcacgctgatcaacggagattcatccaagggcatattcatcggcgccgagcgcgacaacgaaaacaagaatgtgccgcggccttccattctgcagtatgacgtgaccgcgaaaaccaccgacgccaacggcgacggagcgcaagagctgaccgctacgcacgagtggaatctcaccgcagcactcacacaattcggcgtgacgctgggccacggagcggacgccaatcttggggtggaaggcatagcctttattcccgactcggtcctgaccgccaatggattccaatccaaccttgacccgaagaacgtaatgacctacgacccggatggtttcggcaatagtttcggcggtctgttcttcgccgcactggagaaaaccggccatatctacgccttcgcactgcaaaccgtgaatggcgaggacctggtacatccggtggccgacatcgacctgccgcagtccgcggtgaacgccggctatgatggcccgcgcgatctgacttgggacgccgagcacaaccagttgctcgcccaaagcgacaatgacgcgaacaccggtgccaaaatcggcacctacgaattcaagaacggtgtgctgcagctgaccaagctgaccgacactccggatgaaatccgtacgcagaacaccgaaggttttgccatcacccctgataccgaagccaccaaggtagtaaatggcaaggtgtacaagccggtgttctgggcagacgacggcgtgaccaatggccattcattgcgtatgggctatatggcaaccaatcagccggttcccgccagcaccaccatcaatctgctgaacttcaacgatttccacggccgtatcgacaagaacctcaccgtgccgttcgccgccaccatcgagcagctcaagggcgaataccctgactcatcactgctgctgtccaccggcgataatatcggtgcttcgctgttcaactcttcggtacagcaggaccagccgaccatcgatgtactcaatgctttgggcgtcaaggcttcggcggtgggcaaccacgagttcgatcaaggctatgccgaccttaccgatcgtgtgattggcaaggagggcgcgcgcaacgcccaatgggattacctcggtgccaacgtgtacaagaagggcaccacaaccccggctctgcccgagtacagtattcaggaagtgaacggcgtgaaggtcggcatcatcggtgcggtcactcaggaaaccggcacattggtggctcccggtggtgtcaaggacattgaattcggcgatccggtggaggccgtgaaccgtgtggccaagcagctcaccgacggtgacgaatccaatggcgaggctgacgtgattgtggccgaataccatgagggtgcagcctctaatgaagatgacgccaccgccaagcccacgcttgacgagcagaaggctgccagccccgtgttcaagaagatcgtggacgataccgatgcggcagtgaacgtgatcttcactgcacacacccacatgaagtactcgtacaccgatcccgcgcacaacaaccggccgatcatccagaccggtagctatgccgccaacatcggccaagtggtgctcacctacaacacggccaccggtgcggtgtcttacgacaagtccggcaacacggccgtgcaggtggcttcgcagcccgccgacaaaaatgatccgcactacaacgattacgccgaatacaacgatggcctgctcgccgccgcgaatccgactgtcgccaaggtgaaggacatcgtgtaccaggcccttaaggtggccgatgaaaagggcggcgagaaggtcggcaaggtgtctgcggatatcaccaccgcattcaaggacggcaagcgtgacgaccgcgcctccgaatcgaccatgggcaatctggtggccgatgcgctgctcgattcgctcaaaggcgaggaccgcggcgcggccgaaatcggtgtggtcaaccccggcggtctgcgtgccgaattctgcaagtccggcaccaatgacgcctgcacgctcgatgccgacggcaatatcacctacgcccaggccaacgcggtactgccgttcctgaacaacctgtggaccaccacgcttaccggcgcgcagttcaaggaagcgctggaacagcagtggcagacgaacgcggacggcagcacgccatcgcgcgcgtatctgcaactcggactgtcccacaacgtgagctacacgtatgatccggatgccgcgcaaggccatcacatcacctcggtgaccgtcaacggtgagcctctggacctgaaacgcaactaccgtatcggttcgttcagcttcctgttggagggcggcgataacttccgcgccttcgcccaaggcacgaacaccaaggacaccggtttggtggaccgcgacgcctggatcgactatctcaaggacaacaatccggttgccccgcgctacgaccgccgtgcagtggccgtcaccggtatcccgaccggtgcggtcaaggccggtggctcgttcaccctgcacttctcgaagctcacgctcacctcgctgggcgtgcctgacgagacgaagctgaccgccaccatcggcgagcagatggtcggcgaagcacaggttgcgaatggcgataccgccgagctcaaggtcacgattcccgccggaaccaagaccggtgatataagcctgacagtgaccggtgcgaccaataagaccacggtcgctctgcccgttgccgttaccggagtgtccaccgggacggacgacaaggataacggcaaccatgacggtagcgtcaatgccaatggcagcaccaagccacagcagaccgaacatacggccaataccggtgcctcggttgcgttggttgtggttctggcgacgctgttcgctgcgggtggcgtcatcatcgtggtcaagcgtcatgatgcggcgcgcaagtagcgcttgaagccgcgtgcgctggtcggatgcttcagcatgatgccgacgatttgccggtcggtgatgatctctttctcgtagcagatcgtgccgtcttcctgatggctcaggtatgtttcgggccgtttgccgcttctttatgtactgcaaacggacgggggattggccgatagggatgagagagaacggagagagtatgaagtgccaggtatgtggaacggagatgccggagggaagccgattctgcacggaatgcggtgcgccgatggcacagtctgcgccaagcccaagtcctcagtcgatggatggcccgacgctggtaccggctgctccccagcaggtgccagcgggttcgatgccgttgcccccaagtttcaacacggtgaccgcacctacttcgacattgtcgacggcgccaggcaacggtggcgctgcgcagccgcgttccggtgggtctgccggaaagaagatattgctggggatcgtctgatccaggcgtgataagcggcagcaacgttacggatgacgaagccgaaaataatgcaagcaaggcattggattggcaggtcgagcacgacaaggactccgcagagctgttctattccacgtataccgcacagctgtccagcaagcgtaagggtatggaggctgaaggcaagacctggaactaccgcgatattcttgcgcaattcatcacgatgcacaacaagaattcaaacgtactgcttatctggtcgggtgactggcccgcctacagcagcaattccgacaaatactatgtgattcttgccggtgagggcttcgactcgacagatgaggcttggaattggtgcaaagccaacaattacggtccgaacgactgcatgcctatagatttgcagtaacaagcgaaatgtgaatgtcgctacgttgctaggtctcctgagttacaagacgtacaatcgggagcatgaccaaggacgacgacagaaccaacgagcctgaagaggccggcaagtggggtacggccggaaaatcctcaggaaagaacaacaagaacggcaagggaaaggaatccaaaaccgatcgacggatcgacaaggtattacagctcgcggtggatcgcatagacaccatcgactccagtgccagcgtgcctgaacgactggcgcgtgcggcgaaatccagtgaactgctcagcgccgtatggtcgttgccgcccgctcaacgtcttatgttccaccacggcatgcaggtcactgatgtcgaaggcgattccactcccggattcgacggcaataaagaggacgccgagaagttcatttcgatcagctcctccgaaatcgcccgataccagcggctcatgtacgcgaatggcgtcaaaggctcgacacggcggctgctcatcgtgctgcaaggcatggatgcctccggcaagggcggcattgtgcgtcacgtgttcagccaaggcgacccgatgggcatccattaccatggcttcggcaagcctacggccgaggagctcgaccacgacttcctctggcgtgtgaagcgtgaattgcccaagccggggtggattgccgtattcgaccgctcccattatgaagatgtggtcatgccgcacgtctatggcacctatcccgaagacgtatggcgtgcccgctacgaccagatcaacgatttcgaacgtgaactggccgccagcggatgcgccatcctcaagatcttcctcgtggtaagccaggaagaacagaaaaaacactttcttgggaggctggatgatcccaccaagttctggaaattcgatatctccgacctcgaggcccgcgaccgatgggatgagtacatgttcgcttggcaggaagtgttcgagaaaaccagcacggccgccgcaccgtggtacctcgttccggccgataaccgctggtattcgcgagccgtggtctccgaactgctgcgcaccaccttgaagaacatgaacatgacctggcctcccctcgaacccgaggtggaccccgacgaggtgcgccgccggttggcgtgagcgatcctcccattggcggagccaagcgcatggcacagctcttcgcatggctccgcccgctggcgggaggcgtcgcatagcgacggagggcggctcgtgccgtcggaataggccactaggtagactgagcattatgactgacgagaaggaatacggatccctggggcggctggcccccgaatgggacggcgacggacacgaacggaatcttacggccgacgacatctacgaacggttcttcggctgggtggaagacgtcaagggcatcgagccgtggccgcatcaggaagaggccattatggacctcttggccggcgaccatgtgattttgaataccccgaccggttcgggcaaatcgctggtggcgctcggcatgcacttcgccgccctatgcactggccgccgctcctattacaccgctccgatcaaggcgctggtgtcggagaaattcttcgacttggtcgaagtgttcggccgcgacaatgtcggcatgatcaccggcgacagccacatcaacgcggacgcgccgatcatctgctgcaccgccgaaatcctcgccaatcaggctttgcgcgaaggcacccatgccgatgtgggcctcgtggcgatggacgaattccattattacggtgatccggagcgcggctgggcgtggcaggtgccactgctcacgctgccgcagacccagttcctgctgatgagcgccacactcggcaatgtggacgccatcgccgacaagctctccgatctgaacgacaccccggacgtggatgtaatcgccgacgcgccgcgaccggtgccgttgagctacgaatacacgctcgacccgatggaaaaaaccgtggaactcgccttccgcaacggcgaaaccccgatttacgtggtccacttttcgcaggacgccgcattggagaccgcgcaagcgctcgcctccaccggtgtatccagcaaggaacagcgccaagccatcgcagaagccatcaaaggcgtcaagttcaccacagccttcggcaagattctgcagcgactgctgcgcaccggtgtcggcatccatcatgccggcatgctgccccgctaccgccgcctggtcgaacagcttgcccagcagggtctgctgccggtgatttgcggcaccgatacattgggcgtcggcatcaatgtgccgattcactccgtggtgctcacggccctgaccaagttcgacggcaccaagatgcgccgcctgcgcgcccgcgaattccaccagattgccggacgagctggccgtatgggattcgataccgagggactggtgatcgccgaggctcccgaatatgaaatcgaaaaccagaaagccatcgccaaggccgggggagatccgaagaaactcaagaaggtcaagcgcaagaaggcgccggaaggttttgtgacctggaaccagagcacgtttgataagctcatcgacgctgaaccggagaccctggtcccgcacctgaaaatcacgcattcgatggtgctcaatgaagtggcgcagggcggtgacgcccgtgcccgtatcgacgatctcatcgacgattccgcgcagacccccgaccagaaggagcatctgcgccagcgggccgacgagatcttccaaaccctgttcgataccgaagtcatcgaaaccgaggaccgcaaggacggcggcaaggactactacatgacccttgatatgccggacgacttcgccctcgaccagccgctctccccgttcctgctggccgcgctcgaactgctcgaccccgagtccgacacctatgcgctggacgtgatctccatggccgaggccacgctcgaagaccccaagcaggtgctgcgtgcccaggagcgtcaggcccgagacaaggcgatggccgatatgaaggccgacggactcgactatgacgagcgtatggataagctgcaggagattacgtatccgaagccactggaagacatgctcgaagccgcgttcgatcagtaccgccacgatgtgccgtgggccaacgactactggctgtcgccgaaatccgtggtgcgcgacatggtggaaaccgcctccgacttcaccggatacatcacccgatacaacatcgcccgctccgaaggcaccctgttgcgctacctctcggacgcctaccgcacgctggcgcgcaccgtgccgcccgaaaagcgtgacgagcaactcgaagacatcatctcgtggctgcgcgtgctcgtgcgctccatcgactcctcgctggtggacgaatgggagaacgccggtgactcggctgaccaatccgaggctgcggcatccttggccgcgcccggcgcaaaaagcgcggtggtcgaggaccgtcgtggtcttaccgtgctggtgcgcaatgccttgttccgccgtgtgcggcttatggaccttgaccagccggacaagctcggcgcgctcgacaaggactggggctacggcgtgcacgaatgggaagatgtgctcgacgactactacgacgagcacgagtacgtgggcatcggcgccgaagcgcgctcgcccgaactgttcatgttggatgacaagcacgagaacgacgagcatacgtggaaggtgcgtcagattatcgatgattccgatggcgaccacgactgggccatcgaaggcatcgtggaccttgacgccacccaagacaccggcgaagtagtcttccacgactacaaggtgagtaactgattcctggctcccctctctgagggaagccaaggtgcagctcgaacgtctgttcgaacactggggtactataggacgttatgagtgagaacgatttgtttggggcggctgatgcgccggagtcgatgacacggccgttggcggtgcgcatgcgtccacgcactttggacgaggtgattggccaaacgcaggtgttgggccagggctcgccgctgcgccgcctcgccaatccggccagcaaaggcagtctcaccgcgccgagctccgtaatcctgttcggccctccaggcgtcggcaagaccacgctcgccaccatcgtggccggccaatccggccgcgtgtttgaggaactctccgccgtgacctccggcgtcaaagacgtgcgcgacgtactcacccgcgctcacgaacggctcgtgtcacgcggccgggaaaccgtactgttcatcgacgaggtgcatcgcttctccaaatcccagcaggatgcgctgcttcccgccgtcgaaaaccgcgacgtgacctttgtcggcgccaccaccgagaacccgagcttttccatcatcaaaccgttgctctcccgttcggtggtcgtcaagcttgagtcattggagcctgatcagctcaccgaactggtgcagcgcgcgctgactgatgaccgcggtctcagggacgaggtcaaagccacggacgaagccatcgccgatatcgtgcgcatggccggtggcgacgcacgcaagagtctcacgattctggaggccgcggctggcgcggtcaccggcgacgaagcccgcaaaaagggcgcacgccgacccatcatcacctccgaaatcgtggctacggtaatggacaccgccaccgtgcgctacgacaaagacggcgatgaccattacgacgtgatttccgcattcatcaaatccatgcggggctccgatccggatgccgccatccattatctggcgcgcatgctgaaagcgggtgaagatccgcgcttcatcgcccgtcgcatcatgattgccgccagcgaggaagtcggcatggccgccccgcagattttgcaggtcaccgtggccgcggcgcaggccgtggcgttggtcggcatgcccgaggcacgtattattttggccgaagccacgattgccgtggccaccgcgcccaaatcaaatgccagctataacgccattaaccaggcgctcgcggacgtggataccggcaagatcggcgctgttccgctgtatttgaggaacgcccccaccaagcttatgaaagagtggggcaaccacgagggctacaagtatgcgcacgattggcccggtgccgtggcgccacaggaatatatgcccgaagagctgcgtggcaccgagtactaccatcccaacgatcgcggctatgaacacgaagtcagccagcgtcttgccaagattcgcccgatactgcatggtggggaacccgaacagaaatgaacataggggagtaaagtgtaacgcaacaatagcagtggaaaaaggggaggcaaacaccatggcgaccatcttcatcgtggacgatgatcaggccatcggcgaaatgcttagtcttgttttggaaaacgagggattccagactgtgacctgcctggacgggctgagggctgtggaaatgttccccatcgtcaagcccgatttgattctgcttgacgttatgctccccgggctggacggcacggaggtggcccgccgcatcagagctacctctaatgtgccgattatcatgctcaccgccaaatcagacacacttgacgtcgtggccggcttggaagccggtgccgacgactacgtgcccaagcccttcaaagtagccgaactgctggcgcgtatccgtgcacgcttccgcatcgccaagccggccgccgaagacggtgccaccggtggcgcaagcggtggcaatgcaaacgtcaaccatctggaacgcggacccatcgtcatcgaccgtttggaacacaccgccaccaaggatggcaaggacctgaatctcactccgatggaattcgagctgctgttcatgcttgcggccgccgccggcgaggccatcagtcgttccagcctgctcaagaatgtctggggatacgagaattccggcgatacgcgcctggtcaatgtgcatgttcaacgccttagggccaaagtggaggacgaccccgagaacccgcaaatcgtgcagaccgtacgcggtatcggctacaagttcgtcactcctgaacaatgaacctgcgccctcgattcagcctcaaacgcttgctgcgccacggacgcgctgaagttcgtcgctcactgcaggcccgcaccgtggccctcaccgtgattcttacgctggccgtggccatcgtcttctctggcgtatcgatggtatcagtgcgcgcctcgctgcttacccaaatcacttcgcagtcgcgtgccgactattcaaacatggtgcagcaggcccaaaccagtctggacgcggccgatgtctccgccgtagtgcagatccaacagctggtcaatgacttggcgtcctcgttgcaatccgaggggtcctccaacctgataggtgtgtatttgtggagtcgtgataccaactcgcgtgccatcatccccgtatccaccgaacccagctatcaaagtctgatttctgatgacatccgttcgtccgtggcttccgacttggatgacagcgtgttctatcagccggtcgaaattcccggtgattccggcatgccgggcagcgggacgcccgcagcggtgctcggcaccgtattggactttggcgtggccggcaacctcgaattcttcgccatttattcgtacacgttccagcagcagtccttgacacagattcagctcagtctggtggtcatctgtgcgttgctgtccatcgtggtgggcgtagtaatctggctggtgattcgtggcatcgtgcgcccgattggacgagtggcagcggcctcggaaacactggcctccggcaatctcgatatgcgcgttaccgtggatcgtaaggatgagcttggtgtgctgcagcaatccttcaatacgatggctgatgcgctcaaccagaagatcgatgagctggaggaagcaagcgttttccagaaacgatttgtgtccgacgtcagtcatgaattgcgtaccccggtgaccaccatgcgtatggcttccgacctgctcgaaatgaaaaaagacggcttcgacccctccaccaagcgtacggtcgaactgttggccggccagatcagtcgattccaagacatgctcgccgatctgttggaaatctcccgctacgatgccggttatgcggcactcgaccttgtggaaaccgatttatgcgaaccaattgaaacggcagtggaccaagttgacggcatcgcccaagccaaacgggtgccgattcacacgtatctgcccaatgtgcaggttttgactcgtatcgattcgcgtcgagtgattcgcatcgtcagaaatctgttggccaatgccgtcgatttcgctgaggaccggccgatcgaagtgcgcgtcgcggccaaccgcaaagccgtggccatcagcgttcgcgactatggcgttggtatcgacgaagacaaagtcgctcatgtattcgatcgattctggagaggcgacctttcacgttcacgcgttaccggcggcaccggattgggcctggccatcgccatgactgatgccttgctgcaccacggtagtatccgtgtacgttcggcagtgggggagggcacctggttcttggtattgctgccgcgtgaccccgaccaaggtgaggtggcggacgctgaactgccggtgaattttgcttctgaaacgccggatgacctgcgtgttaccggtgggtttggtgtggccaccagccaagtcacacatgattatcatgaggttcgccgcgacacgatgatggggaggccactatgagacgagtgaccagaacgattgccgccgcaggcgcggccatagcctgttgcatcacgatgacggcatgctcaagtccgttcggtttgccgattagcggctcggtgcagactctggcaccggtggaacagcagacccagcgtgtttacaccaatcctcgggggcctgcggacgatgcacagccggaaaccattgtcaaagggttctatgacgctatgcctgctggcgtgcagtccgatggctatcgcgtggctcgcgaattcctgactggctcggcttctgccgggtggaatggagattctgcggcactggtatacagcggcacccctgatttccgccgacgcgccaacaccataagcgcgccacaaggtgcggaaagctcactgattgtggaagtggaacttcaggtggtgggttccttggattcgcatggcgtatacacgccgtcaaacagcacccaaacgcgcaggcttccctatacgctgatgaagaaaagcggccaatggcgcatctcgtcattggaaagcggcgtggtgatttccaccgcagattttgaacaggtgttccgccaagtatccgtgtatcaggtgagtacttccggcaagcaacttatcccggatattcgttggttgagctggcgcaactggcgcacccaggcagtcggtgaagtgctctcggatgcaccctcctggttggaaggagtgctgcgaggcgccggcttgtctaccatcaaactcgcggtcgacagcgtgccggtgaagaacaatgtggtggagatacacctcaacagcggtatcaatgcgttgaacgaggaagaacgaggcctgctggtacatcgcatccgtctgactatgggcgacggcaatgccgaatacgcgctgaggattaccggcgatggagtggactattccgatgccgacgcaaatgtgaaacttactaccgagcagccgacagcgggcgtatacacgttgaccggtggtcatatcgtttccctggccagctccagtccgttgcgtgtaggggaggcccccggatatgacgatgctcggggcttcgttttttcctcatccggcggcgcggtgttgcgtgcggacggcgtggtcgaatgcctgaaatctgatggtgcgtcctgtggggtgatgttctccggcgagccgatgcgatcgattaccgaaggtctggatggcgaagtatgggctgtatccgagaacgggcgcgaattgcatgtgtcagatgggggcaaggaaaccgatctgaagcttgattggcttggtgctgccgacagcattgtggcattggcggtttctccggaagggtgccgattggcgttggcagtcgggggcgaggacacgaacggcgtgatgatgaccggtgtggcgcgcaacggtgataaaacactgagcggtctgagcaaagcggccacccaagtgagtgtgctcaggcacgtcaccatgctcacgttctacaatgatctgaatctggtgtacgccaccacacctcctgagggaaacagcgaacaacaagaggcatggcgtcaaatggcaccaggcccggccaatgcgcagcgtttacccaatggaatcataacgtcgatggcatcggggcagatcagcctgtctcgtcgcctggccattgtggacgatttgggtattgtgcgctccgtttccggctcactcgacggttcctggaccatcgccgatagccaggtcactgccctcggtgcgcagtagatggtataagaaaaacggtgttcataataacttttcttgtgttgtgatgcggcggctttgtcgctcggctgacgagcggcattgccgccgtgcaaccacctcttattatggcttaataacaaggcaaaacggcgctgtgaagccgttttttgaactactgttatcaaactgttataaacctgttatcaaactgttatcgcatgcgattgaacatttggcctgtgagcgtcacactagagattgtcgatgacgaacagtcaccaaacaggatggaagatcatccaaaaaataaacactgctcgaggaggagtatttatgaagaattggaagaaggccattgccctcgttgcttctgctgctgcgcttgtcagcgttgccgcatgcggttccagcaacgcaggtggcagctcggactccggcaagaagacggttggcttcgttgctgtgggccctgagggcggcttccgtaccgccaacgagaaggacattcagcaggcattcgaggatgccggctttgacctgacctactctccgacccagaacaacgatcagcagaagcagattcaggcgttcaacaagttcgttaacgacgaagtcgacgccatcatcctgtcctccaccgaggattccggttgggatgactccctgaagaaggccgctgaggctgagattccggtcttcaccgttgaccgtaacgtggacgtcaaggacgccgaggccaagaaggccatcgttgctcacatcggaccgtccaacgtctggtgcggcgagcaggctgccgagttcgtgaacaagaacttcccggatggcgccaacggcttcatcctcgaaggccctgccggcctgtccgtggtgaaggatcgtggcactggttgggacaacaaggttgcctccaacgtcaaggttcttgagtcccagtccgctaactggtccactgatgaggccaagaccgtgaccgctggtctgctcgacaagtacaagtccgacaacccgcagttcatcttcgctcagaacgacgagatgggcctcggtgccgctcaggctgttgacgccgccggcctcaagggcaaggtcaagatcatcaccatcgacggtaccaagaacgctctgcaggctcttgttgatggcgacctctcctacgtgatcgagtacaacccgatcttcggtaaggaaaccgctcaggccgtcaaggactatctggatggcaagaccgttgagaaggacatcgagatcgagtccaagaccttcgacgccgcctccgccaaggaagccctggacaacaacacccgcgcctactgataagtctgctgcgactcattgataactggaccaaataattgatgtgatggtgtgagaaggatgttccttccacaccatcactcatgtgtggctcaaatatcacaaaacgataacatctcattctcgtttaaggcaaagacatgacagataaaaaccccatcgtcgtaatgaaaggcattacgattgaattcccgggcgtcaaggccttggatggtgttgatttgactctctacccgggtgaagttcacgccctgatgggtgagaacggtgcaggcaagtccaccatgattaaggctctgaccggtgtgtacaagatcaacgccggctccattatggtggacggcaagcctcagcagttcaacggcaccctcgacgcacaaaacgccggtatcgccaccgtgtatcaggaagtgaacctgtgcaccaacctttccgtcggtgagaacgtgatgctgggccacgaaaagcgcggccccttcggcatcgactggaagaagacccacgaggccgccaagaagtatttggcacagatgggcctcgaatccattgacccgcacactccgctgagctccatctccatcgctatgcagcagctggtcgccatcgcccgcgctatggttatcaacgccaaggtgctgattctcgatgagccgacctcttcgctggatgccaacgaggtcagggacctgttcgcgatcatgcgcaaggtgcgtgactcgggcgtggccatcctcttcgtctcccacttcctcgatcagatttatgagattaccgatcgtctgaccattctgcgtaacggccagttcatcaaggaggtcatgaccaaggacaccccgcgcgacgaactcatcggcatgatgattggtaagtccgccgccgagctgtcccagattggtgccaagaaggctcgccgtgaaatcacccctggcgagaagccgatcgtcgatgtcaagggcctcggtaagaagggcaccatcaacccggttgatgttgacatctacaagggggaggtcgttggcttcgctggcctgctgggctccggtcgtaccgagcttggtcgactcctgtatggtgccgacaagccggattcgggtacctacacgctcaacggcaagaaggtcaacatctccgatccgtacacggctttgaagaacaaaatcgcgtactccaccgaaaaccgtcgtgatgagggcatcatcggcgacctgaccgtccgccagaacatccttatcgccctgcaggcaacgcgcggtatgttcaagccgattcccaagaaggaagcggacgccatcgttgacaagtacatgaaggaactcaacgttcgtcccgccgacccggatcgcccggtcaagaatctctccggcggcaaccagcagaaggtgctcattggccgttggctggccacgcaccccgagctgctgattctggacgagccgacccgtggcatcgatatcggtgccaaggctgaaattcagcaggtcgtgcttgacctggcttctcagggcatgggcgttgtcttcatctcctccgagcttgaagaggtcgtgcgtctgtccgacgacatcgaggttctcaaggaccgccacaagatcgcagaaatcgaaaacgacgacaccgtctctcaggcgaccatcgtcgaaaccatcgctaacaccaacgtaaacaccggaaaggaggcatgagatggctgaaaaggcaaaagccgagggcaacaactttgtcaagaagctgctgagcagcaacctgacctggtcgatcgtcgcattcattcttctggtcatcatctgcaccatcttccagcatgacttcctggctctgagctggaacagcaacaccggtggtctggccggcccgctgatcaccatgctccaggaatctgcccgatacctgatgattgcaaccggtatgaccttggttatctccaccgccggtatcgacctttcggtcggttccgttatggcagtggcaggtgccgccgccatgcagaccctgtccaatggcatgaacgtgtggctctccatcctcatcgccttggctgttggtctggccattggctgcgtcaacggcgctctggtttccttcctgggcctacagccgttcatcaccaccctgattatgatgctcgccggccgtggtatggccaaggtcatcacctccggtgagaacaccgacgcctccgcagttgctggcaacgaaccgctgaagtggttcgccaacggcttcattctgggcattcccgccaacttcgtcatcgccgttatcattgtgattctcgttggcctgctgtgccgcaagaccgctatgggcatgatgattgaggccgtgggcatcaaccaggaagcctcccgtatgaccggtatcaagccgaagaagatcctcttcctcgtctacgcgatttccggcttcctcgcggccatcgctggtctgttcgccaccgcatccgtgatgcgtgtcgacgtggttaagaccggtcaggacctcgaaatgtacgccattctggcagtcgtcatcggcggtacttcactgctgggtggtaagttctccctcgccggctctgctgtcggtgctgtaattatcgccatgatccgcaagaccatcatcaccctgggcgtcaacgccgaggcaactccggccttcttcgccgtcgttgtgattgtgatctgcgtgatgcaggctccgaagattcacaacctgagcgcgaatatgaaacgcaagcgcgcgctcaaggctcaagctaaggcggtggcagcatgacaacagctacggcaaacaaagtgaaggctcccaagaagggcttcaagctcgatcgtcagatgatcccgaccctcgcggccgtggtgatcttcatcctgatgatcatcatgggtcaggcgttgttcggcacctacattcgactgggcttcatctcctccctgttcattgaccacgcctacctgattattctggctgtggccatgaccctgccgattctgaccggtggtatcgatttgtctgtcggtgctatcgtggccatcaccgcagtcgtcggcctgaagctggcgaacgccggcgtgcccgccttcctggtcatgatcatcatgctgctcatcggcgctgtgttcggcctgctggccggcaccttgatcgaggaattcaacatgcagccgttcatcgcgaccctgtcgacgatgttcctggcccgtggtcttgcctccatcatctccaccgactcgctgaccttcccgcagggcaatgacttctcgttcatctccaacgagatcaagatcatcgacaatccgaagatctccaacgatctgtccttcaacgtcggcgtgatcatcgcactggtggttgtggtcttcggctacgtcttcctgcaccatacccgcaccggacgcaccatctacgccatcggcggctcccgttcctccgcggaacttatgggtctgccggtcaagcgcacgcagtacatcatctacttgacctctgcgactctcgccgccctggcctcgatcgtgtacaccgcaaacatcggctctgccaagaacactgtgggtattggctgggagctcgacgccgttgcctccgtggtcatcggcggtacgatcatcaccggtggcttcggctacgtgctcggctccgtgctcggctctctggtccgctccatcctcgatccgctcacctctgacttcggtgtgccggccgaatggaccaccatcgttatcggtctcatgatcctcgtcttcgttgtgcttcagcgcgcggtgatggcggtcggcggagataaaaaatagcgggcttgcccgctcggtctccgcaccgaatacgacacacaccataactgaataggcgggatcagcccggctgctgtgatggcaaggtcacagcagccggcactgcccgccaaagctttctttctccttttcttcctttcattagcgtgtggggcgtgccccggggttctcccggggcacgccccacacgtgtttggaaagctgggactctattgatgatcggatttatgcacgcttacgtgccgcgcgaatgcggaacgcggtggccagacagcaccagccaatcaggcagataaccgtcatcgtggcaaacgtccatgtgccgccgacggcagtggcgtgagcaaactcagcggtgccttcttctcctgcgccggcctgagcc

SEQ ID NO: 1104 - DNA, 12854 bp, Unknown
  R13_10m  MAG No. k141_18195
gaattccgtaacgctgacgccgtctacctgaccgagtaccgcgggcttaccgttccgcagatttccgatctgcgtgaaaagctaggccgcgatacttcctacaccgtggcaaagaacacgctggcacgcatcgccgccaaggaagcgggcatcgagggtctcgacgagattctctccggcccgaccgccatcaccttcgtgaagggcgacttcatcgaggctgcgaaggtcatccgtgacttcgccaaggacaacaaggctcttgtcatcaagggtgccgccgctgacggcactgtctacgatgccgagggcgccaagaagctggcagacctcaagtcccgcccgcagctgcttgccgaattcgccggcgacgtcaaggcatcgatggccaaggccgcgtacctgttcaacgccctgcctaccaaggctgtgcgtacgatcgacgccctgcgcgagaagcaggagaaggctgcctgatttacgccctcacggcatgaatcagtcgcttcgataatttaaacaataaggtttattaggcagcggatctaccacttcgtccgccgccaagattgaaaggaagccataatggctaagtacaccaacgatgagctgctggaagccttcggcgagatgaccctggtcgagctctccgagttcgtgaaggccttcgaggagaagttcgacgtcgaggctgccgctccggttgccgctgttgccgctgttgctggcgctgctgctccggctgaggaagagaaggatgagttcgacgtcatcctctccgccgtcggcgacaagaagatccaggtcatcaaggctgtccgcgccatcacctccctcggcctggccgaggccaaggctctcgtcgacggcgctccgaaggccgtcctcgagaaggccaagaaggaagatgccgagaaggccaaggctcagctggaagaggctggtgcctccgtcgagctcaagtgatttgtgcggcataagccgcaatcacagcttttcgaggaaccccgcacctgtgtttcaggctgcggggtttccgcatactgagtagactagttgacgagggcgaggcggagaacgcgatccggcgtggaatcacaaagctggcaatgagcgaaagttgtcaattctgtgcccagtaatccgccaaaagccggtaaaagatgacacaatggcacgtagtgtggtcaaatagtgtgtccaggaaggcggtcacggtgagcgagtggacggtgaagatcaacggtgtcgaccggatcagcgtcaagccgggggagtgcgtggaaatcggccgtaagccgttacgcccccttgccgatgatggcaacacccgccttgacgtcgccgatcagaccaaatcgatgtccaaacggcacgccatgttcacggtaaaaagcaatggtacggcttcggtccgcgatcttggatcgaccaatggatcgtatgtggtgcgggaaaatggtgatttgttgcgcttgccggccaatgtcgagttcctgttgccgacgtctcccatgcgcatgcagttcggtgatgtgcctgcggacttcattcgtatcgacgatccagtggcaaagccactcgaccttaaggtgcctgatttgtttggctatgcggttcacgaagcaccgcaggagccggatgcggcggatatgtctgtcgacgatattcttgatttgcgggccggcgagccgaccgccatcttcagcgcggataatgttcgacgcaaggtcgacgagcttgaacttggctcgctgaatatcacgcagccagtgacgaaaaacgatgagccggccataccccgtgacctgttcgcggatgcgttggcccagcatgccgagcaggagaccgaacgcaaaaaccagcaggccatggactccgtggtactgccgaagcagcagaccgaacctgagtcgacgactgtaacgcccgcatccaagcacagcaggatctccggtattgtcccggtagatgccatcgcccatgccgttgttaagcacgctcccagcacaagcgagccggcagtggcgtcggcggcggttgttgaatccgatgtggtggctggcgcaagcaagtcagccgaaaacgttcagtccgctccgaataccgacgattctcagccggtggacgctgttgcacagcattctgaaggcactcagtccgaagccgcccagtctgaaaacactcagtctgagaccgcccagccgacaaccacccagcctgaaaccgctcaaccggcaaccgacgcacccgaggatcagcagctggcgaccgaaaccgaaaccgcccagcagtcggtctccgaagcgtatgaagcgtctgatatctactccacgggcgtacacactccggtcttcgagcccggctcggtgttcgagcgtgtggccaagggcgagctgaaagcacaggagccggcagtcgaagtcgatggcctgacctctgacgaggcaaaaaccacgcaagatttcaacgttcagttcgaagtcgcccgtcatcccgaattactggcgttcctcgccatgaatccgtacctgtacgacgacatgtattcttggctcgccgcccgtggcgaggccgatattgacgaagccctgtctcacaacaagggctatcaggaataccgcgaagcggttggaaagtgagtcgagagatgacccagagccagactcagaaccagaatctcacggaaggtctgaatcgcatccgtcgctggcgtgaccaataccgcagcatgcagccgccatcgccgctcgaggatgtgaatcaactggccgcgaagctggagatgacccatgcccatccctccggcatcgcccagctgttcgcttccggccatgttcggttggattcgttgttccgtgacacgggtgtgcttaaggccgccgaacgccatatcgggcgcgtactggatgaccaggccgccaagcgcaggatttccggcgtggcggagttgtcgctcgtggttggtgtggccacgtggaggggcaacgcgctgccggtgctgttgtacccggtgagcgtcacgatcgaggatgatggcttgtcgaccaccattcgattcaccggtcgcgtgaccctgaacgccgcgttcgtcaatgcattgcgtgagcagggggtgttcctggatgaggattccctgtttgacggtgccagctatgacagtggcactcccgaaacttccgcgatgttcgcccgtatttcgtccgaagcatcggagcgtatctccggcttcgccatcgagcgccagattgtgctcggatgcttcatggacccctcgtcgcagatgatcagcgaaagccgacagttcatcgaccagctggagaatggccccaccggcaatgtgctgttggacgcgcttgccggcgacaaatccgcccgcaccgcgctcaaagatgccaatattccgcaatacagtcctttcgacgtagacccgcatgctgagtacgaagtcggcgatgtggacaatacggtgcgatatgccgcgtcacttgctgccaatggccatagcatcgtggtcgacggcaccttcccgaagggcaccgcggagcaggctgtggccatcgcatcgcgctgcctgatgaatggtcgttccgtgctgtacgtgcccggcgtggccgagcagaagcgtctgttcatccagacggcctccgccaatgagatgaaggcgcaggtactggatgtatccgatgaacacgccaacgccgcgcttgataagcagctgattgccgcagtcggattccagcccggagtcgccacccagcgattcgaccagctggccgacgaactcgtgggcgtgcgctcgcgcttgacccgctatctgggcgacctgcacgggagcaacgataagtggaatgtgtccgcatacgagaccattcagaacctggcccgtatctccgtgctcccgacacaccccgccacccacgttcgacttgacgagtcaagtgccctgagcatcgccaacgatattgacacatggatcagcaagatggaacgtgccggcgagctcggcgaatacaccatcggcccggaagacaccgcatggtacaaggcgtccatcaccactgaagaacaagcggtaaccgcttaccagcgcgtggacgatttgctgcgtcgcttcctgcccgccacccgtgagcaggtggcacgcaccgtgcagacctgcggattcccggttcctcccaccactcgcgagtgggagcgtcaggttacggttttgaagaatctgcgacgagtgcttgacgtgttccagccagagattttcgagcgagacatcagctccatgatcgaggccaccaagccgaagagccagcgcaaggccgagggcacgtcgatgggattctgggagcgccgccgccacgtcaaggaagccaaggatctgctgcgcgtcggcgcgcaggtcgaggacttgcacgaagcgttgaaggtagtcgccaagcaaggggagcagtggcatcagttcgtgcctcacggcggttggccggtgctgcccagcaagctcgacgagatcatctccacccaagaggcgctggtcagcaatatgaccgcgctggataccgtgctttccaccacacccgctggtggcaatctggaaaccgccgatttcgagaaggtggaagcacgcctgaaagcactgctggatgatcgcaaggcactggacaccttgccggagcgttgcctgctggagcaggaattcgcttctgccggtctgaacgagttggtcgccgatctcaacgctcgccgggtgggcgtggagcaggtgcgtggcgaagtgcagctggcatggtggaccaccgtgttcgaggacattgtgcgttcttccgccatcatctccaaccaggatggtgctgcgctgcagaccgcatccgaccgcttcgcacaggtcgatgtggagcacgtgcgctccatcggaccgatggtgtcgcaggaatccatgcgccgcctgtgcgacatgctgttctcccgcactcaggaagccaaccagatgcacaccgtgctggcagggcgcgccagtgtgtcgctgagcaggattcgccgtgatcatccggagattctggccgcggccaagccgattctggtggcctcgccgggtacgctcgccgcactcaccgagccgggtgtgctggctgatgtggcgattctcgatgcgtgcgcgcacattcccgctatcgagttgctgtccatcatcggccgcgtgcagcaggtggtggtgatcgcccactgcgcgacggtaaccagcgaaagcgtcaagcagctgatcgacacgttgcctcatatcgaggtggatgctgccccgtctcgccgtgcgccgcgcctgtccgcattccttgaatccgagggatatggtcctgttcgctatgatgtggccaccgagccggctgccggtggggtgcggttccaccgtgtggaagcgagcggtgtgccggttatgtcttctggtctggtggaatccagccagtcggagattgatgaagtggtgcgtctgattacgcaacgtgccgccggttttgctgtggttccttccagctatcgacttgtggtcgtgatgttgaccgacgcattccgcacacgcttgggtgccgaattgaagtcgttggcaggcaaatccaaggcgatgggccgattcctgcgccatgtgcggctggtttccttgcgtgacgtggccggaggtcgtgccactgacgtgattctgacgatgtgctatgcgaaaaccacgcacggacgtctgcttcagcagttcggtccgctcgaaagcacaggcggtcgcggactgttgctggatgccctggcattggcggaccacagcttggatattgtgtcggcctttggttccgaagatttggatgaagaacgactgcaccagtccggtcctcggttcctgaagaccatgttgacgtgggccgaacagcttgacgaccgtccggtgcttccgttgcgtggtgcggcaggcggcaacgtgctgttcgacgatatcgccgacaggttgcgcgcgcgaggactgaacgctgctgttgattatggattcgacaagggcgtgaagattccgctcgtggtgggattgaaggacaagccgtttgccttggccgtgcagaccgatgacgcgaactttatgtccgtgcaatccacgcgcaggcgtcatcgtttgtcggcacaggatctcatttccttgggctggaatgtgatgaccgtctggagtgtcgccgccttcgtgaaccccgataaggaagtcgaccgtatcgtcagccgtatcggcgagatctaccgcgaggttgaataatcatggcggaatactcggctacacggcgcacaccgcgcaagcacaagcgcgtggtgatgaaaggcactgagcagtttgacgctgacggcgtcaaactcgagcccggagacatgcagaccgaccaacaacggcaatccgacgacgacaaacgcatcctcggcgaactgcctccacactgggctgttttcaacgagcgcgagtaggagttgaggcgcactctgtgcgctctgatgttgtgttttccgcagccgtacggctgcggaaaacacaacatcggccgaaggccgattccgcttcctaccgcacaacggccataatcgctccggcctgttgcagctccataaccttggacgcggcctccggcggcattgcgaacgacaccagtcggtcgttgcttcccaatgcgccagtcgtatccggtttgtcgacattcatcaccgtggcgttctcggccagcgtgcaatcggcaccttcgcaaccgacggcggaaaccagtctcacctgatcgccggccaatacatcgtcgacgctactggccaagcggacttcaatcaccgtagtgccggtcggtgctacgggcgcatctctggccatatgcgtggaaatgggatcggctgcttcgatatcgatttgcgccaccatgcccaccacatcctcaatattgcacgcccaagatgggcctatcgcagataccggcatatcagccaactgaacgtcggcggccagaataatgtcaccccgtcgaatcgagcgagcggccaccaccatcggctcggtctccaccacggccaatacggcttcaagcccaaacaacactgcgagtcccacgcacaacgcagcagtgagtcggcgcaaggcatccgccatgcgccgtcgccgcaatgaaccgcgcgcaggcggcttaataaacgaaaaggtcaccatgcaaccatggtgacctgaagtttttcgtaagcgcaagctgaatcgacctatgtggttctagcttgccaagttatccacaacgcttcaaacccgtgcaacagacagtgcccgtagtgccaatatccgcggcataccgccgtcgacaccgtcgtttacagaggaaaaacggggagccgaccttacttgccggatttgtcggtgcggtagaatccgtgacccttgaactcaatcggcacggcggaatacaccttgcgcacctgctcctgcgagcacttggggcacacggtaatcgggtcgtcattgaacgactgctgttcggtgaagtcatagccgcagttcttgcaacggtaatgataggtaggcaacggattcctccaacaaagtcatatttctcgcgcatggcgtgcaacaccatgccgtgcaaccgttcatatcctagtcgccgccctgacacattggcgttacggtcttactggccagcctgcttttgccactctggttccatcggccagtgtgcgtggctggttggtcagtctggcttgcgccgagtatcttggccggccggtcaactcagccggcccgattcgccaagccgccggtatccccccggcgtcagcactccgtcggccggcacatcatgtggttcggccggcaaatcggtgtccaacacctcccacggccagcacaccgcaatcagggggcacgcgggcttgcgtcgagccaaggcccggtcataccagccggctccacgccccagacgattgccttgcgggtccgctgccaaagccggggcgatgaccagatcggccttctccaacgcttcgggcggtagaactgcgccagttggctcatcgggtctgtgatggacggtgctgggagagctgcagctaccggcattgttcgcgccacccactgcatccatcgagcgcaaggattccaatgaatccagcacactccagccaatttccaacccagatcccaatcgtggcaccaacacgtggcagccatgagccaacagccatcgcaacagtggccgggtttcgatttccgaacccatcgacacatatgccgccactgtggaaccatcctgaatcatgtgtgccgggaaccgtcgcaccagcaattcaccggccgctccacgttcttccgctggaatgctcttgcgccgagacagtatatggtggcgcagcgtcgctttatccatcttttctgttttctccgtgccgctgtgggcgctgccgatattcatgccattgtccgcttcgctcataccgcacaatctagtgtttccaccgtaaaacgaaagtggccgaggcgaaggcgcaagcccttcatatggctacaataaaggccgtgtcagttttccagtcgattaaagaggcgttcaagctggaccaccagatccgtccgccgcgcctcacccatcccggtttcccgataatcctgcgccccctgaccatggacgatgaggacggctggaacgaagtgcgctggcgcaacaacgattggctggcgccttgggaatccggcgacccgatgcatggcggctccatcaccttcaatcaatgggtgcagcgacagcgccgtaatgagcagcatggcgtcggcgtgattttcgccatcgaataccagatgcgtatcgtcggccagatttcgttgggagccatcgcgtatggtgccatgcgcaccggtgtggtcggatattgggttgaccaacggtacgccggccacggatttgcgccgatggcactggccatgcttgccgattgggcactcggagacccattcgggcccgcgttgcatcggctggaaatcgccattcttccggataacgcgcgctctttggctgtagtgcgtaaggtcggagcccatcatgagggactgcgcgagcggtatatgtatgtcaatggccagtggcgcgaccacgtaacatttgcgctgttggctgaagatatggggcaagggttctctgccagactcgccgccaccggttccagataagcgtcgaccggaagaattccgctccgacacgcccggacggaaagccccagttcgtcggtacgtctcctatccttgactctatgggttatgagtcactgagcactgtcgtcgtgctggtgattgtggcgattattatcgttgtatggctgcccgtacgtacggccaacggcatgaaacgtgtggacgagcaccggcaggatcgttattcgccttccctgcatatcgttgatgcagagaacggcagacgattcggagacatcaagccgcataaggcgaaaggggcagcaatgccagcatcaacaccgtcagcgaggctgacacctgagcacatcgcccatgtgcgggaactgcgccgcgcggccatccgccgccggcagattctcgccgtatgcctgcttgccataaccgtgttggtgtttgccgtatcgttccccctgcatttcagcccgctgcttgctcttattccgttcgtgctgttactgctggtgctggtgctgggagccaatgcctcacgccaggcccggcaatgggagcgcaaggtggtccgctacgagcggactcatagcggtacgggctggtccaagaaaccgtctgccgagtccaaggacagcaagcgtgtgaacaaggccgaaccggttgcggccgtaactgcgcctgccaaggagctttccgagcatgttgaggatgctgccaccgaggtcatggaacagcggcagattcgccgcgcgttacgcgatgccgagattgagcaggccaaggccaaggcgttgcgtcagtccgccgccgcatatcaggccgcggcggagcacgccaaacagtctgagaagtctgatactgcacagtccgccgccaataagcctgccgccgaaccgtctgctatggtcgatgaatccgctgaccgtaagtccgctgccgaaaccagtgaatcttccgccgcgcccgatgcctccgctcgcacggataagtcgactaagtcggataagtccgtcgcccctcgagttgaaccatcgcttacggtgcgtgacgagcgtgatgagcgcgacgatgccgctgccgacgctacgtcggaactggccagcgtacgccctgcccgagcactggatgtcttcgatatggccacctcgcaggatctcatctccttcactttgggcggggaacataacgccgacaacgctccggaaagcttggagatcaagtcgacccgtcaggtgtccaaggcggaacctgtcgaacccgcagtggcggaaaagttgattgacgaggcccgagccgtcaaggccgcggacgatgccaaggccgccgatgcgggcaaggctgtcagtgccggaaacgctgtagacactgagtcggagcagcgcgatgatgccgatacgaacgccgctacggacgccgatgacgaggctgcaaacgccgcccagcgagccgcattccacgaatccgaggagcgtgccgacgtcgaagcgccagcggcgaccaccgattcgttgggcgcaggcctggactccattcttgcccgccgcggcaactgagcgttgcgattcgccgattttctctcacagcgttagcactcgagttggcagagtgctaataatcgcgctacgatgtgtcctagcgcaaagggacaacgcaagtgatcgtcagcctcttgaggcgttctggcgcggcattatcgaactacaagtagatacgaggtgacccacagtgtcgattaagctcacaccgttggaagacaagatcatcgtcaagcaggccgaggcccagacccagaccgcttccggtctgtatattccggacaacgccaaggagaagccgcagcagggtgaagtcctggccgttggcccgggccgtcgtgacgacaagggcgagcgcatcccgatggatgtcaaggtcggtgacaaggtgctgtactccaagtacggcggcaccgaagtccactacgagggtgaggactacctcatcgtcggcgcgcgcgacattctcgccatcctcggctgattagtcgcctagcgaacttcaacaaccccgactgttcccacgaacagtcggggttttctcttgtcaggcggaaaggggctcccctcagagaggggagccgaaaaccgctcccgccaaacgcccagccatgcctgctatgcataaaggtgcatgcgcgcagcgtagttgagttcggcgttgcaccgcatctacactgggtaacggattggggtccctatggaagaggctcagtcggcgacttggctgagcggcttaagacattttgcacaagacggcagtaggtcgacggtatgttgtttttttccgtgtcgcaggttcgtggtgtcgtcgctgtgccaatggttgtctctctaccgacgctgagtgccgtggcatgaggccagcgtcggcagtgggccacgaaatggcgatgtgccgatgctgagccgcgttggcgtcgttatagggccagtttttggaccattgccgacggcaaatcggcgttttgtgtcggcgacggtccaaaaactggcggtctgccgacgataagtgccgtcatcgtcggcagaccgccaggtattgtccctgtgccgacgtaaaagccctgccatcgtcgtcaccgagccatcttgtgactcactgacggcggcagcagggcggaagaggccgaaatcatgcgcgcggtgcggtctcacacctcgaatccggcctccaccagcgcgtgatcgatgtcgcgaatcaaatcgtccgtatcctccagacccacggccagacggaagaagccgcggtggaactcaggcgggtacaggtactggcgctcgtcatcctcaccgaggaacacgatcagcgattagtcatggccgagcgagacggcagacgtaatcacattgagcttggaaacgaatcggttgtgcccgtcgtggtcggtgtcgaggccgaacgacagcacgccgccgaacccggagtccgggcgggccagctggctggccgccacctcgtggtgcaggtgcgattccagaccggggtacgccacgaaacgcaccacatccagcgattcgagatgcttggcaatcgccaaggccgaggcgtcgtaggacagcgcgtaggtgttcgccagcgtgatggggcgacggatcgcgccggtttcggcgtcgaccccgttgccgaggtgaatggccagcgtgccgaatccgagcggctggtcgtcgaatgattgtccgtgatgtacaagatcagaagccatgcgcccagcatgccggcatgcgctgtgccgccgcaagcaggcgacgccactcgaaaaccgcgccattgcaaggttctggaacaccatataagaaaaatgattggtagaagtgcggggtgcagccttggtcggggctgtttgcagggccgaagcggaccctgaaaccacgctgtgagacacgccgataaaaccgcagaattccgcggtaaaacaaggttcgcgtagaggtcgatttgcgtacttggaaaatatgtggttatatagccaagttgcctgttgaggtcaaacaccgcggcgggaaacagactggcggatttcccaagcggtcaaagggagctgactgtaaatcagccgcttcgtgcttcagtggttcgaatccactatccgccacgccccgatagctcagtggtagagcacttccttggtaaggaagaggtc

SEQ ID NO: 1105 - DNA, 48284 bp, Unknown
  R13_10m  MAG No. k141_18460
acggcaccatcctcaacgtgatcggcgacgccgtcggcgccggatggttcgggctcggccccgtctacccggccacgggaggcatcctcgcggtcaccggcacgcccgccaacgcggccatatccctgatcgcgcagctcgccgtcgccatgctgctcatggcgttgggtggatggtgctcggcacacccgcgcacaacgcgctgaacggcaccggcggaacccccaccgaaaaaacatcacacggaaagaagacgtcatgttcatctccatcaaccacctgaccaaggacttcctgaggaagccccgcgcgctggacgacgtgacctgcgacctgccgcacggcatggtcggtctgatcgggccgaacggcgcaggcaagaccacgctcatgcgcatcctcgccggcatcatccgccccacatcgggccaggtactcatggacggccacgatctgaaggacgagaggacccgccgtgcgctcaaacgcacgctcggctacctgccgcaggacatcgaaccctacccgcagctcaccccgctcgaattcctcgactacgtgggcgtcctcaaaggcatcgacgacacgcgaaagcgcatgcgccaggcgcacgagctcatcgaacgggtcgggctcacggacgtggccgaccggcgcatcggcggcttctccggaggcatgcgccgccgcgtcggcatcgcccaggccctcatggcggatccccggctcatcatcgtggacgaacccaccgccggactcgaccccgaggaacgcatgcgtttccgcacgctgctcgccggcctcggcggcgaccgcaccgtgatcctgtccacccacatcctcgacgacatcgcccagacttgcccatacgtgttcgtcctgcgccaaggccgcatccgctacgacgggccgaccgaacacctcaccgaacacgccacgggccgtgtctggctcacccagccatccaacaccccgccaccggccggcatgatcgtcgccaacgccgtcaccaccgcacgcggcgtacgctaccgcgtcatcaccgacaccccgcccgccgacgcgcatcccatggaccccacattggaggacggctacatggtcctcatcgaggaacaccccgaccagcattgacggcagacgaacaagcaccccgaccaccaccgaacacgacaaaggaaaccagcatgaccaacacgacacacgccatccaaaccatcaccgccaccggcctcgccgccatcatggccctgggactgaccgcctgcatggacggcatcgaacaccccgaaaactaccctaccaacggcagcaagaaaatcaccgcgaccagcaacccacaggacatcagcgccgaccaactcggccacacatggcccctcaccgtcgaccacggcaccgtcagctgcacgcacaacagcaaaggcgatcccgtcatgcgcttcaccgcgcccgacggcacccaatacgccctcaaccagaccagcgacaacaaggacctgcccgacatcaatcagctcctcgccgacggcaaatccaccggcaccctcaccagcttcgccttcaccgtctgcgacgtgaaataatcatgcgcccgctgccggcggccgtgtcgatgtcgaccaccgtgcgcataccgcgagaatcctgtgacgctgacggttcatcatcgtcttgcagtcaggaccggcgcggttccgccgccgttttctccgtaacaatcgcgtatagcaccagtgcgaccagcacgacgagccgggtccaatcggaattacggatgagcagcccgacgagaatcaggacgtcgtagaacagcgtgcgcgcccaccgccacgggtattccttacggacgcgcatcgtctccgccaatccccagatcagggcgcagacggcgatgataccgttgaaccacagcactatgggcctgccctgcggatcggtgtccggcatagcgagattgctgaagaacatcaccagagcacccgtatatacggcctcgggcgcgaccgacaatcttccgccttcaacgcgaggatctgacatgattacctccttattgggggatccgtcaacgctaacgaatcatgcgaaaaaccattatatttgaatggtatgagcggggctcaagcattcacaacatgctgtcaagcaatcgtatgacaagaatcatccgtttacggcatcgccgccggatgaccacaccagcagggcacccgcgagggagacgacgatgacgccgatcacggccaccgcggtgatggtctgtcgcaatatcagcgcggcgataatcacgctcatggcggggtcgatggagaacagcgtgccgaccacgcgcgccgacgtgatacgcccggacaacgtgtccatcgtgtagggaatcgcaactcccagcaccgccgaggctgcgatgacgccccactgggcggccgacacatgcggcgcgcgagtgatggataccggcgaagtggccagcgccgcaaccgtgaccgacagggcgagcccgtcgagcccggtgcctgccttgccgacccggtcggcgaagagcgtgtacaggccgaagcacacggccgagcccagcgcgaacaggtagccggccggattgaagtagccgcccggcgtaaacgagatcaagcccacacccaccagcgcgaccaccgcgcacaggccctcgcgccagtgatgcgaaccggccagggcgaccacgcagggtccgaggaattccagggtgacggccacgcccatcggaatgcggtcgatggccgagtacaggcagacgttcatcgccgccatcgcaagcccgtagattacgatgcccagccattcgcctttcgaccggccagccagtttcgggcgggtgagtgcgagaatgacgatcgcggcgaccagcatgcgcatcgaactgaccggaattggtcccaacgcgccgaacaacgacgccgacagggacgacgacgtctggatacccaacgaccccaccatcaccatgccggccgccgccatcacacggccacgcgccgaacgcggcgcccgaagcttgcccaatacccctcccctgtcacggccattcccacacgacctctgcgccaccaatgatagtgttcggcgaagactcgcgacgtgcggagtcgactttgtatggcgggatcagcggaaagcggcaggctcactcccgcaacggaatacggtgagaaagctggctgccggacgattacgatccgaaacagtgcacccgtatacggcttcggtcagacacgtttcaccgccttgaacagcagacatgcgcttatcgcggcgatggcgacgccgaccggaatcacgtaaccggcgaatttcaccccgttcaacacccatgtggttggtatgacggcgtacagcatcggcgcgtcctcgaacatgccggaactcaccgtaagtccggcgacgatgaagaaggcgacgacgttccaggcgacgagaggactggcatagagtcgcagaacgaagcatgccagggaaaggacgacggcggtgaacgcaagcatcagaatggtacgcgacgaaagcggctcgttgacgacgagcccgacggcaagcccgtacagcaaagtcaggcagacgttgatcacgacgccgagcgacagcgacttcacgctgaagcgaagcaggagccggtcgtggatgctgaaggaacggtacgaggagggcaccctcgcatgggagaagacgagaccggccgcggttacgggaagcgccatcaccatcgccgactgcaccaccgcacccgtgttcccgtaacgcaaaaagaacaacggaaacagcagcacggccacgaaggcgagcgtcgaccagcggatcaccgccacacgctcaatacgcgataggaacttcatttcctctccactccttcgcgacggaaccggctcaacagcacataggcaaccaaaagcaccacgatcgggacgacgaccatcacggggccgacggacgctcgactcgccgcttccgccggcgacatcacggtgccgttcaggttcagcccgacggtccgtagggcgttcgcgacgtagggcgtcgcatagtcgggaaggtcgcccggcaggagaatccatgcatagcaaaggatggccgagacgattccggcggttctgggatcggcggcgatctcgacgatcgagtagatcagggaggtcgcaaggctctgcagcacgacgaagcacaggacagctgccagatgcgggtgcattccggtacccgtcaggaccatgatggcgtcgaagcacagtacgccaatcaggttcacggaggtcaggatcagggcccggaacacggccctgagcgagcatggcgtccacgcggaatacacgtggcgcggcaggccaccgtagtgcgccttcgcgaccctggcatcgcatgcgaagagcagcgaaagacagatcaacggctgggtggcggtgaaatagacgcaataccctccggttatcggggttccgttcgccgcgcttgagatccacgcacccagcagaagggacgagacggccccaaacaccgcggcgaggaaataccacgtgttccagtagtaggcgaccaacgcgcgaacaggggaaacggcgttcaagaccctacctcccctgatacagatccgcgaggttcaccccggtcagatccgtgacctgcacggcccggccgtgacgaatcatgatgcactcgtccgggacgccctggatctcatgaagcagatgcgtggagatgacgacgcagttccccttgtcccggtaggcgcgaagcgtttcggacaaggaggctatgccatcggggtccagaccgttctgcggctcgtcgaggaacaggaacctcggatgcggcacaagggcgaggcacagctccagacgctctttcatgcccgtcgagtagtccttcgccttccgcccatacaccgcgcgattgatgcccacaccgtccaacgccgcctccgggtccacatccagaccccagaacgcggagaccacctcgacgttctctctaccactcaggtaaggaaagaaactgggatggtctatcgccgcggacatctcattgatattcgtccctgtgtacgtgacctctccgctcacgggctttatccgtccgagtagcgtcttcatcaacgtggttttgcccgcgccgtttgccccaagcagacagataatcctacccgtgctcaaccgcaggttaatgttgctgacgattggggaacccttgtacccgatcgagagattcgtagccgatataactggcataatcacccttcacgaaaggcgggcctgaaggcaaaggcaggatgccttgcccagacccgcgcgttgcaatgtcgccgctattgcacccttcagcggccgcaaacgcaacaacatgtcaggccaatcgcatgacggtagctccatgctccctcgattcgccgaaactatccatcggccaaaggaatgaacctgcgcatcatccgcaaggacgatgcatccgactcccatcgcacacttgccgccaccggtctcccccccccccaaaaaaaaatggcgaagggcgggttccagtgatcgtcgcaacgcctggctgactgatgggagggccaggtggacaggtgggtgttcgagggcgtggagtacgcgacgcgtggcgagatgtgcgcggcgcggcggcgccgctacgccgagctgctggaggcgggcatgaacttcacgcaggccgcgcgggcggtgggcgtgtccaaacgcaccggcaaggtgtggcgcaacggaaggacacgatcgaacggcaggaacgagaagccatcggtggactggtatcgttccaccgtggacattccccaaaagatcagttcgaggtatctgagccaggacgagcgcatcagcatcgccgactggcggaaggccggcatgagcgtgcgcgggatcgcgcgcacgctcaatcgtctcgcgtcgaccgccagccgcgagctggtgcgcaacacgaatcccgcgaccggcatgtacgagccgtaccggccccagcagatgagcgcggacggcccagacgacccaagcccgcgaagatccatacggtgcccggcctgctcgcatacattcgtgcaggattgcgggcgcattggagtcccgagcagatcgcggggcgcctgcgcgccgatttcccggataatgatgctatgcatgtgtgcgcggagacgatctaccaggccatctacgtccaggccaaaggcgaactgaaaaaggacgtcatcaaggccctgaggagcgggcgcgcccaacgccggccgcacgggcaggcgggttcgcgcaggcccgtttccgcgagctcatgatcatgatcagcgagcggcccgccgaagtcgaggaccgggcgatacccggtcattgggaaggcgacctgatctgcagcgcggccaacaaaagcgcgatcggcacgctcgtggaacgctcgacacggttcacgatcctcctgcacctgcccgacgggcacgacgccaaacacgtccggcaggccgtcatccggaaaatgcaatacctgcccaagctcctgaggaactcgctgacctgggaccagggaagcgagctcaccctgcacaaacgcatctcgaccacgctggacatgcaggtgtatttccgcgacccgcattcaccctggcagcgcggcaccaacgagaacaccaacgggctcctgcgccaatacttccccaagggcaccgacctgagcgcataccccgaggactacctcgacgcggtcgccgaggaactcaacgaccggccccgcaaaacactcggctacaggaaaccatccgagaaaatactcgaactcatcaacacagcatgatacgatcgcaccaatccaagaccgccatcaagagcggcaaaacacacaggtgttgcaaccaccactaaaatccgccaagcccaccttgccgaatggggtgtcgaacatggaatccgtcttggggggggcgtgcggtagtcgcattcgtaacaacaatccgcttgaatgagctgctgagcaaatagcaggtctacatgcctgctttgaaccagccgatggcgatttgagtgcgattgcgcaggcccaaagttgcgaggatacgggtcacggcacgtttgacggaggcaggttcgacggtgagttgattggcgatttcctcgttgatgagcccttcggagatgagtgcgcagatttcacgctggcgaggggtgagtgcgtcgaaagctttgcgcatttcttgctggcgctggctgctggtgggatgcggaacgcctcgtttaagcacttgtctggtgattcgtggggtgagtattgcgtcaccgttggcgatggcgtgaaccgcgtcgatgaggttgtgcttggtgacgtccttgagcaggaagccgctggctccggcgtcgagaccgccaaaggcgtaatcgtcctcgtcgtacgtggtaaggatgagaatgctgatggtgggccagcgtctggtgatgcggcgagtggcttcgatgccgtccataccgggcatccgcacatccatgaggattacattcggcaatggacgatgctgaacggcgagctgttcgagcgtctcgatggcggatcggccgtcagcggactgggcagtgacgacgatgtcggaagcatcgtcaagcatgagttggaagccaagtcgcgcgaaacgctggtcgtctacgagcattatacgaatcatgcggtgtggtccttttcgttcactccgttggacgggatggtcgcctcgacgacccattcgccgtcttcgtttggaccgtattcgaagatgccgcttgccgattcgacgcggtggaatagacggacgagcccagtaccgtcatccttgcgcgcgtccttgcgcgcgggactgccgtcattgcggataatcacggcgacggtgccgttctcgctgtggttccaggcgatgctgatatgcaccacgttctgtccgtgacgtatggcgttggtgatggcttcgcgagtcacatcgaaacacaaatcagcctgagcttcgtcatcggcgcgcgtaccagtctcggtgaacaccgtgacgatgcccagccggcgtgcgtgcgcgagaatcggccgaatgtcatcccatgaatgctggtctgattcttgggtgtgcgtatcgtcaccgttcgccgctccattgaactcggtcagtgcgcggacggctttgcgcgtgtcgcccagactctctcgtgcgatttcgttgatgccgtgcagcgcatcctccacgcgtgggtcatcggttttgccggccagaccctcagacagtgcgatgattacggtcagatcctggcccacactgtcgtgcagttgaccggctatgcgcgaacggcgtattgcggcatcgcgttggaaggccagctcggctgcccgccggcattcctcggcagctttgtgttcggcttccttggcctgttgcctgccacgtactgcaagcgcgccgcctcccacggctgccaacgttaccactcgactcacccattcggtcgcgagaacgtccggatgcaccatgatggccgacgcggtcatcgacagcatcatgccgatgcctccaacgcacagcccgcgccccctcgctgtccgggcgaacgcatagcaggcgacgagcgtctgaatcatcacgattgagtccaaccgccagtacgaggcaactattaacaataccgcttcaagcgccaaggcaacggctggcagccagtaacggacaagcagtatcgcactgctggctatggtcatcgccagcagcagagccaatcccagcggatctttggcaaacgtatacatggtgtcggccggcgctccgatcgcatgctcccacagcatcgctgcacattcgaccacggcgatgaccagtggcacggccaggaccgtgaccttattggcctgcgcggattgcggtttcatggctcccattgtggctctttttgtatgatgttgcgtgcatgtcagcatgtgcgtatcgtgtcggccacgctgcggtgtagcgcggggcgaatctgcgtgaactggatgaggaacaatgccagccagcaggccgtgcccatgccgattacgcccggccatgggatttcggccacggggatgccgacgagcgccgcggatcttgcggcgaaaacgcttgcgctgacggcgaccgggatgagcgagagaatgaccgcgccggcggccagctgcaggctctgccagagatacatgcggatcacacgacgtggggacaggccgatgctgcgcagcaatgcctggtcggcgaccatgctgcggttcgacagggcgatgaccgccatgctggtggccagggacacgatgcacagcatcgttatgagcagcagcgagtccgcgtagttcaggctcttcggatggccgcccaaggcgagtatccggccataggatcgcgcgcaggtcagcagggtgaccgacagtcccatggcaagggcgagcggggcaatcgtgttcgtgttgctggcggccttcgcctcggcggaacgggcggcgagcacgccggtcgcggacccgcacaggcgacacacgacacgtccgatgcccaacagaatcggaatcagcatgctgacaaggatgtacatgccgaacgaggcgatgatgccggcccacagcgcgctgttgaatgtctgccccgcctcctggccgaacgcgagcgcccgtggcgtgcccatgccggagaacgccaatgccagcgccgccgccatgacaatcaaaccaagtgcccagtgcgcccaagaccgccaaccgtgccgtatcccgatggctcccgtgccgcgaatcacctcgatgggacggatcttcgctgcgcgcagcgaggggatggacgcgcccaacatgcacgtggccacacccaacagcagggatccgagccacgcggccatcgacggcgtgaacgcaggaggtgcgaacgagccgaatccatcggcgaagctttccgcagccatggcgttgaactcgggaaccgccagcaggctggccggcactgcagccagagagccgatcagggaaccgaacaggctcgccacacccacgagcatccacatgctggcaagcacctgactcgggctggcgcccataagccgccattgcgcgaacgtgctgtgaatacggttgaccgtggccgagccgaccaccgtcaacgagaagaacgcgagtaatgacaccaccacatagatcgtgaccgacaccatgccgaactcggccggatcaagacccgcctgccgcgcggccaatgtgaacgacggagacgaggtccacacgaattggttcatgcatatgcccaccagcgtggtcaccactgcgaccaccagaatcgtgggtacccatcccgtgacattgtcgcggaacacacgcagcacatacctagccacgatgagcctccttccgctgctgcggatacgccacgcgctggaccggtcggcccggttggacggattggataggctgggcgttcaccatcatcgggccgacagaccgcgccgccgcaaccaacggcggcgacccggccggtacgaaagtgcggcgtatgccatcggcaatctgctcggcggtgagtctgccagcgatgtgggtgacctgaccgtcgcgcaggaagatcacgtggtcggccaaagcggcggcatccgtgtcatgcgtgaccatgaccacgctggagcccgcatccgccagctcgcgcagcacctgcagcacaagctcgctgttcgcggtgtcgagcgcgccggtcggctcgtcggcgaacaccaccgccggacgcatgagcagcgcacggcacagggcgacgcgctgctgttcgccaccggacagggcgcttaccgccgtcttcgccctctggcgaagaccgaaccgggacagcagctgcgtgacctgcacgtagtcggccttgcgatgggcgagcgagagcggcaacatcacgttctcctcgaccgtcagatacggcacgagattgtattgctggaacacgaaaccgatatgcccgcgaatgaaccgcgaacgccgttcctcattcagtgcgtagacgtcggtaccgccgatggtcacccgcccggaatcgggcctgtccaatccggacagcacatacagcagcgaggtcttgcctgcgccggacggaccgacgatcgccgtcaagcccgctccatcgatatccaacgaaacattattgagaacagtctgcgtgtttgcgggtcgggaggcggttcgagcatcgaaccctgtccgtttcaccagtccgagcgcctgaatcggtgtgccggcattttgccaagtcatgaggtagccccctgtcgtgaaagttgacgccgtttttctcaaccttcgcgccaggggcatggcaggtcgaggtaaacacggaaagtgacaccctagggtgacagattccagtagcgttccatgaccggcacccaatatgccctcaaccagaccagcgacaacgaggacctgcccggcatcgtccaactgcccgcctatgccaagtatgatggacggctgctcgtcatacttggttcctccgggaagcgaatatccttctgtcgtttgcggaaacaagccctgccgatgcccaagaccgccagataaagcaggaacatcacgggcacgacccatgtcacgtaccgccacgggtcaatctggaacgtatcgaagacgatgaacatgacgccccacacgttgatggcgacgatcgccagaatctgggcggccgccgaatcgaacctggattcggccgggctggtatcgttcgcgtcggccggaacgtcaggcgtccgcccggcgcgacgcatgaagccgagcgccgcccacacgatggccgccaccaacgccacggccgccggcaccaccagcttccagaactccccgtcattccagccgtaccggatgacggcgcacgtgatggccgtgacggcggccacgcccaatgtggcggaagcgccgaaaaaccacagcagaccttgattccgacgcccaccatgggaggcccgcacctcatcgtccgcaaccatatcgtccccgcattccataaagttcgacgcgtacgcatgccatctcaattatggcactcaaagagtcaatcagacaacatgctgtcaagcgatcgcatgacaggaatcggctatccgtcaatgccttagggtgctgtcgatgcatatccgattgaccgatgcttctacatgcgtgccgacatgtgccggtccttcgcgtccgcgtacgcattcttacatcacgacctcaaactaatctacgaaaaactttaaacagatatctatttgattttaatattatttatggtatacttaattttattaaacccgccgtgaattgaaggaggcaggtatggatacgacgatgatcccgccgtggatgtcgaacctcgatgacgaggatatgacgttcatcaaacggtttctgctcgcatcaggctccatgaaggaggtcgccgcgcagtacgacgtctcctaccccaccgttcggcttcggctcgaccggctcatccagaaaatcaagttgggcgagcagatcgagaacgagccgtatatcgcgctcatcaaacggctcgcggtcgacgacaagctcgacttcgacaccgccaaaatcctcatcagcgaatatcgcaagcagctcaagcaaggagagtaatcatgattggcgccacaatatttgccgtagtgtttttcgtgtttctcatcgccatctgcatcggcttcatcatattgcagatcaggctttcgaagatggacagcaagtggcccggtctggtattgcccgccatcacattgctgctgtcgcttgtggcggcgattaccgtcttcgccagggcggacatcggtgcgtatggcaacatgtggaacgtcgtgctttccgcattcatcgcgttcctgtccaacaacgtatccaccatcgtgctggccggcatctacttgtatcagcgtgacaagatcaatcgtcgcgccgagctggcccgtatgaacgttcaggacctgtaactcactgtgcaaaacacgcagactgaaccctacgccgcttatgccgactcatcatcttttgcgccgcttcgcgcagcttggatgattaagccggtgacgtggtcgcagggttcgtcgcgcaatcggagccggacgccctgtcatttcggctgattccgtacatcctgttccgccgcgaaccgttcggcgatttgccgtgcgtggatgttcttggcttcgttgacgaagtcggcgcatgccttgctgccgtagagcgcctcaccacacgggtcggcgaaacgcggatcgccgaccagcgcggagcgaatggccccgaacgagccggacagcggcatggcgttcatcacggtcgcggtttgattctgtgccgcccgggtgcgggcggtcttgaccagaccggtctcgtcgcagtagcgcaacgtgcgcgtcgtcacgccgctgatcaatgccgcctgatcaatgggccacaaccggcccgtatccagcggattgccctccacatcgaacgcgccggaaccgttgacggcgttcgccgtgttgtcgttctcgttcatgatcgatcatcccccttgaagccgattatcctctacccgccgtgcgtgtttcgcggcgttgccgtcaggatagacgtttacgcaacgtcaaccgcaatcgataatgggatgtatcgttcaagccaggcaatatgccgtcaagcaatcgcatgacagcaccatgttcggcacataccagatggaagaattggcaaaccttaaaaataccgcggttattgctgtgccgagaacgccaatatgaccatagacgtgctttcccgctacacgttattcacctgtcatgcgccgatatcaatcaaaagacacttgcataaccaccgctacgcatcgccaataacataccgatgagccagaatgaggcccaggccacgatgctaatccgtaaataatactggtcagagtggcaggtacattggtcctatggctaagcgcaaacatatcggcactgttgttattgcaatactggtcgctattctgctgacggtgggcgtttccggctggctattctggcagtcggtacaacgggtgatcggcgaggcgcagcaggcgggcgaatatgcggctgaagcacagcaatccgtcgggcagggcgacttcaagcaggcgcttgagcagatggacagcgctggcagtcacatcgtcacggcgcacgacgaaacccagggcgcgctatggcaggccgccgaatacgtgccatattacggttcggacgtgaaagcggtgcgcggcatgctgggcgcggccgccgacgccgcgaccaacgccctgcccaaaatcgacagtgccgcgcagggcacgttggtggacttcaatatcgaagagctgctgtccggcatgaacttctccgacggcacgctgtccattcccaaaatcgcctccatcaagcaggatctgtccgacgccggcgtggtcttgaagcgcgtcaagacgtcgatttatgcgctgccgcaaccccacacagaacagatcaccgaaatggtcaaccagggcaagcaggtagtggaccaaatcgatgaggctttcgacaccttgaacaccatcatcgagaagattccgggctgacgtcggttcgttcttgtcaggcgtaccattcgggccggcgcagtttcaggaatggtcgctgtttgcgcgctgctgcggtttgtgtgagatcgatgtcggtgataatcaactgttcatggtcatcagtctcgctgacgacgttgccgtacgggtccaccaccactgattggccggcgaacgccacatcgccctccttgccgacccggttgcacatggcgatggccacctggttctgcatgacctggacgcgaatctcccacaggaacatctccaatggttcggcgctgatgttcgcagtcgggatgatgaccagatcggcaccgcgcaatgcgcatgtacggatgctttccggcatgtgacggtcgaagcagatgacgatgccgatcttgccgaacggggtctcgaacacgtggaatccgtctcgggagggcgcataatagtcgcattcatagaagcgttctgcttgcaggatgtgcaccatggtcgagatgccgctgatatggccttgttcgttgatccatagcgaagcgtcgtagttgtggccgtcctgggctttgaggtacaggttcgatgaaacgtacatgccgtgttgcagggccttgttctgtaatgcggcgacgtgacggtcggtcaggtccatgagatatcgcgacgcatcgcggttctcatactgggggaagaacggggagaactgtatctcagggaagaacaacagatcggcaccggcctcgccggcctgatcgtagtaggccaaggccctatcggcgttttcgtcgatattgtcggtcatcgccatctgcgccatcgccagtctcatatcgtttccccatctttgagccgcaaatccacccgcacatgccaattgctgcccctgacgacatacgtcaatctcatagatgctcatcacaacccgacggagacactttttccatacgccgctcgccatacggcacctgatacggccatgcatcgactgcttttttcgaattactttccttaaacaagaaacgcgccgcacgctggaatatattttgagccccgagtacattaaccgttcacaagatcaatattgcaacggcgcatacggccgctaccacacgctcaaaaagcccggaaaaccgccaatccgagccggtctacaatcgccatacaacggcacgcaatcaccataggaggctgacagacatgtccaaggacacatcaaaacaaacaacattcgatttactgtcgggtttctggctttcggtcttctgtggagcagcggcctgtacgtggtggccaccgtgctgccccccagctgttcaaggacatcggcgtcgctaacccggatgcggcagtcggcacgttgaactcggtcaccgccatcgtgggcctggtttccaacctcgtgttcggcaacctctccgaccacacgcgttccaagatgggacgccgcaccccgtggatcatgccgagtgtcacgggcatgtacctgtacgcgggcatcgccggcttcggctatggcgtgtactcggccatcgaccaggcactcaacgtcgacgtgttgccgaacaaggaagaggccgacaaggacctcggcatcctcagcttggccaccacgctcggccaagcagtcggccccaccatcacctccgtggtcaagaccacgaccggcacctacacgccggcgttcgccatctccatcgtcatggccgtgtacgctgccgtgttcgtgctgcgtatccagaaggtgaagtagccgctgcgagtgcctatctccgtttcaaggggctgattttgactttgcggaacatctacttccgtttcaaggggctgatgccaaagtagccactggttaaaaacggcggaatagtgatagaacaatgccatttctatctgcgttccgccagttgaacagccccttgaaacggaagtagacctccggcaaacgccaaatcagccccttgaagctgattttgactcagcatcatgcagcgcagctatatcctcagtgcgggtatactattccgggccgtcacgacgacgcctatggaacgcacgcatggcaaagagagaaacatgagtcagcccgacaccgacacggcggcacaatcgccgtcctcgcaacaggaaccgcagattcagacggatggccgtcgaagccattcggaacagatgaaccaaccagcgcaaaccagccagtccgagtcgtcacatgatggcaaagacgagcacgccctacataccaacctgaagcgcggcatggaatcccgccacctgcagatgatctcgttgggcggcgtgatcggcaccggcctgttcctgagctccggatacaccatccagcaggcgggccccatcggcaccattctggcgtatggcatcggcgcgctgatcgtctacctggtcatgctcacgctcggcgaactgtccgtggccatgccggtgaccggctccttccatgtgtatgccgagaagttcatcggccctggcaccggcttcgtgatcgcgatccagtactggctcacatggacggtggcgctcggatccgagttcaccgccgccgggctgctcatgcagcgctggttcccgaacagtcccacatgggcgtggagcgcggcgtgcatcacactcatcttcaccctgaacgccttgtcggtgcgtttcttcgccgaggcggagttctggttcgcctccatcaaggtgttcgccatctgcgcgttcatcgtcatcggatcgctcgccatcttcggcgtcatcccggtcgccggctaccaacatgccccgatgttcggcaatctcatcaaggacggcgtcttccccaacggcttcatgccggtgttcgccacgattctgaccgtcaacttcgcgttctccggcaccgaactcatcggcgtgaccgccggtgagacgagggacccacaaaccgccgtgccgaaagccatccacaccaccctgtggcgtctggcgctgttcttcatcggctcgatcaccgtgatgtgcgcgctgattccgtggcgcaaggccggcgtgggcgaaagcccgttcgtgctcgtgttcaacggcataggcatcccctatgcgggagacatcatgaacttcgtggtgctcacggccgtgctctccgcctcgaattccggcctgtacgcctccacgcgcatggtgtggtcgatgggcaacgaaggcatgattccgcgctggttcgccaaaacgaaccgtcgcggcgtgccgatgctcgccttgtgcgccgcgatggccggtggcctgctggcgctcctgtcttccgtgatcgccgcctcgactgtgtacctggtgctggtggcgctttccggcctgtccgccgtggtggtgtggatcgccatcgcctactgccagatcgtgttccgtcgccgttggctggagtccggccattccaccagcgaactcaaataccgcacgcccggctatccgtacgtgtcttgggcggcgttcatcctgtgcaccgcatcgttcgtattggtgattttcgacgtggagcaacggttcgcgctcgtggccgagctcgtgttcatcgtggcctgctatggggcgtatttcctgcaacagtgggtacgcaagcgcaaaaaagcgaccgaggccgacgacctcgatacgctttgggtcgcgcgcgactgaacggctcgcgacctaccggcgcaccgctattcgcgccgtgaacgtgcactgatccaacgcaatgccagacccagcaaatccacaccgccacgattgcccatgatgtgggtttgagcgcggccggggagaacggcagcacctgcaggccaatgatgattaagccggcggccagcagcgaagctgagatgaccataccgaacttcttccagtcaaggccttcgcttgcctcttcggcactctgcggaatcgtgtcgaaaccggtgtagaagagcggcgtcatcaccagcactccgggcagaaacgacccgaccatggtaaccgcgccggacgtcgagccgatcggcagcagaaacacggcgcccagcacgaaggcgatcatcgcctcgaccgggccaccgccgacgatcatccagtcaccgaccagcagcacccatacggtgccgatgattgcgccgaatcccatggtgaagtagttccacaggctcagcgatctgaccatgccgccgtcgtcgccgctgccatcggcactactgtcgccgttgccgttgttaccatcctcgcgcacaggaatagcggcactgggcaggccagtcgattccaccaaactggccgtcatcgtgcttgacgggctgaatgccgtggatgcggcgaccatgaccgagcctcctttaattcggcctgactgtgatgataacgccgttcacgatatgccgtattatgaacgcagtgagagcccgcttcaccggccctattcggctcatgaataaacttcgcctatctgcggcactgaacacatgaccataatgtgatacacgtcacttcctgaaatacgtagtcgttatggaatcacccgcacgtttcccgtatcggagctgtacgatagctgagagacaggagggtcgtcagatttcggggggagggttccggaaacggtccgactgcaggatgcaccgggccgtgcgacacatgtcaacttgcgtattcacgccaaactcaattgagcaagccgattctcgtaaatggccagaagcggaacaacgccacaccttggatatcgtcgtatggcactagcccattgttgccgtcgtcaagatggtatcgagaatctctggaattggagcgattatcaccaagcacgaacacgttgccgtcagtaacggttacggaaaaaggactgtcgcttggattcacgccggacttaagataagcgctttcatcaatgggtttgccgttgaccgtgatgggctccccggatcccttgcaggcgacggtatcgccgggcagaccgatgacacgtttgattaggtaacgattgctgtcgattatcgacatcagattggtgggaagctgctccccctccatccagtctgcgggatctttgaacacgatgatgtcgccacggtgcagtgcaaagagtctcggagtcaatcgcgaggcaaatacgcggtcgccgatttgcaacgtgtcttccatgctacgggatggaatcacatagacgttgaacacgaaggtgcgtcccagcaacacgaccagcatcacctcgatcaccgtcagcagatagccgcgaatttcactccaaacggagggctttcgcgcatgtctcctcgactgtccacgcgcttttttgctatgacgccccaccatcatatcctttccgaccggtaacgcaacaccatagtcctcaaaccatgccgttacctacgcccatgtttgagctcagctgtcacaccagcggttcgcgcacgtctagttcacaggcgatgccggtttccttgcgggcccattcggccgcctgcagtgcggcgatgttccataatgcgcacggcactccgccaaggtccggatgcgatgcccagaatgtgaggtcatcagcgtatgcggtgatgaccgattcttccgtgactggcatgatcgtgtggtacagacggtccgcaagcgtggccacgaattcgttggccgcggcgaacgtgtcgataagatgctgttcggcggtcaccggcgggccgaccagctcccaggattcgacgtccgtggcgctccaatgcgcggcttcgccgtccacatcgcgttgcaaagagacgaacagcctggcgaactcatccgaagtcagtcccgtaacccggcgtcgggttgacaattcaatcggagtcatcagataccgttcctttcgcttcgttcattccgttgtctcgctggtttgatttgctgccaaccggtacaaagcctatctcgcacacctcacgatagcccaaaccaccggcatggccatgattgccagccctacgaccagtggccatgaggagccggcgattccggtcagattggtcatggcggcggagacgtcatacatgccatgagccacgatcagcggtgtaatcatgcccatacggcggtacagcagcacggcgagcactgcaatcagcacacgcggtggcgtgccgccggcacaatggccctatcgagcatcgccgcatgattcgtgcggtccacaatcgaggcagcatcggtttccattcggttcatgcggccagactatcgcccgttcttgccgattgcctgtaagcaggttcggatagactggcgcgagaacaatgcgagaaagaggcaagaatgacccggaaacggtcacaacagcacgacgcacaacgcaaaccgtcctggcgcgtacgctggaagaccatgagccgagccgtagacatggaaatccgcgaacacaaaagctcattcgcggtctatgtggtgctgcgcatgctggtgctcgccatggcaatactccagttctttaacggcgactacgaaaatgtgttcctgtgcatcctgacgttgctgttgctgttggcgccggcgttcatccaggtgcagttccgcatcgagctgccttcggtgctggaagtcatcgtgctggtgttcgtgttctcgtccgagattcttggcgagatcagttcgttctatgagatcttcccgttctgggacacggtgttgcacacgatgaacggcttcctcgccgcggcgatcggcttctcgctggtcgacctgctcaaccggtccgaccgggtgaagttcgagctttcgcccctgtatctggcgatcgtctccttctgcttctccatgaccatcggcgtgatctgggagttcttcgaattcggcatggaccagttgttcggattcgacatgcagaaagacgccatcgtgcattccatcagctcgttgatgctcgaccccacgcacaccaaccatgcgattcgcatcaacgacatcacccaggtcacggtcaatggccaagacttgggcctcggcggctacctcgacatcggtctgatcgacacgatggaggatcttatcgtcaacttcatcggcgcggtcgtgttctccgtgttcggcttcctgtacgtgaagaaccgcggcaagaaaaactccatcatcagtcggttcgtgccgcgccgcaagtccgccgaccgcgattatctgcgactggtgatcgatggcgggagcgcggctgatgccaaggccaaagccggcggtgccaacgctgacgatagtgctaacgccagtgcggccggcaccgattcagctgatgcagccggagccaaagccggcaatgccgacgccgctccgaccgtcaccgccaagccctgagtacgctctacagcactttcgaagcgtcgaaacggtagtgcccggtgaccgtcatgtgcttcttgaaggcgaagtagtcgttttcgcgctgccgctgcgccatgttgtgaatcacgtacggtgcacgccccgcgatcggccggcggatagccgccctgatagtagccggaatcgtaagccggatggttttcggcgtccttgcgcgcacccgccacgatatccgcgtaatcgtccacaccattgtcattgaaatcgaccgaactggcgactctcgaatacttgcgggccgcctcgccttgtgattcgatgattcatgaacgtattcggctcacactgtaatcgtccgacccaccgcccgcacctcccaatccgcccggtgcttgaacttgtggggctttggcggtatcgcgaccgcagcatcgccatgctcatctccagccatcagctcaacgaattgcaggagttgtgcgggcgattcctgttcatcaaaggcggccggcttgcggacgaattcgccggagaacagaagcggatcacggttatcgagcttggccggccgctcggtgtcgcgaaacgtgcggcggtcgcggctttggatccggccgccgtcattcatactgattctgccggccgtgaacctgttcaactccgatttcatgaaagtcagcggaaagaccggttcggtgagtgtgctggatttcctcgctggcgagttcgtcgtacagaacatgctgatgctgccgatggtggtcatggcctatctggtggctggtgccatctatacgcccgtggcctccggccgcatgttcctgtacaaggatctggaccgcgccacgatcatcaatgcgaaaatccttgccctgtttggtatctacgccgtgtacgtggcattgcagacggtggtgacggtcgctctctacatcctgtacatcgcgcgcttcgactacgcttccggcacactgctgccggccgcaggtgcggacatcgcttcggatgtggcctccatcgccggcatcctgtgcgccggtgtggtgactatactggtggtggccgcccctgccacccggttctcaaccggcagtacgagagcgcggaccacaccgtgcacctcgatgtgaaggtggacgaggatacggtgtggcttaacagaaagcaattggcattgctgtttggccgcgatatcaaaacaatcggcaagcatgtcggcaatgcattgagggaagagctcaatggattttcagttgtcgcagaatttgcgacaactgcatctgacggtaagacataccaagtcgagcattacaacttggatatgatcctgtcggtcggataccgcgtcaaatccaaggaaggcatctattcccggcgatgggccaactcagttctgaagcagcatctcgttgatggttacaccatcaatcacaagcggcttgacgcacttcacgccgtcgtcaaggtgctatcgaggcccaccgaaccggaaattgctggcaccgcagagatcttggaacgatatttgccgagtcttgtgctgcttaacgactatgacacaggcaatgtccctatacccaagggcgacgagtcccagtgggtcttgacctatgaggacgcgatgctgttcatccggtcgatgccgttctacacgcaatccgatctgttcgggaggaaacgcaacggttcgttccaaggaatcgtcgcaggactctaccagacgttcggaggcgaagaactgtaccgttccacccaggagaaagccgcgaacctgctgtatcaagttgtcaaggatcacccgttctccgacggcaataaacgttgtgccgccgcactgttcgtgtatttcctgaacggcaacagtatactgggcgacgatgactcccctgcttgtggagggtaacgccttggcggcgatgacgctgatgattgcgctgtccgcacctgcggggaaggacacgatgatcgccttggtcgagaacttccttatacggcatgaatcgcaggagatcaattgagagaccgtcaatgaagggtgcacatcaatcacgttctagcattgcgcgactatctgtacgagtcgtctgaacgatctgctgggagtgctcttcgcggaaaaccaacagcagaccggaggccgcatccactatgtgttgttcaacccttgggccgtgcgcagcaatgaggcattgaacagtttcgattcgccactgatgaagctgctggcgcgtgccatttacgccattgtgggcgtcagcgtcgaggaggcgattgcccccatcacccacttgatcgacaacccgccgcacaccgcgctgtcagcgttcatcaagaccaaacccgtcgatctcactatgaacaccttcgacaggggcaaggcggtccggttggacgatatcaccaaaagctgctgaatcgctagctgtcatagcacaaggccttagacagaacacccagaaatcgaacgggtagatggatcgcgtctccccttgacttccggcaagcgcacgccaatcatggggcgtatgggtattgcaatcaaacgtatatatgaagagccgactgcgtcggacgggtatcgggtgctggtggatcgcctgtggcctcgcggcatgacgaaagagcgtgcggcgttggacctgtggctgaaggacgtcgctccctctcccctcctgcgcaaatggttcggccatgaccccgccaaattcgcggaattccgcatgcgttacatcgccgagctcgacgccaatgccgccgtggacaatctgcgccacatctgcgcggagcatcccgacgtgaccctgctctatgccgccaaggacccgcatatcaatcacgccctcgtactgcgcgattatcttaactgaatattgactcaggacgaccgtcgtttcagtccatctgctagattctcgccgattttcgtatctttgaatcgaagtgcacagtcgtcactccttggattgccaagtaaagggatgcctccaaaccaaatcaatccgtcatcgattatggcaaaatcggaacacgattcgacggtccgaacaatgcacccaatagcacgcagccgattaatattccgttctattcgtgttctggttgccaccgcagcagtcgccggcaaacggacataaacttcgatgagcgctttcctgtcggccagtcggagcaattcatcgtcaattgcgctgagtccctgttgtgatacatattcagccgagataatcagggaacgtgcgcaaccggcaatatccttgcggagtatctctgcataattcgtggctgtaacgatgctgccttcgaataatccgtcagaccgggtgtcgagcaacgcatccgcagcatcttcgccctgcgtcgcggccgtcatgcaagcgcgcaacgcttccgcctttgcactgagcatgtccattttgtcagtatggtcaggatttaccgaatatccttgatttgcgtatgccttcagccgttttcgatacatgacagcggataaaggcacggtcacgtcgatgtaatcatagacacgaacctcggtcttgccatcattctcgcgatgaagtcgccctacatattgcgagagagtaccctcaaacgagaccggagcggcaagcagaagcgtgtcgaaacgcttctgatcgaatccttctccgatatagctacccgtagccactacagtcaggctctcattattcggcaccaaggatagatcatgcatttttttggttattcgctgtttgcggtggggcgggcatgggttagtgtttcgggttcgattccctgtcagaaaaaataatcgagtgcgggattacggccggtaaggctcctgctgtggatgcggatgcgcgtcagccttacggtgatgctttcccaaaacgcggattgtacgaggtgtgggacggcacgcggattcggccgttttccgcccgccgtcccacagcgctcgctatgaacggttgtgcatagtcatggagctgcagcgagaatcggcgttattccgcggtttctacagtcgtcggtgtgggacgctacggacgttaaacggttgacttgtctgccatcccgcgctcttgagggacggcgcggacgacaaacgattgactcgtctgccgtcccacagatattgggatgtgtgcggctgcctgctgcctatagcgggtgtcggtcacccccaccgatcgcccccccaccggtcaccaccctgcttggcggaaatacgcaactcgactttctgtaggcatcatggcggcatggcgacggcggacagtcgaagagatccccatgatgcctcaacagccatcgcccacacacatcacagctatcaaccgcaaatatcaagaggccgaaaatctatgagacaagcaaccccggaaagcctcagaccctacagatggctttattgcaagggtatataccggttcaaactccactaatagaacaaatagaacagccggcttaggtacggcgcggcaaatggcgcaaaccggccgcgatagtagtagcgtggtgcataccagtacaaccatgcgaggagaacagccatgatcaatgaggaatacaaggccatgcttggcggcaagtccgtgattcgcgggctgagcgagtacgccacgagccgcggtgccgaaatcggctaccagaacgtgttcgattacagccttggcaatccctcggtgccggctccgaaatccttcaccgacgccatggtcgacctctacgaaaacggcgatcctgcggccatccacggctactccccctcgctcggcatcccgtccgtcaaggacgcgatcgccgaaaacctcaacgaacgtttcggcatggcatacaccggcaaccatatcttcccgaccacgggcgcggcgggcgcgctgtcccacgcgatgcgcgcggtgaccaagccgggcgacgagatcatcaccttcgccccctacttccccgaataccagccgtacgtcaagggcatcggcgccaagctgaccatcgtgccggccgacaccgagaacttccagatcaacttcgaggcgttcgaggccgcgctcaacccgaacgtgcaggccgcgctcatcaacaccccgaacaacccgtccggcgcggtgtattcggcggacacgctcaagcgtctggccgcgatcctgaccgccaagcaggccgagtacggccacgacatcttcctgatcagcgacgaaccttaccgcgaaatcgtgttcgacggagccacccagccctacccggccagcttctatgcgaactcgctgacctgctactcgtggtcgaagtcgctgagcctgccgggcgaacgcatcggctacgtcgcggtgaaccccgcagccaccgacgccgacctgctcgtgccgatgatgggccaaatctcgcgcggcaccggccacaactgcccgccgagctcgatccagctgggcgtagccaaagtcatcgaccagaccgccgacctcaacgtctacgagacgaacatgaacctgctctacgatgcgctcaccggcatcggcttcgacgtggtgcgccccggcggcacgttctacatcttccccaaggcgttggaggacgacgccgtggcgttctgcatgaaggccaaggaatacgacctgatcctcgtgccgtccgacagcttcggcgtgcccggatacttccgcatggcctactgcatcgacaccgagaaagtcaagcgttcgatccccgtgctcgaaaagttcgcccacgaggtgtacggcctgtaaacacgggccgcaagtaacaaacacaagaaaggggttgccatggaatacaccgaaaacgccgatcatcgcgaactgctgctgcacagcgcctatgactccgatacggtccgggccatggagcgacccctgctggacaaaggcgtgccgctgatgcgcatggccgcccaggccgcggcccacatggcggccggtatgctggacgacgaggatctggcgctggaggacacgtcgatcgtgctgctggccggggccggagacaatggtggcgatggtctgttcgcggccgccgcgctggcccaggagggcgcgaacgtcactgccatcgccgtgggccggtcgctgcatgaggccggattcgccgcgctcgtgcgcgccggcggcaaggtgctggtgcttgacccggcagccgatattcccggctgcgcgtccgggttttcctccggtgaggccggtgagcgattgcagaccgccatcgccgtggccaggaaatcgcatctgatcatcgacgcgatgaccggcatcggcattcaaggctcgctacgcggcattcccgccgcgctcgcctccgcccttggtctcgacggcgaggctcccgatgagaccgccctgccgaaccgtgagtcgtcgggcgattttccgctggcacttgctgtggatacgccatccggcgtcggtgtgaacgatggttctctgcccggcccgtacattccggccacggtcacggtcacgttcggcgcgatgaagccgtgcgcggtgctgccgcccgccacgttcgcctgcggccgtatcgagttgttcgatttcggattcgatatcgacgacaaggatccggacgtcgaggtggtggataattcgttcgcgtccgacgcggtccgtctcccccggttcgaggattccaaatattcccggggcgtggttggtctggtgaccggctcgcagcgctaccccggtgccgccgtgctcaccaccagcgccgccgcccgcgcgaacaccggcatggtccggtatctgggcccggagcgcgcgcagaacatggtgctcaccgcactgccggaagccgtgatcggcaagggacatgtgcagtcctgggtcgtggggtccggcgtgcccgaggctagcgtcgagggcgccgacggcgatatgcagcgggacaccatcgccgcattgctcaagcattacgcgctcggcagcgaggatgagaacaaggacgcctacgacatgccgccaatcgtggtggatgccggcgcactcgacctgctgccggagcgtgtgcccggccaggtggtgatcacgccacatgccggcgagatggcgaaactgctcaaccggttcgaaaccaccgccagcaccgcggagcatgccgattcgcacgagccgtacaccgccgacgacgtgcggctgaacccgttggccagcgcgaagcgcgcccacgagctcaccggtgccaccgtattgctgaagggcgcggtgaccatcgtggtggatgaggaccatgtctatgcgtcgggcagtgcgccggcctggctgggcaccgccggcgcgggcgacgtactggccggtctgaccggcgccctactcgcccagcaggatgacgtggccaccacgggcgagaccgtggcctcggccgcctacctgcatggcctggcggcggcgatcgcctccgaatccgagcagcagggctggcaggagccggaactgatcggccgcgagcatcgccagcgcttcatgacgctcggccacccaatcgtggccggcgacgtgatccacgccatccccgaagccatcgccgacgtcatcgcataaccttgttgacctccctctgacgagggaggtgtctcggcaaagccgagacggagggagagaaacataagcctcaaactccacataccccgacctatacacaaaccccgtacactaaatcgcagaccccacccaacgacccaaacacacaaggaaccatcatggccaactcccccatcaccgacgtgattttcgacttctgcggcgtgctgctggactggaacacccgcgcatgccttgaaggccgattccccgatgaaatcgtggaacgcatctgcgccgacgacgacccctgcggcttcttccactacgaggaccgcatggacgccggcgaggatttcgcggacatctacccggatgtggtacgcgaacaaggccaggaactcgccgacatcttcaagttctacatcggccactacgcggacgcgctgccccgcacgctgccgggcatggtcgaactgctggcggatttgaaggcccacggctacggcgtatggggtctgaccaactggtcgcatgagaccttccacctggccttcgagaagtacccgcgcctcgaacagctgctgcagggcaccgtggtctccggcgtggagaagatgcacaagccgaacgccgacatctacgagctggtcctgacccgcttcggtctcacggccgagcgctgcgtgttcttcgacgacaccgccaagaacatcgtcggcgccaacgaggtcggcatccacagcatcctcttcgagaacgcgtcgcaggcgcgcgaatcgctcgccgaactcggcgtacgcctgtaagtcgccaaatattgcgtcgcggcagttgaagtctatggacccgtccttgacgacggtgaccggccgtttggcgaccggcatgtcgcactgttcggtgagcacttcaacgacgcggcacgcggcaccatgcgcagaatcatcatgaaggcgttctggatgttcatcacgtcggcgccgagcctggtcatcaggctcggcgtggagaagcggtcgatactggagaaggagaaggtctggatggcatcgtactggtcctgcctcaggttaccaatgtggcgcatatcccgttacacagcgtccgcgatatgcgaggcatctcatattgtgtcgccatagtggattgatgaggttataaacccgtgtggcgaccatccctagcgatataaatagactttatgacactgctgcagctgaaatacatcgtcaagatcgtcgagtgcggctcgatgaacgaggcctcccatgccctgtacgtctcccagccggccctgagctcgtcggtcaaggaattggagaacgagctgggcatcgagattttcacccgctcctcgcagggcatcgccctgaccgtggacggcgcggaattcctgacctacgcccgccaggtgctcgaccaggccgacctgctcgaagagcgttacaagcatgccaagccgcgcaagcagctgtgccaggtctccacccagcactacatgttcgccgtcgaggctttcgtggagatgatcaactccattaagtccgacgaatacgagttcacgatccgtgagacccgtacacgtgacatcatcaaccaggtggcgaacatgcagtccgagatcggcatcatctatctgtccgacttcaataaggacgtgatcggcaaactcctgcgcgagaaacaccttgaattccatccgctcttccgcgcccccctgcacgtgttcatctcacgggacaacccattggccgccaagaagatcatcaccatggaggatctgaagccctatccgttcatccagtacgaacagggcgaggaaggctcgttctacttctatgaggaggcggtctggccggaatactcccccaagcagatcaacgtgaccgaccgcgccacgattctgaacttcatcatcggcctcaacggctacacggtgtgcaccggcatcgacaacggcgacctcaacaacgagaagatcgtcaccgtgccgctcgacaccgacgaaacgatgttggtcggctggatcacgaacgagcgttccaagctctccaaggccgccgaaacctacctcaccaagctcaagtccgtagtcgccgatcacggctacaagctcattgattaggagtaagtaaaacaggcatggtcagcagtgagatatactgcgattaagccaaccccgctggggaaatggaagtaagagccggcccctgagtatctcaggggccggctcttgcgctattgagactgactggcaaaaccagtttgatggcctccggctacttggccgagattaccgacgtggcggctgtcgtggcaaagcctttgagcacttcaatcatcacgtcgcgatcttcgacatcaatgttgcgggccgcggcgagcattaccggcaacgactgcgtcacgtgcgacgtgagttcgccgaacgtgacgtacccgccggcctcgaagatggcaaacaggttttcgatgaacttgcggcgatgctcatcatcgtatttcgccatccatccgttgatcgtgcgtgccaggtatcgcgcgctacttgtcagtccatcagcctgtacgaattggccatgatcgacttgccagtgcagggcaaaatgctgcatgatgctggcaccgtcgctgctgaccaccgtatagccgtcttccacatgctcgcgggtctcaaacagcatgccgatgatcgacgatcccggtaccgatttatggattttcggcgcaatgcgcgcgtacccatcctcatcgaagaacgcctcatcgaagcctggaccatcgtgcgaatacacggccgtgatacgtccctgaatttcgccgggcacattggccgccgcgtataccgccagattgccgcctttggaatggccgccgaccataatcggcccggcccagcggccggcaatatcagtcacataccgcacagcggcctcctgcgaggcgaccggacggcggaaggccatcgtgaaatcctccttccacccgacgatcgaactgtcggtgccacggaaagccacgtacagcgtgccgtcgcccagttcgaagacgcaggccgagaactgtttggtggtttcggcgtcgaattcatccacgtattcgccgacgcgcaggtcgcgccagcgcgggctctcccccatcgcacgcagcagatcgacgttcatctgcggcgaccacaccttgccgaacatgtcgtcatagcattcggcacgtagcaggtcgcggatggagaccgcgggaatcatgccgctggcgtccgccgaatcctcgtgatagcgcggcacgttatccggcatgcgcgcgtaggccagctgggacagggcgagactgtccgcctcggtgaacggcagtgcggcgaaggtgtcgaaatgttgccggatatcgtcggtgatgttccccatggcggccttccttgttcgaatgtaacgaacctacggtaattctacgccgagcgggttttcatcacaggcgagtcggtcccagagtttaaaaccctatctcgccttcaaggggctgatttggccttctggagacatctatctccgtttcaaggggctgttcatccgtcatatcccgagtatgagcggcatcaccccaacgtcattccgccattttcatgctgcttctacttgggcatcagcccctcgaaacggaagtagatctctggaaaccacgacatcagcccctcgaaacggagatagcatcaatttaggcccagattgcccgttacagcatcgggtaatacttaccgtgatcgattttggcggcgatatcacgtaattcggcagcatctcggcggtcttcttcattaccttgcgacaatttgttcgctttgctgtccagatgatgctcgatgccgaagtaactgcatatccccacgagcgcaaacagccctataccaactaaccagttcatagcacgctccttgccaaagcttctgccttaatatggtactgctgttcatggatcgtaataaaaaaagcgggctcgcaagcccgcttttggttttaggttgaagacgatcaggcgccgtattcctcaaggtaggcggcggcgcgctgctggatatcgtggctgagcaacggggtgccgtcggagttcttcatcttggcggcggcgtcgaagatctcgcgcacgttggcgatggagagcaccgggaagccgaattcggcttccacggccttcacggcggacaggtcggagtccttggtcttctccatgcggtccacggagagcacgagacccacgacctcgacgttcgcctcggccttgagcttggggatgacttcgcgcacggcggtgccggcggtcatcacgtcgtccacgagcagcaccttcatgccgtcggtcagcggggtgccgaccatccagccgccgtcgccgtggtccttcttctccttgcggtcgaaggtgtatccaacggtcatgttgtggccggcgttcagcgcgatcgcggtggacacggccagcggaatgcccttgtaggcggggccgaacacggtgtcgatgttgcggggaatcgtgttgtgcacgatggcctggctaatcttttcggcgtagaacgtgccgagcgcggcgatcttcttgccgtcgtcgaaggcgccggcgttgatgaagtacgggctcttgcggccggacttcagcgtgaagtcgccgaacttcagcgcgttggattccaacaggaattcagtgaagcgatgtgcgagtgtttctgccatgatgttccttacctccaagtctgtcctgcggccagtttagcagcgagttcgggacggctgtccagcaggtcgtcaagttcgcgggcgacgcgcagcggggccaccgggtcgaagagcgcggccgcacccacttcgacggcgttcgcgccggcgtacaggtattcgagcgccttctcaccactgtcgatgccgccgagtccgatgatcggaatctccggcagtgcggtgcgcacccgatagacggctgccaggccgaccggcagcacggccgggccggatacgccgccggtgacgttggcgatgatcggctggccggtgcgaatgttgatgcgcatgcctttgagcgtgttgatcatgctcaacgcgtcggcgccgtgttccacggccgcgcgcgccggcacggtgatgtcggtgacgttcggcgtgagtttgacgatcatcggcttgtcggtcatcgggcgcagccggtccataagattggcgagggccaccgggtcggtgcccacgctcatgccgccggcggaaacgttcgggcagctgacgttgatttccagcatgtccgcgtcggagtcggcgagcttttccacgaccgccgcgtaatcgtcatcgcaatgtccggcgacattggagatgacgaacgcgcccgcggccttgagcttgggcaggtcttcggccaagtaatggtcgatgccggggttctgcaggcccacagcgttgatgttcgcggccggcgattcggcggtgcgcggcgaggggttgccctcccacggcacgggcgaggcgcccttggtgcatacggcgccgagctggctgacgtcgtagaaccagcggacggcggcgtactggaaggtgccggaggcggtgccgaccgggttcttccattccagaccggccaccttggtgtggtgcttccacacgtggggctcgtacaggttgatgtggttgtcgctgccctgcgcggactggttgtttgcgctcatcgtcactccccccatccgagctgttcgcgagtgaacacgggtccgtcggagcagaccttgagccggccgtccacggtgtcgatggtgcacagcacgcaggtgccgtagccgcagcccatgcgctgttccatgctcagctgcgcggggatgccgcgttcggcggcccaagcggccacggccttcatcataggcagcggtccgcaggacaagatgatcggcttgcgatcgtaggccttcaggtcgtcgccttgttcgagtttgttgagcaggtcgaccacgttgccttcggcgtcgtcgatgctccacgaccagtccgcgtaccgggagacgtattcctcagcgaagtggtcgttgcggtagccgaatacggcggtggcaaaggaggcgtcgtgttcggcgagcttttgcgcggcgtagattagcgggggcacgccgagtccgccgccgacgagaatgtagttggcgtcttccttgaggttgaagccgcggccgagcgggccgagcacgtcgacggtgtcgccgtcttgcagtcctgccaactgttcggtgccgtggcccacgacggcgaagatcacgctgacttcgtcgccgtcgacttcgctgacgccgaacggacgcggcatgagcatgaagtcgtcgtgcgtgaacaggttgacgaactgggcgggcttggcgtgggaggcgatgaacgggtcgtggaacgtcagtcgcatcacgcggtcggtcagttccgtaacctgcgtgatttcgacgttgtggcgcggcgggaagaatccggccgcagtcgcctccgcaaccacatcatgggtgggggtgaaagttgtcatttcattcctattcagcacatcaagctccccctatcaggggagctgtcaaccgcaggttgactgaggggtagttaaacacactcggctccggtttccagcccacactcacgtatagcccacagccggacaatttacctacctatatacggcaacccgcagattatcgcgcatgtcgagcgccgcctggcgcgcgctgctcgccacaaggtccagcgcctcgtcggcggtcatggattcggagtacttgccgctcttcttccatgcgccgatgatgccgcgcgacgagttgacgatggcgccgctgccctgcttgtcgaacatgcctgccacgtccgcggccgtgccgccctgcgcaccgtagcccggcacgaggaagaacgtgtgcggcatacgttcacgcaacgccttgccttcctcggggtgggtggcaccgaccaccgcgcccacgcgggagtagccgtggctgccgatggtctcggcgccccagccttccacgagatcggccacatgctcgtagaccttcgtgccgtcggccaggtcgagcatctgcagttcgctggaggacgggttggaggtgcgcacgagcacgaagatgtccttgtcggcttcggcggcggcctcgacgaacggggtgatgccgtcggtgccgagatacgggttgacggtcaccgcatcctcatgccacgggtcgaagtcgcccacgccgttcaggtggtgggcgtaggcggctgcagtggagccgatgtcgccgcgtttgatgtcgccgagcacgtagaggccctgctgggccgcgtattcgcaggtcatcgtgtagatgtccacgccggcggggccgagcgcctcgtacatggcgatctgcggtttgacggcgggcacgatgtcggcgatggcgtcgatgatcgtgcggttgtattcgaagtaggcgacggccagctgcgcggattcgatttcctccggggattcgaccgagtcacgcacctcgtcggcaaagctcgccgcgacctgcggcggtaccaacgcctcggtggggtcgaggcccacgacgctggggttctgagtgttgtcaatcgcttcgatcaggcgatccatgctgctccttatgttatctacagacggctgaacatcagctgggagccgatgatcgtggcgagggggcgtccggtgacctgccagccgccgaacggggtgttacgagccctggagtggaactgttcagggtccacggtccattcctcagcggtgttgagcaccacgaggtcgacattgtcggcgtcatccacgcggctcaggtcgagcagtcggttgacgccttcacgctgcggctgagcgtcgctctcccccgcaatcacgccatccggatcatccccagtgggcgcgggttcggcgtagtcctcgaccagcgcggccacgtcggttggcacatgccccatgagttcggcgggtcccacggacatgagctcgatcagacgctcatcggaaatgaagccgccgtcgacgagcaccttgtggcacacgccgtacgcgcattccagtccgatgatgccgttgggcgcctcaaggaagccgagttccttctctgccaacgtgtgcggcgcatggtcggtggccagcagatccacggtgccgtcggcgatggccgtgatggtggctttgcggtctgcttcggagcgcagcggcggattcatcttggcgagcgtgccgtacttgagcagcgcctcgtcgctcaacgccagatagtgcggcgcggtctcgcaggtgattggcaatccttcggccttggccttgcgaatcgcctcgaacgagatggcagtgctcacatgctggaagtgtacgtggacaccagtgcggcgggccgcttctatatcgcgggccacgatcttgagctcggtgtcttccggaatgccgggcacgccaagttcgcgcgagaccgggccttcgttcacggcacctgtatcgtgatgctcgcaatgctcgattaggtacaggtcggaggccttgacgttctccagcacctggtccaggatctccggcgtcacagcggaaccgtcgtcgctaattgcggtgatggggtgcgtgagcatggccggcgtcttggcgtcgtcctcgaatccgggcacgtacctgagccagtcggcaacgtcgcttgcctcatgaccggcgcgatccttggacgcgcacacgcacagatcgtaacgaaccggcaattgaacatcgtgcgcagtatcgtactgctgcaggaagtcgatgacgttgtcgaagccggcatccagaacctctttcgcaccggccgcttccaggtcagacatggtctgcccatccagtgccggcaacgtgttcggcatgatgagcacgttcgtgtatccgccggatgcggacgcgcggcagccggagaccatagattccttgtaggtctggccgggatcgcggaagtggacgtgcgggtcttcgaaaccgggggccacggtcagtccggtggcgtcgatatcggcaccgtcagccacggcggaggtgtcggcgaagtaggcggcagcggtcccgggcaccacgaggtcgatgacttcgccggtgttccagaccttgatgttgcgtagggtgatgctcacagtttggcttcctcgtcgcagtagtcgcagcggtattcgagccgttcggagtgcacgaggtggaacatctgcttgatgccgggctcggtggtggtcacgcagcgcgggttcacgcaggagatcacgccgacgatgtgctcgggcaggttcggctgcttcttttcgacgatcttgccgccgcgcaccacgtctacggtggcctggcgggccacgaagccgagcacatcgaggtcgatgtccttgtcatcctcgattttgatgatgtccttggagccgtaacgcttggagttggcgttcatgatgagcgcaagcttggttttggccgggtcgattttcaggtattcgagaaccttcagcgaggttccggccggcacatggtcgatgatgatgccgttctgaatgctggtgacttccatcaggcctgaacctccttggggttgagcggttcgtatccgggtagttcgtcgcccaccacggtgctttcgagggccatgcgcacgagcatgccgttcttgacttgttcgaagtaggcggcacgcgggtcgtcgtccacgtccacggagatttcgttgacgcgcggcagcgggtgaagtacggccatggacggcttggcgagctgcagcttttcttcgtcgagaatgtaggtgtcgcgcaggcgcaggtagtcgtcttcgttgaagaagcgttccttctgcacgcgggtcatgtacagcacgtcgaggtcgccgatcacggaggccaggtcgcgcacttccacgtaggagcagttgtcggtggcgttgatgcggtcgatcacgtactgcggggtcttgagctcgtccgggctgataagcacgaagcgcacgttgccgaagcggcacagggtctcgatcagggagtgcacggtgcggccgaaggtcaaatcgccgcacagtcccacggtcaggtcggtgatgcggccgaagcgcgactgcagcgtggccaggtcggccagcgtctgcgtgggatgcatgtggccgccgtcgccggcgttgatcaccggcacggatgcggcgcgggaggccaccagcgcggcaccctccttcgggtgacggatggcgaccacgtccacgtagttggacacggtcttcaacgtgtcggcgatggattcgcccttggtcacggaggccagctgcgcgccggcgaatccgatgaccttgccgccgagacgcagcattgccgtctcaaagctcaggcgcgtacgggtggagggctcgtagaacagcgtggccagcactcgcccatcgcaggtatgggcaacctctttgcggtgggaatcgatgtattcggccttatgcagcaggtcgagaatctggtttgtagacaggccgtccagcgttacgacgcttttgccgaccattggcgtttcttcagacaaggctcaccttttcgctcgtggttttcaggtggccacccttgtgtgacctaatataacttacgccatttttcggacagccgcattcaccgagtgttcacctgaaaatccaacgaatatgctgtgtctgtatagctgatatctgctttggaacgccagagctcattcattaggtcgatttgacgttcattaggtcactgcaccctcgtatctgttgttggaatgccgccattccaacaaggtatgcggcggcggaccgacctaatgaacgatgaatcgacctaatgaacgtagtgaacgcaatacaagaaaggtctatcgctgcgcgcggcgtcggttccgctccagtcgcggtgcgatcacgtgcatacgcgggcgaagcgcggtttgcggctgctgcgttgcggcggaggccgtggcggtggttgccgcagtcgcctcgtcttcggcctgcccgtagaacaggcgctggcatacgtcacggcatttgcgcatcacggccagcaggtcgttctcgaaatgctggccgcggtgggcgccgtagccgaggtagacggcgatgccgcccagcgaatagatgtcatcaggcagaatatcggcctggttggcgcgcccgctccacagatagttgccgttgcgggccgcggtgcacaacgtccatgccttgcgcagctgaatcgcatcgatagcgctgatgagcttcttggcctccagcacgtccaatgcctccaatgtgccgttgacgcgcagatctttgatatcgccggcgtgctggagctgcatgagttgcacggtccattccacgtcagacagaccgcccttgccgagcttcagatgacgttctcgacgcacgccgcgcggcagacgctcggcctccatacgggccttgagcttgcggatgttctgcaattcggcctcggtcagctccgtggtcgggtagcgcaacgggtcggcgatgttgatcaggaagtcccgcgccagttcggcgtcgccggccgcgtaccgggcgcgcagcagcgcctggcgctcccaggtcgaggcccaggattcgtagtattcctcgcaggaggcgtaggagcgcacgagcgggccgttcttgccttccgggcgcaggtccaggtcgagttcgatcttgggttccagcgtcgtcgggccttgcaggatgttgcgcaggtcttccacgaccttcttggcgaaggcgttggcttggccgtcgtcggcatcgtcggccggacggtagatgagaatggcatccgcatcggagctgaagttcacttcgcgcccgccgtaacggcccatggcgatgacggtgatgccggccggcgcggtttcgacgccgaacgcggcgatctggtggcgcacggcccaggtcagtgaggcgtcgatgatcgcgtcatacacgtcggtcatggccttgagactgtcggagtcgctgatcacaccgctcatccaagacaggccgatgcgttcgatttcgtggcggcgcatggcgcgcatggaggtggcgaactcgttgatgttcgagccgaaacgttccagcgccgagccggtctgcacatccaatgcctcgcgcgtgcgggcctgcagattgccgtcatcaccgagccaactgatcgattcgaccgacttgttgagcgcgtcgcccaggaatcgcgagttggacaggatgtggcacagacgctgggcagcggaggtggagtcgcgcaggaagccgaggtagccggattcggtgccgaagttctcctccagcttgcgccagttgagcaggcccatgtccgggttctggccctcgcccagccactgcaagacggcgggcaggatgatgcggttgattttggccgcgcgccccacgccggcagtgagcgcctgcacgtggcggatggcggcgtccgggtcgccgaagccgatggattcgaatcgttcctgtgcggcctcgacgctcagcacgatctggtcgttctccatctgggcgttgaccggcagcatcgggcgatagtagatgtcgaggtgcaggtggcgtacttcgcgacgggtgtcgtcgtatttgtcgacgagttcttccgggtgcaggccgaatgcgcgggcgaggcgacgcagctcctggttctggttgagctcatccacgtcgatgtcgcgcttcttttcgaggcctccgaccgaggcccggccgaggtccgggaacaggtgcgtgcgcttcagggaccagatctgctggcgatgctccatcacgcgctcgaagcggtagtcctgggacatgcgcacggcctgtttgcgcgagacgtagccgccttcggacaggcgctgcagcgagtcgagcgtgttgctggtgcgcagcgattcatcggtacggccgtgcacaagctgaagcatctgcacggtgaattccacatcgcgcagaccaccgcggccgagcttgatttcgcgatccttcagaggtgcgggaatcagatcttccacgcgcttgcgcattttctggcagtcgtagacgaagttcttacgcttggacgcgctccacacgaacggccgagtcatatccatgtaggcccggccgaggtcggggtcgccagccaccgggcgggccttgagcaacgcctggaactcccagttctcggcccactgctcgtagtagttcttgtgcgaggagagcacgcgcaccagcgcgccgtccttgccttccgggcgcaggccgccgtcgatctgccacagcggctgctcggccacgcccatgatggcggactggcagacacgctgcagcatggtgcccatcttggtgcccacgcggatcagcgtctgatggtccacgtccttgtcggccggttcgaccacgtagatgaggtccacgtcggagacgtagttcagttcctgtgcgccgagtttgcccatgccgatgatggtgaagcgcacgtgctcgctgccctcggtttcgtggcgggcgatggccagcgcgccttcgagcgccgcgtccgcgaggtcggacagttcgcggctgatggtcggttggatggaggccgggtcgtccgccacggcatcctgggcgatgatggcggccagttggttccggtagctggaacgcaaggccgtggccgcttcggccagatccttggaggcgacgggcatggccggttcgtccgggtccgcgccgaccgccttgagcagacgtgcacggcgttgcgcgtgattgaacagatggctgttgcagttgtcgactgctgcggcctccacaagctgcggtttgaagcgcatgaacttgcccatcgcgtcggagacgccaagcaccgtgaccagacgcttcagggcgtcgttgtcagggatgacgtgtttcagatcgcgctggctggattgcatcgcgttgacgatatccacgaaattgctcaatgccatatcggggtcgcaggcgtgggccagcatgctcagcagttcggcgcatcgctcatcgggaatgtcgtccgtcttgagctggtcgaacaaggtgcgggccttgtcgaggtcttgcagacctgccctgatgagatccatggagctgggtttgaacatcgacgattccataagattccactatatacgctcatgccctccgaatggggcatgagccgggaaggagtcatcgggcgacgctgatgagctccgaggaatccatatcgtaatcggccatggcgtaggaacggatggcggggtcatcataggtgttcatgtaataggtgttggtcttggacgaatatccgctggtgaacagcgtgcgttcgaactggccgtcgcccatcttcgccatgccgtccaccatctgcacggagccgagggtgtggaacaggcgagacacattggcggcttcatcgttctgctgcgggtaatgcgcgttggtgtaggccacacgaacgaagcgcgacggggaactcacgtcgcccgggatgccatgcatgcccacacccgcaccccaggcggtcaaggaggccttgccccatgaagtcggttcggccatctcgttgctgacgcacatgtagttgcgcagattttccatatggaagtcgaacgtcggctgattggtcagcacatcaacgtcatcatgatgcacgtgcatgccatcggccatctgctcgacgacgatgctgcgcttgccgtcgccgatgaaccagtgcagcagagactcctgctgtcccggcacgatctgggagacgagcgtcacgttcctgagcgccttctcgacctcgtcgacggagtcgaaattacgcgccacccacagcggaaattcgaacgtggcgacgttttccgtgccttcgaccggttcgtggacgaacgaggcgtagccggggaaattcaagccggcgatggccagaccatgttcattggcgcagtcgaaatacatcggcctatcggccatgaccacgcccacgccgatcaccgcgttcggcttcgctttgccgcccgcaccgaacaccgtgtcatagcggtagccgcgcggagtgaccaggatggtctccccatatgagaaactccagtcgagattacggccgaaataggtgttgccctcatcatcggagaaacggacaccagtgcacataacggacttccttccatcgctttggttggcttgtacgttcatgatatccatcggccgctgggggaactctgggtttcgccagcagattaacgtgcggcgcgacgcattgagatgcgccgcgctacaatatgcgtcaaccttgcgtaccgaggaacaacggttccgcattgcgccagatacggcgcgtggtggcggggtggttcatcgaatacaggtggacgccgtccacgccgtgggccacgaggtcggcgatctgctcggaagcgtagaggatgccggcggcacgcagggactggatgtcgtcctcccacttgttcagcagggtgttgagcttgtccgggatacgcgaggcgttgcgttcggccatgcgacgcacggacttggcaccacgcaccggcatgatgcccgcctcgatcggcacggtgatgccggcggcgcgcgccttgtcgaggaagcgatagaagtcctcgttgtcgtagaacagttgggagatcaggtgagtgacgccggcatcgaccttgatcttaaggttttcgatgtcctggtccagcgagtcagcctggtagtggccttccgggtagcaggcgccgaacactttgaggcccggcttcacggagcggatgtatgacacgaggtcgctggcgtggttgaactcgcctaccagctgctcgccgtcgatgtagtcgccgcgcaatgcgagtacggcgctcacgccggcctgctcgaacatgtcgagggcctcgtcgattttcgccttgtcggaatacaacgcggtcagatgcgcgactgcgggaatgccgtactccttgctgatcgtatgagcaatgcgcgcggtggcggtgcggtcggaatgggtgccgtgaccgtaggtcacggagatgaagtcggggttcagcccctccaggccgtcgagggtgtcatagatggtgtccacgggagcgttgcgcttcgggggaaagacctcaagggtgaacatcggggaatgcatgctgatttccttacataaacccgagctccctcatacagagggagctcggtgatttccgctacttgtcgagcttggcgcgcacggccttggcggcggcgaccaggttctccaggctcggccaggtctcggcgttaccacgggtcttcagaccgcagtcggggttgatccacaccttcttgacgtccatcttgtcaaggatctcgtagatacgatcctcgatctccttctcggaaggaatacgcggggagtggatgtcgtagacgcccgggccggcctcggtctcgaagtgcgcgtcatgaatggcgtcgagcaccaccaggtcgccacgggaggcttcgaaggagatcacgtcagcatccatcgcgtcgatgtcgcggatgatgtcgttgaactcggagtagcacatgtgggtgtggatctgggtggtcggcttgacggcggagtgcaccagacggaaggccggaacggcccagtcgaggtacttgacgtgccagtcggacttgcgcagcggcagcttctcacgcagggcggcctcatcgatctggatgaccttgatgccgacggcctcgagatcgagcacttcgtcgcggatggcgagggcgagctgcttggtctgctcctcgtgggtgatgtcctcgcgcggccaggaccagttgaggatggtcaccgggccggtgagcatgcccttcatcacgtggtcggtcttggactgggcgtacgcagaccattccacggtgatcgggttggcgcgggacacgtcaccccagacgataggaggcttgacgcaacgggtgccgtaggactgaacccaagcgttcttggtgaacaggaagccgttgaggttctggccgaagtattcgaccatgtcgttacgctcgaactcgccgtggaccagcacgtcgaggccgatctcctcctgcttcttgatgacggcgtcgatctgggccttgatgaactcgtcgtaggcttccttggtgacctcgcccttgcgcagcttggcgcgctcggcgcgaatctccttggtctgggggaaggagccgatggtggtggtcggcagcagcggcaggccgagggcctcgcgctgcagggcctgacgctcctcgcgggcaggctggcgcacgtagtcggcgtcggacagcttgccgatgcgctcggcgacggccgggtcggcggccacgcgggtgccgtcgaacagggcctggttggcggcgagggcggcggatgccttcttctcgtcctcggtggcgtcggccagagcggcgacttccttgagctcggtcagcttttccacggcgaacgcgaagtgcttgaggtcttcggacgagatgccggtctcgccttcagtgctgaacggcacgtgcagcagggaggatgcggtggagacggccacgttggcggtgacttgcttcagggcgtcgaccaggccgagggaggtggcgtagttgttgcgccagatgttgcggccgttgatcacgccggcgaagatggcggtgttggaggccacgccatacttggcgacggcttcgaggttctcttcacggccttcgttgaggtccagtccgatgccgtcgaagccgagcaggttgacggtctcgtacacgtcggcgatgtggccgaagtaggtgttgagcagcaccttgacattgcccttggcggacaggatcttggtgtacagggtcttgaagagctccacatcgcccggctccttgtcgagcacgaggtacggctcatcgagctggacccatgcggcgccgagttcgttgaacttgtcgagcacttcggcgtagacggcggccacggcgttgaccaggcccttgtcgatctcgagttcggtggcttccggggtgcgggcgagcttcaggaacgtgtacgggccgatgaacacgggcttggtgtcgatgcccagcgccttggcctcgttgaactcgtcgaacggcttggtggagttgagcttgatctccgcggccgactcgacttcgggcaccagatagtggtagttggtggtgaaccacttcttcatcggcagggcggtcacgtcgcccttgtcgccctggtagccgcgggccatggcgaagagcgtgtcctcctggttatcgaaggcgagacgctcgtaacgcttcggaatcacgttgaggaggatggcggtgtccagcatctgatcgtagtagctgaagtcgttgctggggatgaggccgatgccggcggcctgctgcagcttccagtgcttggcgcgcagttcggcggcggtggccttaacggcggcgaggtcgttggcacccttccagtagccttcgatgatcttcttcagttcgcggttctgcccgatgcgggggaagccggagacggaagtcagagtggacatgaatcctccaatgtatgcgttcgtaacccgacttagggtagcaaaacatccggattccaccccttataaatggccgcagagtgtcgttatagatggaatttatatccgctttagtcgaagtctttcacattgatgaccgcgagcagttcgccgctgtgcacctgccattcgtcgaacgatttgttcgatcccatgatcacgatggatgcgggcgaaagtcccaagttgagcaggtcgagtcgttcgccgtcggagtcggcggaggcgagccattgggcgctgatcgacacagtcggctcgtggcccactatcatgaacacgcggttcttggccttgacgtgggcgagctcgtcgaacaccgccttcactcccccgtcatacaggctgatgcggtagtcgacgatcggcttgtcgccaaaggtcttgagcatgcggtccagtgtctggcgcgtgcgggtggcggacgagcaggagatctggtcgggcaccagtcccagcgactcgat

SEQ ID NO: 1106 - DNA, 8529 bp, Unknown
  R13_10m  MAG No. k141_28007
ctaagccagtcgctaagcctaagccttaagaacacaaggaaatataaggaaacatcatgggacaacgtattgacgtcaaccacgagaacatctattacggcgactttctggccgtggaagatgtgaacatcaacatcgagcagaacaaggtcaccgccttcatcggcccgtccggctgcggcaagtccaccgtgctgcgcaccttggaccgtatgcacgagatcatccccggcgctcacgtcgagggcgaggtgctgctcgaaggcaagaacctgtacgacaaggacgtggatccggtggccgtgcgccgcgacgtcggcatggtcttccagcgcccgaacccgttcccgaccatgtccatccgtgagaacgtgctggccggtgtgcgcctgaacaaccaccacctggccaagtccgacgccgacgatctggtcgagtgggctctgcgcggtgccaacctctgggaagaggtcaaggaccgtcttgacaaccctggcatcggcttgtccggtggccagcagcagcgtctgtgcatcgcccgcgccgtggccgtccacccgcaggtgctgctcatggatgagccctgctccgccttggacccgatttcgaccttggctgtcgaggatctgatcaacgagctcaagagcgactacaccatcgtgatcgtgacccacaacatgcagcaggccgcccgtatcgccgactacaccgccttcttcaacctgaaggcagtgggccagcccggtcacctcgagtacttcgcggacaccatcacgatgttcaacaacccgcaaaacgaagaagccgagcgctacatctccggtcgcttcggctgatcgtttcctgcgcgcagcgtaatgatttgtgcgtaggagaaacggcaaagcccgccgcaaggcgggctttcgcatattcaacgcgagtattgccgagtattatcgttctcgcaacggagcgagctggaatacttcgtcggactgggcggcgacttcccgcttcggtcgatcgacgggagaacggcgggtaaagcggtacaagacaagtccgcacgatgaatactctgtgatgaatcttctgtttacggtgcgagtgtggaagaatggtcacagcaaggtccagcaaaggagcataggtgagtactggtctgatcgtcggcattgtcgttgtcgttattatcgttgtcttgattggttggggcgtcagcgcctataacaacctggtgacgctgaagaaccgtgtgaagaacggttgggcgcaaatcgacgtgcagttgaagcagcgcgccgacctcatcccgaacctggtgaataccgtcaaggggtacgcatcccacgagtctgaagtcttcactcaggtgaccgccgcccgcgccggcgtagtggctgcggccagcaacccgagcacgaccactgctcagcgcgccgccgccgaaaaccagctgtcccgcgccctgttcaacctgcaagccacggctgaggcatatccgcagctgcaagccaaccagaacttcatggatctgcagaaccagctcaaggaactggagaacaagatcgcctacgcccgtcagttctacaacgacgtggtcctgaagctcaacaccgccatcgaaaccgtgccgacgaacatcatcgccggtctgttccactttgagcaggcgcaatacttcgaggccgatgacgcttcccgtcaggtgccacaggtccagttctgacccgcttcaggcccgtccggtaagccgccggccgggcccgtattgtcttaagagagggaagatatgcggatacgattcattcgcgccggaatcatcagcattgttgccacggtggtgttggcagttatcaccttggcgataatcgggacttccgcgttcggcgattcggccgacctcagctaccgcacgctggactatgacgtgaccgccaccgcgaacggtgatttgaaggtcacgcagcatatcgacgtcaagatgcgtgagcgtaccgacagtgacgacaacaccaagccgtggaagcagctgttccagcaatacacgctgaactccggcaccttgactgatatcagcgatatcagcgtgcgcaacgtcaccgacggcatcgactacgcacaacagagcgagcccaagctgcccagtgacgtctcttccgacaaggaatggaacagcgactacgccaaccattggtatgtcgccgatgtgagcgatggcagcgaccatccaaaggcatacacgcccggtaccgatggcctcaagcccagcgcctccgccaccgaagatgacacaaccgtggagatcggctggaatattccggtcaccaccgaggccgacagcatgaagttcgatgtaagcttcaccatgcacgatgtggccaccaaatggaaagacgtggcctccttccaatgggagccgttcggcaagaagaaccaagtgcctatcggcacggtcaccggcaccgtccatttccccaacggcatcaccggcaaaacctcatggacatggctgcacaccgagcgcacctcggaaaccaagcgcaacagcgacggcagctacacgttcacggcctacaacatccacaatggcgactacctcgatgtggtcgcggcgttcgatgccgccaaagccaagggcatcgcccgcaagggaaccggcaatcatctcaaggacctgaaacaggacgaatataagcaacagcagcgctggctcgacaagcaacgattcgctgccagagctcgtctcgtgttctggattgtcagcatcgtgctcggcatcgcgttgtgcgcgtggggtatctgggctgtgatctccagcaaccggcgtgcgcaatacagtggcagcgtcgaatactggcgcgaccagcccggcatcagtccggcttccgcagcccgtctgattcgcgtggtcgatccgtcgacgcgccaatccgatgaagaccgccagctgaccgccaccatgctgtcgctcgccgtcaagaaggccatcgccatttatccggggccgtcggacatgtatcgcggcatcgacatgagccaggccacgccggtgggcttgagccaaatgattgccgccgaccaaggcaagcagtatgcggcaggcatcaccagcaccatcgtgattctgccgctcgccattgatgaggcacccaacgcgcaacagttgggattgagcgaatcggaagatgcgctgctgaacctgctcatcgtcatttctcagcgcgtgggcagcccggtattcgacctgaaccagatgaaggcgacctgccagaactggcaagacggctatattgagctcggcaaattcaccggtgcatgcagcatggaataccagcggctgggtgccacgcgctctgtgggctggcaatggatcctacccggcgtattggccgccgtgctgggatttggttcgctgctggccaacagctttatcggatacccggtggctggtcttatcgggctgccgatattcctggtcggactgttctgctcgatggccggcgcgatgaccgtgctcactgatcaagggcaggatatcgccggccggactctgggccttaagcgttatatggaagacttctccaacttcaccgaccggggtaccgccgatttggccttgtgggattggtatatggtctacgccgccgcgtttggcatttccgatcgcgtgatgcgtgaactggtcaaagcatatcctcaggtcaacgacccggcttggctggatgccaacgcctccaactcgttgttctactggaactaccgcccgtatggctggtacagccaccgtcataatggtccattcgaccacgatgctgccgggcagatggacctaggcgttggcggcccagctccggcttacggaggcacgtcgtttgccggcggattctccgacctcggctcgcagctgaactccggtctggcggacatcagctcgaccatcagcgcggcagcaccatccgctgattccggtggcgatttctccagcttcggttcgggcggcggctccggtttcggcggctcgttcggtggctcaggtggcggctcgttcggcgggcggtagcgcatgcctatgtcgaaacgcattgttcgtgccctgggcttaagccttgtcggtgcgctgattcttgccgcactctgtgccggtgccttgattctcggcacagatggtgccgacctgagctaccgcacgcttgattacgatgtgaccgccaccgccgacggcgatcttaaagcacggagcatatcgatatcaagttgcgcaaacgcaaggatgacgatggcaagaccaaaccgtggagatcggctggaatattcccaccaccgtaaaaaccaacagcatcaagttcacggtgagcttcaccatgcatgacgtggccaccaagtggaaggacgtggcgaccttccaatgggagccattcggtgagaacaatcaggtgccgattggtacggtcaccggcacggtgcatttccccaaaggtgtgaccgcgagcaactcgtggacttggctgcacactgaacaaacctcggaaaccggccgaaccaaggatggcagcttcaccttcaccgtaaatgatgtgaaaagcggcgagtacctagacgtggtggccgctttcgacgcggccaaggcgggagatatggctcgtgtcgagaccgacgatcatctgcaggagttgaaggaagacgaagccgacgacgaacggttctggcgcaatctggaacgccaacgctccacaaggcgcctgaacaactggatgaccaccatatcggccggcctgatattcgggattattggtgttgttgcagccttacgctcctccggacgttcacgttaccgtggctccatcgaatattggcgcgatcgccccgagctgagccccgcatcggcggccaaactcatcgatatcgtgacttccggcgacaaacccgacatttccgagcgccaactcgtcgcgaccttgctttctctggccgtgaagaaagtcattgctgtgttccccggttcggcggacctgtatatcggcgtggatctgaaacaagtttctccggtggagctcagtcagcgaatcgggtccgatccatacaagcgcaataatgcgcgtaccaatagcacgattgtgatgctgtggcagtacgattacggcgtatctgagggatttgatgaatcagtattcgtcgaatccgtatttgatggatctggatctggcggatctggatctgccgcatctagcgtgtccgatgcacaccagcccgatctcagtgcttctgagcgggcattgctctatctgctcaccgtgatttccgagcgcgtaggtcgtacggcatttgacatggatgacatcaaagacgcctgcaaggattggaaagacggctacaaggaactcgaaaagttcaccaatgcgtgcaagaccgaattcgcggcggcggatatcgcgccgaaaaccgagaacggatggctcattcccggggcaatcaccgtgctgatcggtggcgtcagcatattcatcaacggtttggccggatatctggtggccggggccctcatcggcattcccctgatgacggtcggcatattctgcttcctgatggggaattcctacgtgctgaccgatcatggtcagcagatggccgggcaatgcttgggtctcaaacgatatatgcaaggcttctcgaacttcaagtaccgtggagtcgcggattcgacgctgtgggattggtatatggtctacgctgccgcatttggcatatccgaccgggtgatgcgggagctggccatggcctatccgcaagtatccgatccggaatggcttgatgccaatgcctccgacacggtgttctattggaattatcgtccgtacgactggtatgggttgcgtttctacaatggctcggcgttcgcggattcgtggctgacagcggattggccggagcggtgccagcgttcgggggcacgtcgttcgcggctgggttctctgacctcggcacgcaattgtcgtacggatttgcggatatcaccgcgacaatcaatgcggcctcgccatccggtggctcaggcggctttggcggtagcagcggcggttccggcggcggttcgttcggtgggcggtaagcgatgtgcttctgaaagtccctatagctttgaaagtaaaaggtccggtgtcataagacatcgggcctttctctcaaaatcgaggtgaggagacctcaacagtcaggtccaacggggcgaaagtctgtggcgccgccgagaagattgcctcgaagctagcgtgacctttctgctacaacacagcataccagcctccaccgaagctcaccagtacactggactgaccaaaccaaggtctactagcgtgccactttggcgcggtgtcgttgtgtcaaccggcataatgatgtctcaaaattcaagaggaggttctcgtggtaggcaacgaccatgacaaccgtccgagacaagaccggcaataccgggaaggtctgatgaccggcctgttgatcgccctggccaatcaagttggacaggggcggtcgacggccatcatcattgccgcactggtattgctgggaatgagtctcagacgaggccactgatctatcagcggaacagccggaatccatggggttccggctcctcgttttcgctgaactgggtatgagtaagttgcgttttctattccgtgaagttgcggaaatttcatagattgattgtgcggacaggccgagagtgtgaaatccaacgggatgcttaggcttgatcgtggatatcgagtttccataagtttcacgaagggaatcaccatggcattgttccgtaacctcggaccgttctccaccaccgccatcggccacggcgaaatgccgctgaccatcgaaaacaaccgcggccacgaggtcggcatcgaaaccctgcatgcctcgctggacgccggctgccgccacatcgacaccgcttgggcctactactgctccggcggcgaggagcagaccggtgaaaagctggtgcgcgaggcccttgagacctggaaggggccgaaggacgaggtgctggtggccaccaaggtgggccacttccgcaacttcaccgacggccgccccacgtgggatgtggacggtcgcccggagaacctgattcggcgcggcaaggagagcgcactggcgctcggcgtggacaccatcgacctgctgtacttccaccgcccggacccgaaggtgccgtacaacgagtccgtcgaagccatcaagcagctggtggacgagggcgtggcgcaggaggccggtatctccaacgcctccatcgagcaaatcgacattgcgcgcggcattctgggcgacaagctcgtggccgtgcagaaccagtactcgccgattcacctggagacccaggacacgctcgactactgcgccaaggtcggtctggccttcgtgtgctggagcccgctcggcggctaccgtcatccctatgatgagaccaagttcgacccgttccgcgaggtcgcggcggcccacggcgtgagctaccagcaggtcgtgctggcatgggagctcgccaagggcgaccacatgttcgtgattcccggcgcccaccaccccgagaccatccttgactccctcaaggccgaccagctcgaactcacccccgaagagctcgccaagctcggctgattgcccattccccatcctcccgaatttgtgccgctgacgttggcttaacgtcacaaattcgggaggattgattcgtcttgaaggaaccgccatgcgcaaaaaactcatcctcgacctcgataccggcatcgatgacgcgctcgccatcgcatataccctaggcagtgccgacgagatcgatctgatcggtatcacggccacctacggcaatgtcgcggtgccgctggccgcgcgcaacgcgctggcggtggtgcacttgttcggccgtgacgacgttccggtctatcccggagtcgaccatcccatcgccccggcaacattgccgaaaatgcgtggcaccacaccagacgagcggacccaggcctacgcgcgctggcagaacggcggcgcggacggctggcaaacggacgcttcgtgggcaccaactcccggctcggtggcggtccaccatcccaacggcatcggcggcgcaatcatccccgactccccgcgcgctccggaagcaccaggctcggcggtcgatttcatcatcgccgccgcgcgcgaatacggcccggacctgaccatcgtacctacgggcgcgatgaccaccatggccaccgtattccgcaacgctccggacctgaaggattccggcgtgaacgtgacgttgatgggcggtgcgttgacgctgcccggcaatgtaagcccggccgccgaagcgaacatctcccaagacccagagtcagcagactatctgttcaagtgtggcgcacgcaccaccatgatcggcctcgacgtgacccaccagaccgcgctcacccgtgagaaagcccatgaatgggcgtctctggggacgccggccggcgacttcctcgtcaccatgaccgactactacatcga

SEQ ID NO: 1107 - DNA, 6929 bp, Unknown
  R81_24m  MAG No. k141_258
caggccgagcgcgccgaatggggcgagaaatacgccgaatacaccaaggcgcattattccgtggaagcctcggtccacaagttcgtggatatggaacgcaaggcgataggggagtaggagccttctcgtttgcggagaggtctttccctcagtccgcctgcggcggccagctccctcatcggcgggagctacgaaaaaacctccctctggtgagggaggtggcatcgcgaagcgatgacggagagagagattagcgaagggttttacaacacctcaataagctgatcgatctcttcatgcgtggtggcccagctggtgcagatgcgcatcacggtatgcgtgtcgtcggccttctcggtgaagccgagcttgaccttgcgctccagacggtcgatggtcggctgatccatcgtcacgaaaatctggttggtgggcgcttcgaaagtgagcatgtagcccttggcgcgcagggcctcgcgaatacgatcggccgcctcattggcgttgcgggcgatcttgaagtacagattgtcggtgaataaggcgtcaaactgcgcgcccagcacgaagcccttggccagcaaggcgccgtgctgcttgatgcgggtcaggaagtgcttcggcgtgttgtgcttggtaaacaccacggcctcgccgaacagcgcacccaccttggtaccgccgatgtagaacacgtcggcgatggtcgccagatccgtgagcgtcatgtcggaaccagtggcggtcagcgcgtagccgagtcgcgcgccatccacgaacagcggcatatcgtacttatgcgccacatcggcgatagcctgcagttcggctttggagtagatcgtgccgtattcggtgctttgcgagacgtacacggatccagggaacaccatgtgctcgtagttgccgtccgcatagaaggtcttgcagaactcgtccagttcggtcgggtccattttgccgttgtgctggggaatcgtaagcaccttgtggccggagaactcgatggcgccggcctcgtgcacgttcggatggccggaggcgaccgcgaccacgcctgcatacgccggggtgatggtgtcgatgacgacctggttggtctgcgtgccgccgacgaggaaccacacatccgcgtccggctggccgcaggcctcgcggatcttggccttggcctgatcgctcagttcgtcggacccgtagcccgaatacagatggttgttggcttcagccacggcttcaagcactgcgggatgggtggcgcgggagtaatcgttctcaaaagacagcatgacggaccttttgtccttgtgttagatgaattggatatgcccgagtgtacaacgtggcggttcccggcaggagcggggaattcatggagaaaaacaaaacccttccgcgaacggaagggttttactggggtggccaacgcggctcgaacgcgcgaccttctgaaccacaatcagatgctctaccaactgagctatggccaccatagtgtcgtattcagcaagctgaattcgcacaacaggtgaatactatacacaactttgcggatgtgtgctcatcggtgtgtcgcgatggaatcaagcggttggtttgctgatgcagctgctcgcttctcagtacgtgtccgtgccgactcagtccctgttcctcaatgccgtcaaggtggtgctcttcccgattgccctcggtgtgatctgccacatgatcttcggcaagaagatcgagaaggtcacggtggccctgccgatcgtgtctcaggtggccatcctgctgatcatcggcgtggtcgtcgccgccaatggcccgaagctgttcgtggccagctccctgatggccatcccggtggtcatcctgcataatctgtgcggctactcgctgggcttcggcttctcgaagctgatgtacaggatctacccgaagggcttccgctacgcgcagcagaaggccatcacgttcgaggtcggcatgcaggactccgccctgggcgccacgctggccctgacctccttcgcgtccaacccgctcgccgccgtgccgtccacgttcttctccgtgtggcacaacatctccggctccatcctgtccagctggtggcgcaaccatgacgaccggcacgagattcattgggattctgacaacggcgagaagggctccgccaagagcaccgtttccgtggcccacccgttcgacgccgacaaggccgccaaggtcgctgcctgaaatcctgaaatggtgagaaaggccgggtaaggcacgactccagtcagtcggtcatccacctttcctaccccgcataacatagccgctcccgcttactcccgattaatgtatcgggcgtttcgcgagggcggttttgctataattagtaatgcagaaagcggcaaggtaatacggcaaagaggccgggtcgctagaggttcccatcggatatggaagagcacgagggtgtgctggaaacagataacacagaagcggcatgtggtgaaaagaaacataatgtaacctccttggcggtgcccccgtgtgacatagtctccgcgggggcacctgctgtgtggcgtttgctttttcgcgacgcattcccgggaatgttgcgttgggagggcgtgtgtgcgtgtgttgtgcgacgcattcccgggattgttgcgccagaaggagaggaaaagtacagggcgcggattgtcccaagctagtgagtcgaggcccggcgcgtcgttgtccggcggaatcgtagtatagatattcgtgtgtgccagcagcacgccttatgtaacaggcgagcatgctgggatatccttcaaaccgctgatcgcacgtagtaatgcgccgacgggaggggcgaaggccatcgggccggtggactgggctatcttttccgattcgtcgggtgtcgccaacaggcagatgccaagcgagtgtgctgaaaagtgtgggcgcagtgcggcggtcacacaaaagcaagagaaaccactgaatcggagaattcaagttgcctactattgaacagctcgtccgtaagggacgtcaggcaaagccgaagaagtccaagactttggccctgaagggcagcccgctgcgtcgcggcgtgtgcacccgtgtctacaccaccaccccgaagaagccgaactcggctctgcgtaaggtcgctcgtgtgcgcctgtcctcgggcatcgaagtcaccgcctacattccgggcgagggccacaacctgcaggagcactccatcgtgctcgtgcgcggcggccgtgtgaaggatctcccgggtgtgcgttaccacatcgtgcgcggcgcgctcgatacccagggtgtcaaggaccgtaagcagggtcgttccctgtatggagcaaagaaggcgaagtaagagatatgtcacgtaagggaccttccaagaagcacgtcgtgctgcccgatccgatctacggttccaccgtggtggcgcagctcatcaacaagattctgcttgacggcaagaagtcgatcgccgaagacattgtctactccgcgctcgatatggtcaaggagaagtccgaccaggagccggtggctgtgctcaagcgcgccctggacaacatccgtccgtccctcgaggttcgctcccgccgtgtcggtggcgccacctaccaggtgccggtcgaggtcaagccgaaccgcgccaacaccctgtcgctgcgctggctgaccgacttctcccgcgcccgtcgtgagaagaccatggccgagcgtctcgccaacgagatcctggatgcctccaacggcctcggtgcttctgtcaagcgccgcgaggatactcataagatggcggaggctaacaaggccttcgctcattaccgctggtaatcactcgccctgagtaaaactaaggaaaaagatggctgaagagatttcggacctccacgacgtccgcaatatcggcatcatggcccacatcgatgccggcaagaccaccactaccgagcgtattctgttctacaccggtaagaactacaagatcggcgagacccacgacggcgcctccaccatggacttcatggcgcaggagcaggaacgtggtatcaccatccagtccgctgctaccacctgcttctggagccgtcagtcccacgacaccaaggacaagttccagatcaacatcatcgatacccctggccacgtggacttcacggccgaggtggagcgctccctgcgtgtgctcgatggtgccgttgccgtgttcgacggcaaggaaggcgtggagccgcagtccgagaccgtgtggcgtcaggctgacaagtacggcgttccgcgtatctgcttcatcaacaagatggacaagctcggcgcgaacttctactactccgtcgacaccatcaaggagaagctgggcgccgctccgatcgtgatgcagctgccgatcggcgccgagaacgacttcaccggcgtcgtcgacctggtcgagatgcaggcctacgtgtggaacggcaccgaggagctcggcgccaagtacgacaccaccgagatcccggacgatctcaaggacaaggcccaggagtaccacgagaagctcgtggaagccgccgccgaagccgacgacgaactcatgaacaagttcttcgaggacggcgacctgtccaaggaagacatccgcgccggcgtgcgcaagctcaccatcgccaaggaagccttcccggtcttctgtggttccgccttcaaggacaagggcgttcagccgatgctggacggtgtcgtcgactacctgccgtcccccgaggacgtgccggccatcaagggctacaagcccggcgacgagtccgtcgagatcgaccgccacccggtcaagaccgatccgttcgcggctctggtcttcaagatctccacccacccgttctacggcaagctcgtgttcgtgcgcgtctactccggctccgtcgtgccgggcgactccgtgctcgactccacccgcgagaagaaggaacgcatcggcaagatcttccagatgcacgccgataaggaaaacccgatggaccgcgccgacgccggcaacatctacaccttcgtgggcctgaagaacatcaccaccggtgacaccctgtgctccatcaacgacccgatcaccctcgactccatgaccttcccggatccggtgatccaggtggccgtcgagccgaagaccaaggccgatcaggagaagatgggcatcgccctgtccaagctggccgaagaggatccgaccttccaggtcacgaccgacgaagagtccggccagaccctgatctccggcatgggcgagctccagctcgacatcatcgtcgaccgtatgcgtcgtgaattcaaggtcgagtgcaaccagggcaagccgcaggtcgcctaccgcgagaccatccgcaaggccgtcatggaccagggctacacccacaagaagcagaccggtggttccggccagttcgcaaaggtcctgatgaacttcgagccgctcgacaccaccgagggcaagaccttcgagttcgagaacaaggtcaccggcggccacatctccgccgaattcatcggccccatcgaggccggtgtcaaggaggccatggagtccggtgttctcgccggcttcccggtcgtgggcgtcaaggccaccgtcaccgacggccagatgcacccggtcgattcctccgaaatggccttcaagctcgcaggttccatgtgcttcaaggaagctgccccgaaggccaagccggtcattctcgaaccgatcatgaaggtcgaagtccgtacgccggaagagtacatgggcgaagtcatcggcgatctgaaccagcgccgtggcaacatccagtccatgaccgacggtgtcggcgtcaaggtcatcgacgccaaggtcccgctgtccgagatgttcggctacatcggcgacctgcgttccaagacccagggccgcgccatgttcaccatggagatggactcctacgacgaggtgccgaagagcgtctccgaggagatcatcaaggcccagcgcggcgagtgacacgcgccacatcatgaagtggccggtgtctccagtcagcggtagtatcgtataccgctgactgggttctggctcttcaaagtggcacataacccagaaacccagtagaataagcgagtccctgtgcgaaagggcgcaggaaactcacgagacgtccaggaggacaaaagtaatggcaaaggaaaagtacgagcgtactaagccgcacgttaacatcggtaccatcggccacgtcgaccacggtaagactaccctgactgccgccatctccaaggtgctgcacgaggagttcccggatgtcaacccggagtacgacttcaaccagatcgattccgctccggaagaggccgcccgcggtatcaccatcaacatcgcccacatcgagtaccagaccgagaagcgtcactacgctcacgtcgactgcccgggccacgccgacttcgtgaagaacatgatcaccggtgctgcccagatggatggcgccatcctcgttgtggccgccaccgacggcccgatggctcagacccgcgagcacgtgctgctcgcccgtcaggttggcgttccgaagatcctcgtcgccctgaacaagtgcgacatggtcgacgatgaagagctcatcgagctcgtcgaagaagaggtccgtgacctcctcgacgagaacggcttcgatcgcgactgcccggtcatccacacctccgcctacggcgccctgcacgacgacgctccggaccacgagaagtgggtccagtccgtcaaggacctcatggccgccgtcgatgactacatcccgaccccggttcacgacctggacaagccgttcctgatgccgatcgaggacgtcttcaccatctctggccgtggtaccgtcgtcaccggtcgtgtcgagcgtggccagctggccgtcaacaccccggtcgagatcgttggtatc

SEQ ID NO: 1108 - DNA, 5093 bp, Unknown
  R81_24m  MAG No. k141_843
gcggcgctcgagactaggggtgcgaggaggtaggggccaatggcaaatctacgcaggatcaatcaggaggatctgcgcaaccataacctgtcggtgacgctcgacaccttattgcgtgcgcagatcctcctgattgatcctgcgtagatttgccattggcccctacctcctcgcacccctagtctcgagcgccgcacaggcgctcacatccgtctatcgcacaatgatattgtgcgtcaaacgattgaaccagatacgcaccctcgcgtgtttccgtttgcaatcatacactgcaatacagtatagtttaatcgtctaacttattggttgtggcgcgccgaaacttgcaagcgcgaccctcatcgaggaggaatgcatgacgagagtactggttgccggcgtagatacgtcaactcaatcaacaaaggtccgcattacggacgccgccaccggcgaacaggttcggttcgggcaggccaagcacccggatggcacctcggtcaacccggaattctggtgggaggccttcaccaaggccgccgagcaggccggcgggcttgacgatgtcgcggccctcgcggttggcggccagcagcatggcatggtcattctcgacaagcagggcaacgtgattcgcgatgcgatgctctggaatgacaccagttccgccccgcaggccgccgccctgatcgacaagctcggtgcaactccggccgagggcgacgaaccggacgacgtgaccgcccgcggcaagcagcgctgggtcaaggccgtcggatcctcccccgtcgcttcctacacgctgaccaaggtggcgtgggtggccgagaacgagcctgagaacgccaagaagattgccgccgtctgtctgccgcacgattggctgagctggcgtatcgccggctatggcccggtggccgagggcgaggacgctcatctcgaagccctgttcaccgaccgttccgacgcttccggcaccatttactacgatgccgcgcatgacgagtaccgccgcgatctcatcgccatggtgctgacccccgccgagggcgaggaagccgccaaggcccacgccgacgccattgtgctgcccaccgtgctgggcccgcgtgaggcagccgccgtcaaggccgaccccggcattgccggcaaggacgttgaaggcggctgcatcatcggccccggcggcggagacaatgccatggcctcgctgggcctcggcatggccgtgggcgatgtgtccgtatcgctcggcacctccggcgtggccgcggccatcgctgaaaacccggtgtacgacctgaccggagcgatttctggctttgccgactgcaccggtcattatctgccgcttgcctgcaccatcaacggttcgcgcattctggacgccggtcgcgccgcccttgacgtggactacgacgagctggccgaactggcctttaaggccgagccgggtgccggcggcatcaccctggtgccgtacttcgacggcgagcgtacgccgaaccgtccggacgccaccgcctcgctgactggcctgaccctgcacaacaccaccaaggagaatctggctcgtgcgttcgtcgaaggcctgctgtgttcccagcgcgactgcctcgagctgattcgttcgctgggtgccgagatcaaccgcatcctgctcattggcggtggcgcgaagtccgtggccatccgcacgctggccccctcaatcctcggcatggacgtgacccgtccggccaccgacgaatacgtggccatcggcgccgcccgtcaggccgcctgggtgctgtccggcgaggccgaaccgctgacctggcaactcaccatcgagggcgtggagaccggcaagcccaccgaagccgtgtacgaggcatacgccaaggcgcgcggctgatacgctgccagcacaatccatgagataacaactgaataacgattcctgatgaatgccgccatggcaagcatcgcgaagagccgctgttataccgcgctcctcgctgaagcacacatggcggaatttttcgtttcccacacaatccacaaatacggctataatcaagtcgtttgaacaagtctggagattcttctatgaacgaccgctcccgtatgatgctgtacgccctgaccgccgtcgcatgcgtgatttggatatggcaatccgccaaagaagcaatggccgatggcacgatgatcagcacctcaaacatcatctttttggtatgcatcggcattgccgccgtctactgcgccgccaacgcattgatattgtggtggcgtcaacccagcaaggaggatgcggagaacgatgacgccgcggatacgcctgacggtaccgataccgacaccgcagatgccgagggatccgaggacgacaccgatgacgatgtcgaaaccgacgtcgcaaccacggatgccgatgcatcaccaaccactaatcgccagtaaccatcgttatcgttcgcccgaatcaagcgaatcatcccacttcagcaaaggaacattatggaagtaacaaccgtgtcaaccgtgatcagcgtggtgctgggcgtcatatgcgcgccttgcggcctgtttctggggctcgttcccatgaaggccgatctggtgaccgccaagcagtcaaaggcctcgcagatggtgagcttcatcgttgccatagtgttcatcggcttgctggtcgcaggccatgatctggagacctgggccatggtaatcggtctggtcatcggcttcgccgttgccaagattcccgcgctgcacgcctgggctttgcacaagtggccgttcttcgagcccaagaaagcggctcccgcccccaagcgcgtcaagaaagccaagaagaagtaagctctggccttacctattcgctgaaagcgggatatcgacatcggtatcccgtttttcattggccgtacatatccgctgaggcacatcgccgaatcatattgtctacaccccaagtcagggctgatttcgcgaagaacgtacaccgggatccatccatcgcgacaaacggaaaagggacgctgcgtgcaacagcgtccctttcggaggaggaatggaactcaggtccatccccgtggccaccgggcgggcccggaggccaggtttagctcagcctttctttttcttggagagcaggtcgtaggcgacggcggcgatgacgacgaggcccttgatggtcttgacccaggcggcgtccacgcccatgatggacaggccctggttgagcacgcccatgatcagggcgccgaccatggcgccggggatggtgccgatgccgccggtgacggccgtgccgccgatgaagcaggccgcgatggcgtccatctcgaactccatgccagcggaaggagagaaaggagaaagaaggaatggaaaggtgccatgcgggcataacacaacaccgcacatggcgaaactatcgaatcagcccatcgggcgcactggcatcataattgatgtgtacacgcccgatggagcgaattcagtcggtcagaccgatggtcactcgacctcagccagggcatcaatgatgtagttgttgatggtggccttgacggactcgaggtgatcggacttggtggcggcgatgagctcggactgcggcttgtcgaggctgtaggcttcgaggtcggccaaggtgacgttgccctcgtcgatgtccttgccgatgccggagtcgtaggagctgtagcgctcggcctgaagattctggatgaagccgtcctggttcatcttgtcggcaaccagcaggccggcggcgtaggcatccatgccggcgatgtgggagcggaacaggtcctcctcgtagaaggaggtacggcgcggcttggcgtcgaagttcagaccaccgtgaggtccgatggagccggcctgcaggacttcccacatgacggcgacggtctcgtacagatcggtcgggaactcgtccatatcccagccgatgagcttgtcgccctggttggcgtcgagggaaccgaggaagccggactcgcgggccacgcggatctcgtgctggtaggtgtggccggccaggttggcgtggttgccttccaagttcagcttgaagacgtcggtcaggtcgtggttgcgcaggaactcgatggcggtggcggcatcgaagtcgtactggtgcagcgtcggctccttcggcttcggctcgatcaggaactgggcctcaaagccgatttccttggcgtaatctgcgcacatgtggaagaacttggcgatgtggtcggtctcgcgcttcatctcggtgttccacaggttctcgtagccttcgcggccaccccagaacacgtagttctcggcgcccaggcgcttgccgatctccaagctcttcttgagctggccaccggcgtaggcgtagatgtcggcgaacggagaagtggcggcgccggacacgaagcgcgggttggtgaacagggaggaggtgttccacagcagcttgacaccggtggacttcatattctcgtcgatcttgtcaacgaccttgtcgaggttggcgttggtctcgcgcagggtgtcgccttcgggggcgatgtcacgatcgtggaagcagaagtactcgacgcccagcttctggaacagctcgaaggcgtagtcgaccttggccagagcctggtccatcggatcggtgtacttgtagtacgggcggtgcgcggtgccggtgccgaacggatcaaccagttcctggttgaaggtgtgccaccaagcaacgccgaagcgcagccaatccttcatcttcttgccggcaacgaccttgtcggcatcgtagtaatggaaggcgaagtcttccttcggtcctttggcgcggccgacgtactcgatcttgtcaacatcccacagacccatttgggcgctcctttgcagtaggcgatattacggattgcaggaccaataataaaacgaacgaactaagtttgtcaaatgattgaattaatacgccgcgtctcagcgtgttgccagtcattgcaatggttttcgaatgcagtcaaggcacagatagtatgggcaagccaagaaagacaactcagccaagaaaacgagacttgataattgacgtcacgcaattcctcgccggccac

SEQ ID NO: 1109 - DNA, 27373 bp, Unknown
  R81_24m  MAG No. k141_1001
cccgatgttctccgaagttcgctgatttataggaagagacttggcagacaacaaacgcaccggcctgtccgctctagccgacgccggcaatgaaggcgaggatttctccgtcatcgacgccatcggtggcccgcgtggcgtcatcgaatccatgctgcctggcgtggtgttcgtcgtactgttcgtggccacgagcaatctgaatctcaccattgcggtttcggccgtgttggcggtattgcaggttattgtgcgactgattcagcgccagtcggtaatgggcgcggtctctggtctggtggcggtaggcatctgcctgatttgggcatggcagactcatgaggcccgcaattactacatcttcggattcattaccaatgccggctatgccgcgttgcttgccgtgtcgctgattgcgcgcgtgcccggactgggtttggtcgtcgaattcatccgtagcctgcccaccgagcatttcaaggcatggttccatgactggatggacgacaaggccctgaaacgcgcctatatgattgtcaccggcctgtgggtcggtctgttcctgctgcggctggtggtgcaggtgccgctgtatctgaccaaccatgtagctgcactcggcgtgacccgcctgctcatgggcattccgttctgggcattggcgatttgggtgagttacctcattattgccacgccgatgcaccggcataaggtcgcggctaggaagatacagactgaagtcgctgttgatgccgaactcgaaccgagcgcaaccggaaaggacgatgatgcaagctgaagttcgtatcgaacgatacgccgaccaaggccgctgcgtggcccatatcgacggtcgtgtggtgttcgtccgcttcgccttgcccgacgaactcgtgcgagtcgaacttgacgagccccacgaccgggacgaccggttctggaccggcgaagtcgtcgaggttctcgagccgtccgaagaccgagtcaccccggcatggccacttgccggtcccttggcgatgggcgggggagtgggcggcgcggatctcgtgcacgtctctttgcccggccagctcaagtggaaggccatcaccgtctccgaacagatgagccgactcggccatatcgacgtggccgttcccatcgagcgcatgcccggcgacaaggcagccggcggcctcaattggcgtacccgcatcgaaatgattgccgacgacaacggcatgccatccatgcgccggcgcggcacacacaaccgcgtggccatcgacaccatgccgcttgccacgcgcacgctgctggacgtcgccaagcgcgaacacgtgtgggaaggcggctttgaacccggctcccagattcgtctttccgtgcccgaaccgcgcggcgagatcgtcgataccgcggcagcagacgacaattacgccgtacttgtggacggcgaactgcgcgccggctcccagctgctcaccgaacaggtgaccatcaacggcacgaccttcgactatcaggttgacgccaacggtttctggcaagtgcatcgccaagcgccgatcgccctcggtacgcacgtgatcaacctggtcaacgggcagctgcagtcagcggcggacgccgtaatctgggatttgtattccggttccggcctgttcaccctgccgctggccacaatgaccggtgaacgcacccgcatgctcagcgttgaaggcgcgcgtgtggccgtcaagaacgcccagcgcaatctgcgcgccatgaacctgaacgacgtggacgcccgcgcgggtgacgtctcgcgcacgctggaccatgtgccggcgcatctggccaagccgaatgtcgtagtgcttgatccgccgcgtgccggtgctcgtgccaaggtctgccgccagattgccgcggccggcgcatccagcgtggtctacatcgcctgtgatcccaccagcctcgcacgcgacaccgcgacactcatcggcgaaggctacgagctcaaagacatccgtgccttcgatatctacccgatgacccaccatgttgagacggtggccctgtttacccgctgacaggtgagcatatgacacgacgaattctcggattgctggcctgcatggcggctgtgttgtccctggccgcctgcacgccggccggtagggcggtcggcgatacccaagacagcatgccggaagtcgcccacgattccacacatcccacggatgtcacagtcggctttgtggggtcgactgacaccgccgcagacgagttcgtcatcaatgcgctgtctgatgacaaactcaatgtctactatgcctcgctcgaaacatccgcaagctcggcaaacgcaactgatggtgtatccggtgaaaccgaatcttctgacgccggcactaccagcgaaaacggtgccgatagtatggatgctcatactggcgtcgacaagaatgcggccaccgcacagcagggtgttgccgatttcgtagctcgcgcggtcaaaatcgtggttatcagcggcatcgacgttaccgacgccaaccgggagagctggaaccagacgttgaccaatgcgcgtgaagccggtattccagtcgctctcattgatccaaagcatgcgcccgaagatgaactgctgtacgccgtcatccttcacctcaacaccaacagtgccgattctggcgacactgccgataccaagccaatgactattactgacgccgtgctcaccatcacgcgcgatgaaccccacgaacgcgagatcaaagtcaccgtttcctgagccgaatcaggcccttgaagctgagaaagcaccctgaatcatccctgagccttagcggattgcgaaacaagacgcggtaggctggggaatatgagtgcaacaacagccgtggaaatgcctgagatcggagcaaccggtcttacctccaaagaagtggtgcagcgtatcgaaagtggccaatcgaatgcggtgaaaacatccacctcgcgttcggttcaagatatcgtgcgagccaacgtattcacgctgttcaacggcatcatcttcgccgcgatggtactggtgctgatcaccggttcctggagggacgcggtgttcggtttcgtcatcatcatcaacacgggcatcggcatcgtcaccgaactcagggccaagcgcacgttggataagctttccatccttgtggcctccgaattcctcgtgcatcgtgacggcagggacgtggaggtgccccacaacgagatcgtgctcgacgacctgctgtggatccgtgccggcgaacaggtgccggccgacgggcagatcatccagacctggggactggagcttgacgaatccatgctcaccggcgaatctcgtaccgtgcgccacaaggtgggggagcaggtgtattccggtgccaccgcggtctccggcatggcattggtcaaggtcaatgcggtcggcagccattcctacgccgccacgctcaccgcgcaggccaaggtatacaagaaaaccgtgtccgacctgaacaagggcatcaacacgattctgaaattcatgaccttcctcgtggtaccgctgtgcattctgctgattctttcgcagattcatacggtcggcggttggggcacggcactctccaccggcgaatggcggcaagccgtggtttccgcggtcgccggcgtagtaggcatgattcccgaaggcttggtgctgctgacttcgctgaacttcgcggtggccgccatgcgtctcgcccgtcacaatacgctggtgcaggagcttgaatccgtggagacactggctcgcgtggacgcgctgaacctcgataaaaccggcacgatcaccgatggcggtatcgccttcaaccggctcgtgatgctcgattccgccaatgcggctgcggaacaggcagccacgcaggccctctacgactgctgcaacgaagagcagcccaacggcaccggccaagccgtactcgccgggctcaaggcccaaggatatggggcaggtgcggttgagtctcgtgtcccgttctcttcggcgcgcaaatggagtgcggtgcgtaaatccggcgagacctggtacatgggagcgccggaggtgattatttctgcgcttgagggtgactattcgtcggtgttgcagcaggttaacgagtatgccaatgacggcaaccgtgtgttgcttgttgcgcgatctacagctcccctctccgaggggagctgtcgccaaaagcgactgaggggagcagttgagggagccaatgtctcggacggcccgcaactggatgtgcaggctgagccggtggcgttggtgttgtgctctgagaagattcgcgaggacgccgagcggacgctcgcttggttccgtgagcagggtgtgcgctgtcgtgtgatttccggtgacaatccagtgaccgtgggtgccatcgcccgcagagtgaaactgacaggcgaccatgagccggtggcgatggacgcgcgcgaactgcccgaggacgtgaacgaactggcccgcgtgctcgaaaacgtcgatgtgctcggccgcgtgctgcctgaccagaagaaggctatcgtgcaggcgctgcacacgcagaaccacgtggtggccatgaccggcgacggcgtcaacgacgcgctcgccatcaaggaggcggacctcggcatcgccatgggcaacgcggcacccgccaccaaagccgtggcccaagtggtgctggtggattccaagttctcgcacctgccggacgtcgtggcacgaggccgtcaggtcatggccaatatggagcgcgtggccagcctgttcctcgtcaaaaccgtgtactccgcgctgatctcgctcggtgtagtgctgacgcaaatcccatacccatacctgccgcgccatatcacgtatatcggcgctctcaccatcggcatgcccgcgttcatcctggcgctcgcgccgaacacgcgccgctatattccgggattcctcaagcgcgtggtcacgttcgcgctgccgggcggcatcgccactgcgctgtcggtgctgctggccgcttgggtgctgccgccggtcatgggctggaacgtgaccggcgatgccgcggacctgtccgccctgcgcgccaccagcgccatcatcctgttcgcgatgggcgtgttcgtgctggcccgcgtggccagaccactcaacggttggcgtggcgtgctggtggcggtgttcgcggcggcgggcgtgatcggcgcgttcgtcccgttcgtggcgaacttcttcgccctgattctgccgaccggcgccacgatggtggccacgctgatcgcgttggccggttccgcgctgatcttcgcgctgtgcctgtggctggcgccgttcgtgcgcggactgacgggcaagctctcgcgtcggcattgagacggcggcgcgattgtctcatacttcaagccgacacgccagagcctcggtaacgtgcccgtaccatgtgtagcggataatcagcggcatcataagccgattcatgatttcggaggaagcatgtccttacgcgacgaccagctggctaccctcaaggcagccggcaaggacttcgattactacaacatcgccaatctcgacggcatcgatcatctgccgtactcgctgaaggtgctggtcgagaatctggtgcgcaacatcgacggtgccaacatcaccgacgagcacgtcaagaccctgctcgactgggatccgaacgccgaacccagccacgaaatccagttcacgccgtcccgcgtgatcatgcaggacttcaccggcgtgccctgcatcgtggacctcgccaccatgcgtgacgcggtcaaggacctcggcggcgacccggaggtcatcaacccgcaggtccagtccgatatggtcatcgaccactccgtgcagatcgacaagtacggcatcgccgacgcggtccagcaaaacatggacatcgaataccagcgcaacggcgaacgctaccagttcctgcgctggggtcagcaggcattcaagaacttccgcgtggtgccgccgggaaccggcattatccaccaggtcaacatcgaatacttggccaaggtggtcatgagcaaggccgaggccaacggcaacacgctcgcctacctcgactcctgcgtgggcaccgactcgcacaccaccaccgaaaacggtctgggcgtgctcggctggggcgtcggcggcattgaagccgaggccgccatgctcggccagccgatctccatgctcgtgccgcgcgtggtcggcttcaagctcaccggctccatcccggagggcgttaccgccaccgatgtggtcctgaccatcaccgacatgctccgcaagcacggcgtggtcggtaagttcgtggaattctacggcgaaggcatcgcctccgtgccgctggccaaccgcgccaccatcggcaacatgggccccgagttcggctccacctgcggcatcttcccgattgacaatgtcacgctcgactacctgcgcctgaccggccgctccgaagagcaggtcgccctggtcgaagcctacgccaaggccaacaagctgtggggcgacgcttccgacccggattacgtggaaccgcagtactccgaatacgaggaactcgacctcggtaccgtggtgccgtccatcgctggcccgaagcgcccgcaggaccgcattctgctgtccgaagccaagagcatgttcgagaagaccgcccccgcctacgagaccgagaagaccgtcaaggatccggtggccgtgtccaccgacttccgtggcgatttcgacatcgaaaacggcgacgtggccatcgcctcgatcacctcatgcaccaacacctccaacccgtccgtgatgatcgccgccggcctgatcgcccgcaacgcacatgccaagggccttaagcccaagccctgggtcaagacctcgctggctcccggctcgcaggtcgtggccgactacctcaaggccgcggggctgcaggacgacctcgatgcactcggctaccagctcgtcggcttcggctgcgccacctgcatcggcaactccggcccgctgctgcccgagatttccgaggcgatcaacgccaacgacctgaccgtcaccgccgtgctttccggcaaccgcaacttcgaaggccgcatcagcccggacgtcaagatgaactacctggcctccccgccgctggtcatcgcctacgcgctcgccggcacgatggacttcgacttcgagacccagccgctcggcaccgacgcggacggcaacgacgtgtacttgaaggacatctggcccaccaactccgaggtcgccgccgtggtcgacggcagcgtgagccgcgagatgttcctcaaggactacgcctccgtgttcgacggcgaccaccgctggaagggcctcgacgtgccggaaggcgagctgttcgcgtggaacgacaagtccacctatgtgcgcaagcagaccttcttcgacggcatgaaggccacgccggacccggtcgccgatatccacggcgcccgtgtgctggccctcctgggcgactcggtcaccaccgaccacatctccccggcaggcgcgttcaaggcctccagcccggccggcaagtacctgaccgagcgcggcgtggagccgaagaacttcaactcttacggttctcgccgaggcaaccacgagatcatggtgcgcggcacgttcggcaacatccgtctgcgcaaccagctgctcgcctccgtgggcgaggaggtgacgcctggcggcttcacctacgacttcctcgccaagaagccgaccacgatcttcgaagcctcccgcgactacatcgacaacaaggtgccgctcgtggtgctcgccggcaaggaatacggcaccggctcctcgcgcgactgggccgccaagggcacggtgatgctcggcgtcaaggccgtgatcaccgaaagcttcgagcgcatccaccgctccaacctgatcggcatgggcgtgctgccgctgcagttcccggcaggcgaatcctatgagtccctgggcctcaacggcaccgagacctacgatatcgccggcgtcgagaagctcaacgagggcgtgacccctaagacggtccacgtcaccgccacccacgaggacggctccaagaccgagttcgacgcggtggtccgcatcgacacgcccggtgaggccgactactaccgtaacggcggcatcctccagtacgtgctgcgcaacctcatgaagtaaccaccttcttggctcccctctcttgaggggagctgtcagcgaagctgactgaggggagcaaggccggtatccgccaacggataccggccttttccacgcatgccaaaatgctatactgtatagcatctttggaatggaggttgccatgaccatggtccaaatgaacgttcgcattgatgcgaaactgaagaacgaggtcgaagaagtcctcaagggcaaaggcgtatcggtgagtgacgtaatccggtcgctgtggttgtacatcgccgaccgcaaggaagtgccggcattggaaacgaccgccgaagagcaagcccgcgaggaggaaaagcagcgcaagctgaaactgattcgagaaggtgccggatacgtgcacaaggaactggtcaaggccggactgatctcagaagacaccgacctcatggaaggccttacctacaagcagttccgcgacaaaatgtacgacgagcaacttgatgcgtattacaacatgaagagggccgattgatgaccgacgtttccatgcagcgtattttgctcgataccaacgtactgttggactatttgctccatcgcgatgatcacgccaagatggcggaagcggttatggaacttggcgcgaagaacaacgttacgttgttgtgcgcgtcattgtcgctgaaggatatcgcatacctatcatcatcggcgattcgtaaggaattcaaaccgaatgaatcggaagtggagaatttcactcgcggctttctgtcgtcacgggtgccatggcgttgtatcgagcaggtgaaggagatgtgtgacatcgtcgctgtcgatgagtcgacatgtgatagggctttttccctgcaaaaacggcatcgggattttgaagatgatctgatcatcgttgccgcgcaacaatccggtgccaactgtgtggtcacatcggatgccgaattaatcagtcattttcccgaatattgcaaaacaccggctgaaatcgtggcggcgctggaataaatgagcgtgtggctcccctcacggaggggagccaccaatgatgtgccggctactgtagcctactgcgcctgtagacggaactgcttccagatgtcgctgagcttctgaccgttgcgcgtgcgcttccacacgtccagaccaccgccgcgacgtcctccggcggcggcacgggccgcggcggtcggagtcggatattcggagccgtcatccagacggagacgaccgttttcggtgaccgtggcgaaccagcgctcgcccttgcgcggccgctcccacaccagacgctcgcccggcaccagcagaccagcgtcaatcacctgccggatcgtgacgcgccgcgaactatgagacggccgtggagaggtcttcgacaactcatcgacattctgcttggtcagatcacgggcgtccttgtcataccggatgccccagtattccacgatgagtcggaccgactcttcctgccgcgcctccagcagggcaggtgtgcagtcagcgaaatccttcaactgattggtcagcgggaaacggcgcgaatccgcgcgcaacagcatgcggtcgcgacgtgccggatattcactcaacctgtccaactgatcctcagggccctgcaccagcgccatattgccgagtcggtacatccagaaatcatgctgatcctgcggccagtccgcaaacgatttcgaccgttcgatatccaacggcataatcggcagcgcactgaaccggcgtggtcgatccaactgcatgccggccttctgctcgttggcgcgaatcagcagcagacggaccaaatcgccgtcaccctgcatctcgccatgcaaacggaccaatgcgccttcacggtcgccgtccgagacatgcaacccgttcacgcgctggaccaaatagcccttgtcaagatcacggatggcggcgttcgcataaccgcgccgctccaacgctccagtgcgattcagcgtacggatgcccgtcacctgttccaatgcggtcagaatttccaacagccgacgctcgtcatgggcacccaacgattccagcgtggccgtggttctgtcggtacgtgaggcacgaaccacaaacggcgacaaatcggcgtcgcccagcccgcgatacgaattgaccaacgcccacatggccacgggcttccactcgtggctgcggtaatcgtccaatccctcaagccggctacgcacctcggcgggcagtacggtatcgctggggcgcgcgatgatccgccacgccatcgcgtagggtgccagcacctggttgatgaacgtgggcaccgtgcctttgtcgatgtacggttgcagcacgtcggccaggaaatcctcgatgagcttgtcggtggccggcttgtgcgtgagcacgagatgcagataggcgaagaattcctcacagtcatgcggatcgtcgccaagcgggtcaatgatgtcatcccagcgggcggcgtacacgtcaagttcggcggtcgacaggctggccgtggcgcgcgccttgaacacgtcggacggggtgagcggcaggccgcgcatgttcatcacgtcgaagatgcgatgcgcgccgtcgagatcgtcggtggtcacgatgacgagcgtcacctcgttgaccagatactgcgcgaattgctggcgttcggatgccgaccaattggagatctcgtcgtacgtcttgcggatgttggcgacgatgttgcgttgcgcagcggtcgccagatcgtcgtcgttcatgtcgaacacggattcgaggttgtcctcctgcacgtgttcgcggaagaacgccgcgtcgcgctcgcgcaacgtgaggcgaggctcggtgacgatgccgcgcagcttgtcgccgggctccaccagcagcgcgtcgagttggcacatgaggtccgggtctcgctccagatcgcgcaacacggcgatgatgatcgacagggataccagccgctgctgcccgtcgatcacgtcataacggttgtcgccctcgcgcaccagaatcagcgagccgaggaaatacggggtaccgggtgacttgcaggcgtcatccaagtcgcttaccagttgcaggatgttctcggccttccatatgtaggcccgctggaatgaggggattgtgaaccggaaatccggggtgaacactttcccgagtggtagttccttcgcgctgattgccatgtcaatcccttcgtcgccggcctctggacggtatgccgacgtgccgactgtgctcaagcctaccagtgttcgcccggcggcgggcgcatcacgccggctcgggcaccgacccctcgtacaagtagaacgaagacgggttttctcccggcccggatgcgggcagtgactgctcgcacacctgcgtcaggccgcgatgtacatagaatccgacatcgcacgtggtatccgtgaataggaagtactgacgtatgccggctgcgtggaatgcgctcatcatcgtctcgaacatgcgccggcccagaccgtgaccgcgcgccgccggatcaagtacgaacagcaccacttcagccgaatactcatggccaatgttcgccgcctgcttacgcagttgcctatcgacatgaagagtcccgagaatctcgctcgcagctgccatgccgtcgtgggcaaacgccagttgcaatagcttgcgcaaagaatgacgccggtgcatgttcagcgggctgcgatggtcgagctcgtcgatacgccccacaatcaatgcgacgggtttatcttccagctccgcgacaaaggccgtggtcacacgtgccagacagttctcccaatcggcctcggctgccagcaagccggtccgctcatcatattcggcgtaccaagtgcggcgcaccaggtcgatcagcgccggataatcgtctttacgtaacgttcgaataatcgcttcactcatgttctccattatgactgatatggctcgataacccgacgtgttacagtcgcgccggcaaatcggcccgctccaccagcctcgccatctgtacgcggcccatattgagcttgtccgccgcggaggagagatgcgccttggccgtacgctccgagataaacatacgggaggcgatttcggcgttgggctatgtgctgcaagacgattcgccgattacggtgcatgccacgcgcatggtggaaacgcccgttacgctttgcgatgagcagaacgagccgatcgatcctattcatggaatgttcagctttgttcctctaagattggtactggaacaaacgctaaaggagcgattatgacattcggtcagcagccccagaacaacgggcaatacaacccgcaatacaacacgcctgattacaacgccgcccaacagtctggatatggccagcaatacgcacagtccggttacggccagaactactatgcccagccgcagggcgcccccacctaccagtacgcgccgcaggatgcggccggtgccggcgcgggtgccgccaccatcaacacgacgatgacctacaactacgaggaggcccgccgcgtctccgtagccaaggtgtacggcgagatgaccattggcatcctcgtcaccgccgtggtcgccgtgctcggccagatcaccggagcctactacagcttcctcatggccaccggcatggtgggcctcatcggcttgtgcgtggtgcagattgccctggccgtggtgctcggcatgcgcgtcaccaagatgaagtcggccactgcgcgcgtcatgttttatgtgtacgccgcattgatgggcttcaccttgagctcgatcttcatggtctacgacctcggctcgatcggcgtggcgctcggtgtcaccgcagcgttcttcttcgcgctgaccatgttcggcatgactaccaagttcgacatgctcaaggccggcccgatcctgatgatcggcctgatcgtgctcatcatctcgcagatcgtgctcgccttcgtgcaggtcgacggcatgaccaagatcgtctgcgccatcggcctgatcctgttcgccggcatggccatctacgacgcgcagtccacgcgcgcgctgctgaccgaatacgaggcccagggcccggaaatggtcaagaagatctccatcctgtgtgccctgaacctgtacctcgacttcgtgaacatgttcctgtacatcctgcagctgctcggcaacagggactagcctcgccagccgattggtgggcggcatgtagcctgctcgtcaaacgtcacagcccgaccacattgtggccgggctttttcatgtctgtcacattcgcacgttaggctgtctccccgtgaaaagacaagaactcgtaggcatgctgagcctgttgttgaccgcgctgatctggggttttgcgttcgtggcgcaggtccagggcatggatttgatgtcgccgatgttcttcaacgccacgcgcttcacgctgggagcactgtctttggtgccgattctgctgtggcagcgtggccgggggagcgcggataagggcgatacagccggggtcgatgtcgttgggaccgaggcccccagggccgtctccacagatgccgcatcgaacggtgcatccgacgtcgttaccatcaccggtgccaagctgaatgcgaacaagcccgattcggccgtggcgcgattgctcgccaacccggtggccatttccgtgatctgcggcatcgtgctgttcaccgccagcaccctgcagcagtatggcattctgtacggcaaatcggccggccgcgcgggattcctgaccgccatgtacattgtgatggtgccgttgctggcctgcgtgttcctgcgccggcgcatcggcatgctggtgttcgtggccgtggtgctgtccatcgccggcttctatctgctgtgcatcaccgatggtttcggttcgatcggcctggcggatatcctgctcgtgttcacggccgtgctgttcgccgtgcatattctggtgatcgatactttgggcggcaccgtggacgccatcaagctttcattcggccagttctgcaccaccgccgtgctgagctgggcgggttcgctgatcgaaggctcggtcgactgggtcggcgctgctcattcctggattccgattctgtacgccggcatcggctcggtgggcatcgcgtacaccttgcaggtggtcggccagcaatgggtgccaccgacgcgagccagcctgctgatgagcctcgaatcgttcttctcggcggtaggcggtgcgttgcttctcggtgaagtgatgaccccgcgcggctacctcggctgcgccctcatcttcctcggcaccttgctggcccaagcgccggccaggctgccgaagtggctgcaacggtgaatgaatcggacgcaggccgattccatagcacctcagtccgtggtcttaggcgcttcacccacttgcggcgcgccgttgatgtcgcggtggatgttctgcatttgcacttcgatgttctgcagcgaacgggcgcagtcgagcagtgtctgtgaatgctcgctgagcttgttgtccggcaaatcggtcttgtagcgcagcgcatgctccagcgacgcccaataatccatggcgatggtacggaactgcacctccaccggcgtgtaatgcgcgcccgaggagagaaacacgggcaccgcgtagattacgtgcaatgaacgatacccgttctgtttcgggttcttgatgtagtccttgacgcgcagcacctgaatatcggactgcgacgacagatagttggacacggaatacacgtcgtcgcggtaattacagatcacgcggatgccggccacatcgaacagattgtccttaatcgaattgacactgattggcagattcttgcgctccagcttgccaatgatcgaactcaccgacttcagacggcgttccatatgatgtatcgggtcatggctgaaccgcacctggaactcgtcgtcgagaatctccagcttggtgctgatctcgtacatcgcgccttcatacacctgcatgaggtcaacgaatttaacgacctgttcgggagtaaaggtgcctcccggaagatccaacgctttgagacgggcctgtagatcggaggttttgagtcggctatgtcggtcaagtatcacgtccaccaatatactcggcggattccagacaatctggatgttcgcggggaatctttccaagaacccatatttaagatcgtgacaaccaatggcatacgtgaccggagcatgacgaaccccgccgatagaatcggtcgttatgaatgaagacatgatgaccgaggcggagcgtgcctcgattgcagccgatggaaccgatagcttgttgggggagcgcggcaagggcgtattccatatccacacgctcggctgccagatgaacgtgcacgattccgagcgcatcgccggcgtgctggaggccaatggctacgtccctgcaaccgaggaccagatcaatggcaatgacctcgatctgctggtgctcaatacctgtgcggtacgcgagaacgcagccgaacgcatgtatggcaccatcggccgattcaatcgcgtcaaactggttcggccgaacctgcagatcgccgttggcggctgcatggcccagcttgaccgcaagaagatcgcggatactgcgccatgggtttccgcggtgttcggtaccaagaacatcgaagatctgcccaagctgttggatcagaatcgtgcgaccggcaaggcgcaggtccaggtcactgaacaattgcggcagttcccgagccagcttcccgccgcccgcgcctcccgcatcagctcgtgggtggcgatttccgtgggctgcaataacacctgcacgttctgtattgtgcccaccacgcgaggcaaggaaaaggaccgccgccccggtgacattcttgatgagattcgccaatgtgtggccgatggtgccaaggaggttacgcttctcggccagaacgtgaactcgtttggttatggtattggcgatcgatacgctttcagcaagctgttgcgcgcctgtggaaccatcgacggtctcgaacgtgtgcgcttcacttcgccgcacccggccgccttcaccgatgatgtgattgcagccatggccgaaacgccgaatatcatgcatcaactgcacttcccgctgcagtccggttccgaccgcatcctgcgcgcgatgcgccgctcctacaggtccgccaagttcctcgatatcctcggtcgtatccgcgaggccatgcccgacgcccaaatttccaccgatatcatcgtcggattccccggcgaaaccgaggaggacttccagcagaccatggacgtggtgcgccaggcgcgcttctcctcggcgttcacgttcatctactcgccacgccccggcacgccggccgccgcaatggaacagattccgcgcgacgtggtgcaggaccggttcgaccgactggtggcgttgcaggagcagatcaccgaagagaacctcgccacattcgagggccgcgacgtcgaagtgatgatcaccggcaaactcggcaagaaggacaccgacacccaccgtgtcaccggccgcgagaaaactggcgtgctggtgcacatcggcgtgcctgaaggcgaaccggtacctgaaatcggcgatttcgtcacggtcaccgtcacacacgccggccgccataatctgcttgccgaccccgatgtggccgctggacagacctattccgtgcgacactgagggggcgtatatgacgcaacgagtcgtctccatcgtcggtcccaccgcgtcaggcaagacggggttgggcatcgccatcgcccggcgtctggccgaagcgggggagcgggccgaaatcgtgaacgcggacgcctaccagatgtaccgtggcatggatatcggcaccgccaaacccaccgccgaagaacaggcggccgtgccgcatcatctcatcgacatcatcgaccccgaagacacgatgagcgtggcccgattccagcagcttgcgcgcgagaccatcgccgacctgcaatcacgtggcatccggccgattctcgtcggcggctccggcttgtacgccagagcggccatcgatgacatcacctttcccggcaccgatcccgacgtgcgcacacgtcttgaggaacgcgagaaaaccgagggtgccggtgctttgttcgacgagctgcgggccaaagaccccgaagccgccgcgcgcatggacccacgcaacccacgccgcaccatccgtgcgctggaagtcatcgagcttaccggcaaaccgtattcggccagcctgccgcgctaccggtacgtgattccgtccgtgcagatcggactcgacctggaccgcccggatttggaccatcgcatcgatttgcgcaccaagcagatgtatgacgatgggttcatcgaagaagtcgaacggctgcgcccgcatctgggtgccaccgccgtacgcgcgctcggctatcagcagatcatcgacctgctggacggtatctgggatgtgaacgacgccttcgcggacatcgcacagaaaaccaagcgactcgcccgcaaacagatgggatggttcggccgtgacccgcgcatccactggctgcaggccctgaacccgaaactggtcgacaacgcgatggccattatcgcgcacgccgacgccggcgactacgacccgatcgacgcccgagccgacgaatacacccagcatcatctgggcgatatcacggcgtaggaatcagccaaaggccggtgcaatcacccgcaatcagtgtgcaggcccctgattccagccggcgatcaagaacacgcgcgtcggattcgccgggcgtagtatcgcgtcgaacatcgtctccagtgcggacgtgtcgccccgatatgccgagtgcttggcggcgcgatactcttcgcgcgtcactgagccccagtcgagatcccagccggcgtcatgcgccaagcgtgaaccgaatatacgcagcaccatcgcattgccgccacggaacggatgcagataaccgagctcatcataaatagaagcgaacgcgtgaacgaacacgtcgcgatccaacgcatgcaggttgcgcttgtccgccaactccatcgcgatgttgtgcgcgccggtctcaatgagcccagccgggaagaacgcctccggattcgcggcccgagcccggtcgttcgtcacctcgcgtgtggtgtttgaggtacgcaacttgcccgcatcctcgaacacgccttcgaacagccccttatgaatggcggtcaactcgtccaagtcgccagacggattccaccgacgttccgccaacaatacggtacgtgcgaacaccgcatccgcgcgatccgtggcatgatcatccagactgccggcagccagacgatcctttccggcagggtcggcggcggcgcgcagacgcatggcggtctgctcgtccgccacgtcgatgagatgggtcacgggctccaagccacgttcgtaggcaaccgcggcgcgcatcgttgcctcgcccggcgtcatcgcttccagtgcgcagttcttgagtgcaaatgcgactgcgctcgcacgctctgcgggtgtcatgcaacccatgataaggcatattcgcgctccagcggggaatcgactcggacgaacctcgacgaaccgcggcgaatcggctgtcgggattcgtcaatcgaccatatcgtcacggtgtcgtcaccaaccatgcacccccgtactagtagaatcagacccgatatggcacgaacagcatcctccaacagcaccaaaccccgtaaatccaaagacaacgggtctacccatgatggcgaaaccaaggtccagcccgagcttgacctcgaacctgagccgttgtggaagaagatcctgctcgcgattccgcgcgcgttcggctccggcgtacgcgccgtcaccggcgtcggcgaatacgacccagcctaccgtcgtgacggtttgtgcttcctgctgctcgtgctcgccgtactgttctgcgcgtccgaatggttccgtgtcagcggtccattcggccagctgcttcacgccatcgcggccggtgtgcttggtctgatgagcgtcgtgctgccggtgttgctcgccgccgtggccttccgactcatgcgcaattccggtaaagggtccaataacccgcgtgtggtcaccggttgggtgctgctcatgtggtcgatttgttcgatcatcgacgtggcgatcgccgccgaccacaccggattcgacatcacgattctgcaatccgccggcggcctgttcggcttcttcctcggctcaccgctcgcctggggcctttccaacgtgttcgccatcatcattttcgtggtcgtcggcctgttctccttgctgatgattaccggcacccacgtcaccgatttgccggaggatgcgcgcaaaatcgcagctaaaatccaacgcaaaccgtatgtgccgatgggccaggaggccgacggaagcgccagccagttccccaacgaggtccgtgtgggagataccacactcgcctttgccgacggtgttccctcgcatgacggcaacgacgacggcaacgacaacgatcaggccggcgatgcacggcccagcctgttcgcacgactgttcggccgcaaatccaagaccgaagacgacaaaacccttgacaagtatgctgccgacgatccgttcgaccgtgccgccagccagcatggtgccaccgccgaaaccccggtggtcgatccgatgaccggcgagattaccggtgcgcgaaccattgcatcgtcttcgtacgacggtcgtccgcacctatccagccctgcgcctgctgccgatgcggatgatggcgacgcttcccgaacccgcgtcatcaccagtggccagaccatcgccatgcccggtgggggagcggtagacgatccgtgggcacccagtgccgcccaggccggtactgtcgcgctcgcaggggcagccggggcgatgggagcggccggggccgccggtgccgcggccgcggcagccgcgaccggagcctacgcaggcgccgatgcggatggcagcggagtcggccagggcgtgcccaatacggacggacagccgaatgccgccgccggcaacggtacagacgacgacgccaataggccgtatcagttgcccgacctgaacctgctgaccaaaggtcagccccatgcgatgcgcaccccggccaacgatcgcgtgatccgggcactgacttccaccttcgaacagttcaacgtggacgccaaagtcgtcggcttcctgcgtggtccttcggtcacccaatatgaggtcgagcttggccccggcgtcaaggtggagaaagtcaccaacctgcagcgcaacatcgcctacgcggtggccagttcggatgtgcgcatcctttcaccgattcccggcaagtccgccatcggcatcgaaatcccgaacgaggatcgcgaaatcgtgcacttgggcgacgtattgcgctccgacaaggccgtgggcgacccgaacccgatgctctccggcatcggcaaggacgtcgaaggccacttcgtgaccgccgacctgaccaagatgccgcacctgctggtggcaggtgccaccggttccggtaagtcgagttttatcaactcgatgctcacttcgatcatcatgcgtgccacgcccgaacaggtgcgtctgatcatggtggatcccaagcgcgtggaactgtccgcctacgcaggcatcccgcacctgctgaccccgatcatcaccgatccgaagaaggccgcacaggccctcgaatgggtggtcaaggagatggatgcacgctactccgacctcgaattcttcggattccgccacgtcaaggacttcaacgaggccgtgcgcgccggcaaggtgcatgcgcccgccggctcccagcgcaaggtggccccctatccgtacatcctcgtggtggtcgacgagatggccgaccttatgatggtggccaagaacgatgtggaaagctccatccagcgcatcacccagctggcacgagccgccggtgtgcatctggtgctcgccacccagcgtccgtccgtggacgtggtcaccggtctgatcaaggccaacattccatcccgactggcgttcgccacctcgtccgccaccgattcgcgagtcattctcgacacggtcggtgccgagaccctgattggtcagggcgatgcgctgttcctgccgatgggttccgccaagccgattcgtgtgcagggctcgtgggtgtccgaatccgagattcgcaaggccgtggagttcgtacgcacccagcgcaagccgaagtaccgcgaagacatcgaacagatggccaaggaagccgaaaagaaagacagcatggagcccgacgaggagatcggcgacgacatggacgtgctgctgcaggccgccgaactcgtggtcaccagccaattcggctccacctcgatgctgcagcgcaagctcagggtcggcttcgccaaggccggccgactcatggacctgctcgaatcgcgtggcgtggtcgggccgtccgaaggctcgaaggcccgcgaggtgcttgttcagccgcaggacctgccgcaggtgctcgccttcatccgaggcgaaaccagctcgctcgaagccagcgccccgcaacaacccgaactcggcgaataattcacccatcgacctccctctgatgagggaggtgcccgaaggggcggagggagagaagcgcggacagcatcagcacgaaacctgattcccgaataatagcagtcaatatccagccaccactcactcaaggtaggagtatgggggtaacgtgaacactatggatgagaacacaatggacaagcagtcatcgcccaaatcatcgctgttcgacggatggaacgcgccgccgaacctggtcacctactcgcgcatcgtactcgtggtgattttcctgacactcgacattctcgccggttcctggggtgaggacaacctgatcatgcgttgggtcgccgcggtactgttcatcatcgccgcgtccaccgataaaatcgacggttggatggcccgcaaatacaatcaggtcaccgaaatgggcaagctcatggatccgatcgcggacaagctgctcacttgcggcgcaatgattgtatgctccgcgttcggcgagctcggctggtgggtgaccatcctgttcctgattcgcgaaatcggcatcaccgttatgcgcttcttcgtcatggagcgtccgggcggcaaggtcatcgccgccgcatggcccggcaagctcaagaccgtattccagtgcgtgggtctgtccatgctgctgctgccgttctggtcattgggtaacggacaggccacgccgttctggatgaccgcttactacttcctgacctacgccatcatctacgtggcattggtcctgtgcctctactcgggtgccgtgtacctgtacaacacgttcgtcgccccgaagcggaagtgacggatattccaatgcaggaattgtgcgacagtctcgcggccggcatcctcaagatctgcgaggcgaacaatacgaaaatctcctgcgctgaatccctgaccggtggcctgctcgccgatgcgttcgtgcgtattcccggtgcctccaacgtgttgctgggctccgctgtcacctacgacatcaatgccaaggcctcgattctacacgtggacaaggccctattggatcgagaaggcgccgtacaccccgaagtcgcccggcagatggccatcggtgccgctcgcctatacagccagccggaatacgacgaccgaatcatcggcctttccaccaccggcgtggccggccccggtccggacggtgataagccagccggactggtgtatgtgggcctgcgcatccccgcaagcctcaccgcggaccatgccgaagtgctcaaagccgtcgaactccatcttgatggcatgcgcgaagaggttcgtcgcctcaccgtattccacgttctgcaaaacttgagtctattcacagcaagttttaaggaataaaaccgcgggaccgtcgtgttgtacatagtggaaacactgaaccgaccttggaaggggcgatggcgatggaaacgatgacccgagtgaacgaacagatggatgtggccgccaagaagccgatggctgtgcagccgggtgtcgcccgtatgcgtgaactgactccggcccagcgccgtgcggtgatgttcgcccagcagcaggtgctcaaggcgcaggctgccaagaaggccaaggatcagcgtcaagccgttcgtgaacgtatgtgggatgaggattcgccgtcgtacaagccgactgccgccgccgagtccgtggtggttgaggaggagcctcgcgaggtttcgctgcgtggtgctatcggctacgtgctgcgcgaactgcgtacgcgcgatcgccgcacgttgcgtgaggtctccgagaaggcgggcgtttcgctgggctatctttccgaagtcgaacgtgggcagaaggaagccagctccgaactgctgagctccatcgccgatgcgctcggagtctccacttcgcgcatgctgcgcatggtggccgattatctcgactcggtcgagggctgatcggttggcggtgtgaagccgcatcccgtaatctatgtctagctgtgaacccgtatcgcttgtggcgatgcgggtttttgctgtcctgcgggtggtggcacactggcgtgtatgcgtgaacgggaattctgggaattacttgaagaggtgttcggtcggacctacggtcgttcgctgtcacgtgatcaacggatgtccaaattggcgaatatgaccgtggtcgaggcgctggacgcgggggaggagccacgcgtggtctggaatgtgctctgtgaccaaatggaggttccggactccaagcgttggggccacgatcataacgcgccgcccatgcccgccgtctgacactgcgggattacggagtcgctgaatcgtgaaattggcgatttcggcgtgttgcacgccaaattcgaacaaatgttcgtgtgtgtggttatagttattcacagtgacaagaagccgcatacgtgtgcacagggtgcttgtcatccgccataagccttaccgcagtaggtcttagggaggtcagatggccgagctcgggcaagctggaaccacaatggttggtttggattgcctcacatggcatgtccgtcatacggtggaggcatccgattcgcgcacgacttcgacaaggagaagatcatggcacttgagaccaagccggccaaggacccggcagccgaggacaagcacgagctcgatcccaagcgcaaggcggcgctggacaccgcgctggcgcaggttgagaagagctttggcaaaggttccgcaatgcgactgggcgaccagcccgagcagaacgtcgaggtgattcccaccggttcgttggccctcgatatggcgctcggcatcggcggcctgcccaagggccgcatcgtggagatctacggccccgaatcatccggtaagaccacgctcgcattgcatgtggtggccaatgcccagaagaagggcggcgtggcggcctacatcgatgccgaacacgcactcgacccggcctacgcccgcaagctcggcgtggacaccgactcactcatcgtctcccagccggataacggcgagcaggccctcgaaatcgccgacatgctgattcgctccggtgcacttgacgtcatcgtcatcgactcggtcgccgccctagtgccgaaggccgaaatcgaaggcgaaatgggagacagccatgttggtttgcaggcccgactcatgagccaggcgctgcgcaagatgaccggcgcgttggctcaggccggcaccaccgccatcttcatcaaccagctgcgtgaaaagatcggcgtgttcttcggcaatcccgaaaccaccaccggcggcaaggccctgaagttctatgcctccgtgcgtctcgacattcgtcgtattcaaaccctgaagaatggcgacgaagcggtgggcaaccgcacgcgcgtcaaggtggtcaagaacaagatggccccgcctttcaagtccgccgaattcgacatgctctacggtgaaggcatttcccgtgagggctcggtaatcgacatggctcagcaggttggcgtggtcaagaagtccggttcgtggttcacctatgagggtgatcagctcggtcagggacgcgagaaggttcgtcagttccttaaggacaacccggccatcaccgaggagattgagaataaggtcaaggccgagttcggtctgatcggttccgccgaccagttcgcggaagatggcgaagccgcagcagcggccgctgtcagcgaggccgccgctgccgacgtggccaaggacagcaaggccgcagcggcgcctgctgccaaaacgacccgtgccaaggccggcgcagctaaggcctgaacatgattagtgccgaagcattcttgcggcgcaatcctgttgcgtcgcaagacatgcccattgccgagcagcgtgttcagtcgaaaccgccgggacgtttttctcgacgggggagagacgctgccgttgtcgaagatcccaatgatttggatgcttgccgcgaggctgcattgcgtttgctggacgcggccccacgtgcatccggcgcgttgcgcgaacgattgctcagcaaaggctatggcgaggcgattgtggacgaggtcatcgaacggctgattcgcgtgcaactgattgacgaccgcgcttatgccgaatcggccgtacgctattgtgccggtcgcatgatgggtcgtcgtggtgcggtcctggaacttgctcgcaaaggcgtggaccgcaaactggctgaacaggtgtgtggcgaagctgagcaaaatggcatctttgaagatgccgcatgggaattgggccgccaaatagcccgcaaaacccatggcctcgatcgtcaggtccgtcagcgtcggttttggtccgcaggcggccgcaaaggacacagccccgaaaccctccgccgagtcgccgccgaattgttggtgtagccaagaaaaaatgagacctcttataccccgggttctgtcgtgccgtgcgcgaacgcacggcacggatggccatccatctcgacctgacgttgccgccaggctctagcagcctacccgatgacacgggcgagcagcccttaccgccatctgcttggccttgctcccgatgaggcttgccatgcgacctactgttaccagaggcccggtggtctcttacaccgccgtttcacccttacccgtcgaggacgggcggtctgttctctgttgcgctatctctcaggtcaccctgggcggacgttatccgccatcgtgctctatggagcccggaagttcctcagccgatcccaatgaagatcacggccgcggccatcaagaggtctcaagcctgcaattatacataaggtgcggaaaaggcggcatcccgccctgcggtgaggccatgacgttgcccagttatcctgttttctccatagttgggcatagttgggcgattcgtgaacgacgcgccgaatatcggatggggcgtgtcgggcgtgttgtggcgtgtcgtatggagacgaatcaaatctgtaagagcttggtatgtgcgagaaagagcaagaaaacgctgcctatccattgcagtatttaccatgacgaacaaacgagccagcctgataaaccggtatcaaatcttcttataggagactgctgccaaaaccccagtatatacatcgtttcattgcagagaaaagcccgggaataaacatatattctctgggcgagtttccggccgttcacccattgttcgtctacaatgaaacatacccggtcggtgatgatgccgttcggaacacatatagcgggttacaccgcttgagttagaggaggtcaacatggaaatcgtcgttaccggacgccacacgcaggtcaagcaaaggttccgtgatgtggtcgagaccaagatgaatcgtgtgaccgctatcgccccagatgctcagcgcgcgcagatcgtgctgacccatgagggcaacccgcgtcaggccgataccgccaagcgcgtggaaatcaccgttatcgccggacgtaccgtggtgcgtgcggaggcttccagcaccgatgaattcagtgcgctggacatggcgctggataagttgacgctgcgtctgcgtcgtactcgtgaccgtcgcaaggatcaccgtcgtggttacgcaaacccggtcccggtggatctgggtgttatcgccccggagcccgagccggaggtgtcg

SEQ ID NO: 1110 - DNA, 5715 bp, Unknown
  R81_24m  MAG No. k141_1023
attatttgcaccattataattgcaaaataacgcagacaatatctctactatctgcgtcattcctttcatgtcttcttgaaatatttactccattttctttcaatctttactccaaatttacttcattttaaaaatccgttacgatattttgcgttattctacgataccttttctttgaagaaaaatgtctgcaaaccttgattttaagcgaacttttcaatatttccaagcactttattctgttgtgagaatttcttctcaattatttcatcaaaagaccaagtgattgagcaggtatctacgagattaaaaaaatcgttggaatgattggatggtctcaccatttgagataagtggagcggacaacgggagtcgaacccgcctctaaagcttgggaagctttcattctaccgatgaactatgtccgcatgccttacggctgctgcacctcacgtgacgagcatgctcagccaaacgaggcacgaatagttattctagcacgtcacctgccgacgcgcgtggagtaggtgggcggagcgatcggcgtgccgttcatttcgttggccatctgcatgagacgcgctatgcgctcatcggtcggcggatgtgtggagaacaagcgcgagaaaccgaccgcggagaacgggttggcgatcatcattgcggagacggactgggtgccggcggttttgcgcatcggcgtggtctgcgcgccgtaggaaatcttgttcagcgcggaagccagggcctcgggatcgccggtgagcaggctgccgtcttcatcggcgtcgtattcgcgggtgcgggagatggccatctggatcaaagacgcggcaatcggcgcgagaatcacgctcagcaatgcgccgatcaggccgaggccaccggaactatcgcggtcgtctcgcgagccgccaccgaaatacatcagcgaatagcccagataggagatgacggtggccatggcagaggcgatggcggaggtcagaatgtcgcggttgtacacgtgcatcagttcatgacccagcacgccgcgcaactcgcgggcgttcagaatctgcaggatgccctgcgtgcagcagacagccgcgtgccgttcgttgcggccggtggcgaaggcgttcggactcatggtgggcgcgatgtagatgcgaggcatcggcttgccggccttggcactcagctcgcgcacgatttggtagatttcgggggcttcctgctcgctgacctccctggctcccatggatgcgatggcgagtttgtcggagaaccagtatgagccgaacgtggtggccaacccgataatgacgtagatgcccagcgtctgctgcctgccgcccgtggcccaccatatcagcatgatgatggcccacatcaaggcgaacagcagcgtagtcttcaggccgttgaaatggccgtgcacccgtactttggcatccatgaggctcacactaaaatcactgcctgaatattggctggatgtgcgccgaggggtgaatcggatgggggttggcggtgcttacggtgcggttggcggggatcggaatagcctgtttacatgagattgacgatgcttgacagtgcggttgcttggcctgttttaccgctttaccgctttaccgattggtctgatcgggacgctttgcttgtttggcctgctttggctgcttggatcgtttggcccatcggcctgctcgactggcatgacactggcttttatataaataagaacgctggcgtataaccggcgttcttatttatcgatgtatcaatcgcgccgattgctgctggtgcagttgccggtgcgatgagctgatagtcaatcaggccagagcgagctcacgcatctggtcgggctcgatgaccttcttgtgctcgcggccctccttggcgccttcggcgcgctcgaaggcgtcgaccttcttccagccagcgaagtcaatcggcttgacgccgcggctttccagcagtcggtcgatggattcggggtcacgatcctcggccacgcgaccaccttcggcggccttggccagatcctcaagcatgttggtcacgatggcaagtgcgtcggacttggtggagccgatcaggcccaccgggccgcgcttggcccagccagtggcgtacagacggtcgcgcacttcgccgccgtccgcttcggtggtgatgcggccatcgccattggcgttggccaggtgagcgccgtgctcgtcgtaaataatgccgggagcctcggccggcttgtagccgatggcgtggtagacggcctcaaccgggtagtcggtgaactcgccggtgcggctcatcttgccgtcggcactggtttcggtgcgttccacgcggatggccttgaccttgccgtcctcgccgaggatttccgtgggtgcggagttgaagtgcacgtaatacttgcggtcggccgggttgccttcgaagtcgacgtcgccgtcatcttccatgtcctcggccatctcgcggatggcgaacagttcctcgaccatctggcgggtgagcttgtccttgccggccacctcgatggtctcgtcgtccaaatcgaagtcgtcctcattgatgatgagctgcacgccgggcagcttctccatctcgcgcagttcctgcacgctgaacttggcctgggccacgccacgacggatgaacaggtgcagcaccttggccttgttgcggccgatgccctcgtacacgttgtcgggaatgtcggttctggccttgaggtcgtcggcgtcgcgcatgagctcgcgggccacatccatggccacgttgccgccgccgatcacggcgacgttctcggccgtaagcggccattcgcgggcaccggtggggtaaccgtcataccattcgacgaacttggcggcaccgtacacaccttcaaggtcggcaccgggcaggttcagcggcttgtccttgaccgcgccggtggcgaacagcacggcgtcgtaacgggccagcaggtcgtcaagagtcacgtccttgccgaattccacgtcgcaatagaggtggatgttcgggttgtcgagcgtcttctcaagcgcggaggcgatgaacttgatggacgggtggtccggggccacgccgtaacgcaccagaccgaccggtaccggcagcttctcgaacaggtcgatgcgggccttggtgccgaggccaagttcttcgcccagtttcttgagctggcgcaggaagatgtcggaggaatagacgccggccgggccagcgccgattacagcaatacgaagttcagtgttcacagattcagtcacgcgttacaggttatcgcaaagccttccgttgcaacaggggtgagtggtgggaatcctgtgcctaataccctctgccagcctcacgccagcggggcaaaaccacgagtcgatcaagaaattgccccactcacagaccgccagcggagcaaaatcgcgagtaacccgaaaaattgctccgcttacagcccatcagcggagcgaaactgcgactaacccgccaaggcaccccgctgaacacccaccagcgcagcaaaaccactattagaccgtaaaatcaccccactcgcagaccacgagtggagcaaaacccctattagcccacagaatcgccccgcttacagaccgtcagcggggcaaaaccgcgactcagtcgaggagataccctgcctagtcgcggtcgatgagggcagtgagggcccagaggatgctgaccacgtcgatggcctcttggaggaaagcgccgacgatcactggaatgaggttgaaggcggcggcaatcatgccgatggtggcgagtacgagaccagcgatcacggcctgcagcatcacgcgcttggtacggcgtgcaatggcgatagcgcgcggcacagcggcaatatcgtcattcataatgaccacttgggcgctttcggaagcagcagtggaagtgccgtcggtcatggccacgccgatatcggcgacggcaagtaccggggcatcgttcacgccgtcgccgaccatcatcgtgaccggcttgcggattgcggcggcgcggctgcatcgagaacgcgacggttgagaaccatcggaccggatgccatctacggcatcggacacagggctggtggcgtgattcgcgcgcccggccggcgcggcgcttgcctccgtggcagccttgacggcggcaaccttgtcttcggggaacagctcggcgtggacctcgtcgatgccgacttcgtccgcgatgatttcggccgaggcgtgcttatcgccggtaagcatggcaagcttggtaacacccagttcgtgcagattggcgagcgcggttttggtgttggcgcgaggtacatctcgcagcacgatgcgggcgatcagttgcccgtcaacggacacgtaggaggccatttcgtccggctgtagcataccgaatcgcgtacgcagcgtttccttttccttagtgttcccggcaatcgtacggccagatcctgcctcagtatccccgcccagaggggactgtccgtgaagcgggctgaggaggtcggccgcctcctgccgtgggccatccgcccggcttacacccgctacctcggcagtcaagaacccatcctccccggctgcagcgaacgacagtcgcccgacgcggacggcatggccgttcacctcgccggacacgcccttgccggagtcctcattaatattcttgacgaccggatattcgcggccgtggccgggccagctggcctctggttcggggcagagacgctggccgtccgcgaaacgctgacgcaagcgggccatcgcgtcggcaccggctttggcgatgcccttcgacaggatgtgtacggaatagctctctacaacgccggccatcatcagcacatggtcctcattaagacgggtctcagctccaggcagcatctcgacgcgcacgacctgcggctgcttgacggtaagcgtaccggttttgtcgaagaacacctgcgtgacgcggccaaggttttcgagcacatcctgcgccttgatgagcacaccggcggcggcgagacggccagtaccggcgatgtatgccacgggcgcggcgataagcagtggacagggcgtagccagcactaacacctgggcgaaccgcgtcggtatgccggacaccgcccaggcgacgcccgctattaccagcgacagcacagtgaacggaacggccaatcggtcggcggttttcaccacggctggacgggactcctgtgcggaagcgacgagttcgaggatgcgctggtactgggaatcggcggccacctgggtggcgcgcatggtcaaggcagtggaaccgttcactgcgccagacatcactcgggcaccggcgaacacctcgcgcggcaccggctcgccattgatgttgctcagatcgagcgtggccgagccggaaagcagttcgccgtcgaccggcacggtttcgcccggcaacaccatgagcacatcgccgagcttcacctgctcgaccggcaccgtgtcgaagcggtacgtggcggcctcagccgaccagctcccctcagtctcgctccgcgagtcagctcccctcgacggcggtacttggttcccctctccaaggggagctgtcggcgaagtcgactgaggggaggacgtcgccggaaccgagcctacacgccggaagccatcggacgaatcgtccttatcagcggcagccccacaccccacgccaggcaagttgacgacgtgcgcagtttgc

SEQ ID NO: 1111 - DNA, 4824 bp, Unknown
  R81_24m  MAG No. k141_1165
gcgcatcacaaaccacacgatgccgaccagtcccacaaccatcggcccccacgtgaccggtgccgcaaatccataggtctccgaattggtgaagccgaacatcagcccgccaaagccaatcaccgacaggctcaccgagaagaagtccgcgcgggcagacgggtcatgcgagccgaaattatgtagtccgaacatggccgccaccagcgagaccacgccaatcacggtcatggtcaggaagatggaacgccagccattggcgtcggtctgccagccgcccaaggtggggccgattgccggagccacgctcatggccatgcccacggtgcccatagcaaagccgcgtcgggacagcgggtagatggagaacaccgtgatctgcagcaccggccacatcacgcccgtgccggccgcctccagcacgcggccgagcagcacccatacgaagtttggccccaaccatgccagcagggagccgaccgtgaacaccgccatcgagcagatcacgatctgtcgggtggagaaacgacgggtcaggaacgcggtcagcggcaccataacgcccatgaccagctggaacacggaggtcagccactggcccgtggttacggagatgtggaattcggaaacgataatcggcagcgcggaactcagctgcagctgcgtgaagttgcccacgaaggtaataaaggtcaatatcgcgatggagatgaacgccgcccggctgagtttgccgtctacatatgattcctcgcggctcagcacccgctgcagttcgccgcgacgattcttgattccctgagctccgttcacgcactcccccacttctgttgctcggcctgttgccttggcggtgtcggtggcgtatctgttcagtgatatatgcgcctcgcatatcaatgcgtattcgatgtattcggcgaccgtcgtcttcgcgtgcttggccgagcagcctctcaaagcaccccaatacgctatacccaggggtggtccagtcggttcggaatatgtgcagaagcgggggacgaacacgctttgtgcacaagaccggggcataataggcggttggttattgcaagaggttacaagtcaataagaccagtttggaagttagtatgagcgttcatagggcaagtcacgcaacaagtattccacgcagaaggcaccgcatctggccgtgagtggtgttgattctggcgctacttgtggtgctgctaggcgtgagcggattcttcggtttgaagctgtattccgaagccaagcaggtaaaggcgcatgaggaacaggcgatgcagctgctgggcggtgtgaccgacctcagtaacctcgacaacctcgatacggtgagccagcagatcagccaggcaaagaccgagaccgcggctgcgaacgagattgcgcacggcacgctgtggaacatcgcctcgaaggcgccggtgtacggcggtgacatcaccacagtgcagggtatgacttcggtgggggattcgctggtcagtgattcggtgccgcagttcatggacgtgctttccacgctgaagagcgcacagctcagctcaggcgacggtcagctgaatctgcagccgattctggaagcccagaagaatattgccaccgcgaaccagtcactgcagcagcaggtgcaggagtatcagcagctgccgaaggcccatatcggcatggtgaagaacgcctatgccgccggcaatacgcagctgaccaagatggcggacaaggtcaatcagctatccggcacgttccagattctgccggacttcctcggttccgatcagccgcgcacgtatgcgttgatggctatgaccacttcggaggaacgttcgtccggcggtctgatcggttccgtaggtgtggtaactactgacaacggcaaaatcaatattggcgatttccgttcgaatggtgaatatattccatatggtgctggtgatcctacgggagacgagcagcgcatcttccggcagtggggaccattgaacatgtcgttcgatatacgagatttggccgtataccctgatacttcacgcagtgccgaaggtatgcgcgcgatttggcagcgcacgccgtgggggagcaatactcagctggacggcgtgctcatggttgatcctgtatttttgcaggaacttacgaaaatcagtggtaatgtcactattcctgatggaacggtgcttacgggagataacactgctgagtttttgttgaacaaggtgtatgtcgattacccagtctccatgcaggacgccctatttgctcaagtcgcagaacaaacagtcggtagtatgttcagcaatgttgatttggctaaactcaccaaggtcgcacagcttatgggcagcatggccgaaggccgtcacttctccatgtacgcatttgatgagactgctgaaaaaaccattagtgatgcaggctttaccgcgcagacgccaagcagcgaggaaaacccgcaggtgggagtgtatgtgactgagcagaatccatcaaagatgggatggtatattcatcgtacttcgaaggtgactcgttccacctgtggtaatgatggttctcagtcctatcatgtggaatataagatgacaaatacactggagagcaggcagattggtgctctaacgagctatatccttggctccggcggacaaggtgtggaaaaaactctgatttatgcgcctgccggcggctccatctcaaatcttaagaccagtggtggttcagtgacggagagccgtcaagaaacattgaatggtaaaaccgtgtatgcgagcaatgccacgatagctcctggagagtccgtcacctattccttcgacgtgaccacgtccaccaaggctgtctccgacctcactatcgaccaaactccaatggctggattgattccggtgttaccaccgacactgctgcctgctccatcaacaagcagtaaaagttccctctgacgaggacgtcagccacaggctctgagggagagacaaaagaagggcgtcagcaagaagctgacgccctctcaacatttcaacattcccaaagaaaactcagtacgatccagtccccttaaacactgccaccacagtcttcaacaggatcacgatgtcccccgtgatagaccagtcctgaatatacgacacatccgcatactccgactgttcctgagtcaaatcgctgcgtccggaaatctgccacggtccagtaataccaggcttaaccagcagtctcgtggaatacagcatgtcatatcgcgcgacttcttcaggcagcggcgggcgaggcccaaccaagctcatatcgcccttgaacacgttaaagaactgcgggaactcatccagtgatgttttacgaataaagtgaccgatcttagtcacgcgtggatcgtccttgagcttgaagataaaacgatcctcaatgccgcgttccttagccagtttcgccttgatctcgtcggcatcagtgcgcatggaacggaacttgtacatggtaaacggcttgccgtaaatgccgatgcgcgtctgcgaatagaacacagggccgccgtcttcccgcttgaccttgtatgccacccatagcatgatgggcgagctcaagataatggcgataccggaaagcacgatatcgcacacacgcttgaggatgcgggtaacggttgagtactgcgtcagtcgtgcagtgactactggcatcgtcggatcgttgcggaaatgcaggtcagcgccgctcaaatcagccacagaggtagtgagggccaattcaatgcccatggattccacggccagggacaatgtacgcatggtctcagaatcacgggtaagtacatcagctaccaatacggtacgtgccttcatacgcttcgcggtttgcggcaaatgcgagttgagtggcaacaccttcagtcgtgcctcagcatcgttggcaggagtgaagggcaccgacaccaaatgctgcgccgaatccgggtcatcctcgttcttgactgaagccactgggcacaccgcaattggcgcgtagccgaggccacggcactggcgcaattgttcgaccgtccggtggataccttccggagacccaataaccacagtcgggtagttgaattcgccattcatgcggttgcggtgcagcgcgcggcgcataatccaacgctcgataataaccaacaccagtgaaaccagcggaatgaacacattcaacgaccggggaagattgaggtggaacaggtaccccaacgtgcacagcataatgaaatcgatgaacgcagcgttcaacagcttggcgtacagggcatagccctcacccatggtgtgccgttcataggagcgtgcggaatacagactgatgagccacgatacgcaggtcaacagcaggaagctaaaaacgccgtattcgccggggccaatgctctgcacataggtataagcgaaaggtcggagcaggaacacgatgtacgtggccacaatggtcatcagcagatcaagcacgaccaaggtcgtgttatagagatatcgccacttcggcacagaatggcccatcaatggacgtatgttcgtggtgtcgttatgtgtggagctgccgtccggtgtagaggagaagtaggtgccgtcaaagaatgtcggcgcaatgtcacattcggcaacgggggagaacgaagccgaggcccggctcccgctcacccgtactttgggcattgccatggtcgcggtgcttgttgcctgcgactctgctgctgtgcctctgtccttcggcatgatactgaattcttcctccatcgttccccaaaaaccgcaaggaacattcattcctttttcttactctcgccca

SEQ ID NO: 1112 - DNA, 2811 bp, Unknown
  R81_24m  MAG No. k141_1512
accagaacgtgctcaccgcctccggcgaaaaactccaatcggcctcgtcctccggcaacgggatcacgaaggacgccgagaacggcgatgccgatggcggcaccccccgaacggccggcagccggaccgacgttcgggacgagcccgatacggcgacgggcgtgaccgccgatgatgcttcctccacacgcagaccgcgtgaaatcgtgttcagccgggcgaacggcaggacgtactcggtcgatgagctgcgcaagtcccgcttccgcgcttcgaagcacaccgccatgatcgtcaccttggtgtccggcctgctcgccgtggcggtgacggccggcgtcgtgatgctggccacgcagggacgcggcacggacaatctcgtatcccccaccacgaccacgcccgcgcgcaacgacaccggcacgcgaacgggcacccccgatcagaacaacgctctgccccagacgggcaccggcgatgattcgaagggaaccagcaaggattcgaaaaccgacgccccctccaccgacctcgacgccaacggcacctcgggttcgaccggcgccggcgcctcggattcgaaaaccgacggcaccgccaacggttcgaacggcaccggcacctcaaagaatccgaccaccgaagacccgaccagccaaggcgtcggcggcagccagaccggttcgaacggcaccggcaccggctcgacgcaaaaagatccgtcggaatcgacttcaaccagcaccggcaccagcggcaccagcggatcgccggccaccggcccagacgcgggcctgtctcgttaagtgtgtaactggcgttttcattgttgtgttccctcgcttggccagcggtcggcgaaggtgatggcaaaggcgttgagcgcgggcttccggcgcgcgctccatcgtatccgtcccttgccggtggggtccagcgagcggacggtcaggtacatgcacttgagcgcggcctgctcgtcggggaagtggccgcgggcgcggatggagcgcttgaatctcgcgttgagcgattcgatggcgttggtcgtgcagatcacgcgccggatctccacgtcatagtccaggaacggtatgaaccgttcccacgcgtccatccacagcctgcggatcgcgggatatctcgcctcccacttgtccagcatcgcgtcgcgggccgccgccgcggcggcgggcgacgcccagatgcccagcacgtcgcggtcgccctccagatccacgccaacggccacgtagaacgcgcggttggcgacctgcccgtcgcgcaccttgacgacggtcgcgtcgatgaacacggccgcgtacacacgatccaggggacgcgagcaccattcgtccttctcggccacgacccgctcggtgatgcgactgacggtctccctggacacgtccgccccgtagatctcctggaagtgggcgctgatctcgccggtggtcaggcccctggcatacagggacagcaccacctcgcccaccccgggcagccgccgctgccgtttcctgacgacgaccggctcgaacgagccatcgcggtctcgcggcaccccgatcccgaccagacctaccgaatcggtgaccacggtcttggcggtggtgccgttgcgcgtgttcgcggccctgccgtccttggatttcttgtgcttggcgcggcccaggtgctcggtcatctcctcgtccagggccgtctccagcacgcttttggtgaactgtttgagcagtccgtcgggccctgtcaggtccagtcctttttccttggccatgcgcacgaatgtgagcgccgcctcccgctcggcgttgcgtttttccgcgtccggcttcttcgtcggtgtcatgtttcccattgtcccagcagacatcgtccaccagcctttccgaccggccacacgaccggccagttaaggccagttacacacttcgagagacagtcccacgtataccggttctttgtttatgtaagggaatgattgatggttcggtttgcctgtttgtataatgcgcttatttatcttggtgccggatgtttttcggtctactatatggtggcctatcatgatgtgggcctgtcggtgctgctgatctccatcgtcaatgtggtgttcgacgtcagcgaatcggccagcgagctgcccacgtccgtgctgttcgaccggtggtcccgggaacggacgctgatcatcggcgtgttgtgccgcgtcgcgggattcatattgatgctgttctggtccgcgaacttcgccgtgctgtgcctggccaacgtgctggccggcatcggggccgcggtcgaaagcggtgcggcgtcctcgctgtacatcgaatacgcccgcaagcacgatccctcgctgggtatgaagaccttggtgtcaagactgtcggcgatgatcggtgcgtgcacgatatgcggcggtgcggtcggtgccgtgctgttcctgcttgactcccagctgatctggctgggcgcgacggtgttctacgtattggcgatcatcccgcttctcggtctgatgagggccgggtcgcgcaccaaggccgcagcgacggatgggagcgggacgacggaacggcaggccgaggcgtccgtcgaatccgatggatccgccgagccgggcgagtccgggacctcgctgacggtgttggatcatgtcaggcagaccgtggcggccgcggccgtgctgctgcggaagccggagatatggaatatggtggtgttcaatctgggtacgttgtcggtgctgacgttctggcagctgctgctgatgggccaccagaccggggtctggtggcagttcgccgg

SEQ ID NO: 1113 - DNA, 4665 bp, Unknown
  R81_24m  MAG No. k141_1580
acggccttcgcagtgctggcttgagatgccttggcggcatcgtgtacggcctgtgcttcggcgtcgaccttcttctgagcggcttcgacggcggcctgagcctcggcaagcgcggccttggcagcttccaaatcggactcggccttgaccttggcttcctcggcggcgcgttcggcggcggcctgctgatcttccatggccttggccgcggcggcttcgcgggccttgttggcttcgcgttcctcgacggcggccttgagtgagcgcagtcgaatcttggcggcacccaggttggagacctcgtcaatcttcagcagcgtgtacacgtccgccttgtctgccaggatttcggccacctgatcggtggtgatggcgtcaaggccacagccgaaggaattgagctgcacaagttcgaggcccgggtaggaggccacgaagtgtgcggccgcgtacagacgggagtggtaggcccactggttggtgacgcgcaacggcatcttggtgaccgtgcggtcgcctacatggcggaatctggcggcgttcttggaacgcgggtcggcttcgccttccgagcggaattcggtgaggttgagcttctcccccggatgcagttcgcagatggaatcctcggagagtaccaccatgcccagcgagcagatggtttcggggatgccgtggttgatttcggggtcgatgtggtagggacggccggcgagcacgatgcctcggcagttgtgctctttcatataggcgagcgcggtcaaaccttcctgctgcacgtcatgcttgaagaccttgtcttcggcataggcggccttgaccgcggtttcggcctcttcgcgggtcacgttggcccacgcaaactcttcgacgatgcggtcaaccatgagctcatggttggcgaggttgaagtacgggtgcatgtagcgcacgccgtcttcacgcagctcaggcacgttggcgccgacgacgagcggatagttggccacaaccgggcagttgtaatgattgtccgtgttgggcacgaggttctcctcgtagctcacgcacgggtagaagatggtcttgatgcccttgttgatcagccacttgatatggccgtgcaccagcttggccgggtagcagatgttttcggaggcgatggattcgatgccggtctcgaacagctcgtgggagctgcggccggagatcatcaccttgaagcccagcgaagtgagcagcgtgaaccagaacgggtagttctcgtacatattgagggcgcgcggaatgccgatctcgccacgagtggccttcttgtcggtcaaacggcggtaggcgaagcaacgcttgtacttgtagtcgtacaggttcggacggtcggaacgcttcttcttggcgtcgccgccgcgttcgcagcggttgccggtcacgaagcgcgagccgtcggagaatgtggtgatggtgagcttgcagtggttctggcacagcttgcacacgtcacgctcggcggtcatgctcatgttgtcgagcgcttcgccggtcagaatggagctggcggtgtgagtcacaccgtccacgacaacgacatgggcttcgggcttggccggctcggtcttcttgaaggccgcggccttgggctcggacttgggtgcgggctcggcctcggactgttcctcggacccatcggccttaaccaccacgtccaagtggtcggcctcatcctgatagtgcatgcgggcggtcagggcggcgccgaacgcgcccatgaggccggcgatgttcgggcgggtgacctgacgttcggtgagcagctcgaaggcgcgcagcacggcgtcgttgaggaacgtaccgccctggaccaccacagtgtcgccgagttcgccggaatcacgcaacttgatgaccttgtacagggcgttgcgcaccacggagtagcacaggccggcagcgatgtcctcgatggaggcgccttccttctgcgcctgcttgaccgaggagttcatgaacacggtgcaacgcgaaccgaggtccaccggatgggtggaagccagagccttttgcgtgaattcctgaatcgtcaggcccatggacatggcgaaggtctgcaggaacgagccgcagccggacgagcaggcttcgttgacggcgatcgagtcgatgacgccgtcagtgatggccagatatttcatatcctggccgccgatgtcgatgacggcggtgacgccggggctgaccatttcggcaccacgatagtgggccatggtctccaccacgccctcgtccaggtgcaggccggtggtgatgaggccttcgccgtaaccggtggcgcaggagcgtgcgatccatgcgccttcgggcagctcggattggatcttcttgacgatgttgatggcggcggtcagcgggctgccttcgttgttggcgtagctggaccagacgatttcacggtcgtcattgacgagcgtggccttgatggtggtggaaccggcgtcgatgcccaggaagtgcgggccatgcgcgccttcgagggtgccgatgtggatgtgttccttgtggtggcgcttgttgaagtcctcgcggtcggcctcggtggggaacagtggcggcatggtgggcgtgttggagggcaggttcttcagctcgtccagacgcttgaggatctcatcgcaggtgtgggcctcgaaatggtggccctgatcgtcggaatccatgtcggcctgcaatgccgaaccgtaggccacatacaggtgggcgtcggtcggcacgatgaactcgtcgaccttgccttcaagggcacgctggaaggcggcgcgcagttcggacatgaagaacagcgggccaccgaggaagatgacggtaccgtggatcgggcggccagcagccaggccggcaatggtctgcgtggccactgcggtgaagatggaggcggcgagatcaggcttggccgcgccgtcgttgatcagcggctgcagatcggttttggcgaacacgccgcaacgcgaggcgatcggatacaggttctcgtagctcttggccatctcgttgaggcctgcggcgtcggtgtcaagcagcgtggacatctggtcgatgaacgcgccggtgccgcctgcgcacgaaccattcatacgctgttcgggcgtgggcttcaggtaggtgatcttggcgtcctcgccgccgagctcgatgatgacgtcggcctgcgggtattccttgtcgatcgcctcggtttcggcgatgacctcctggatgaagggcacatgcaggttatcggcgagcgccaagccgccggaaccggtgatggacaggcgaatcggctcgtcgcctcgacctagttccacgagctctttatgaatgtccacgagcagaccggcaacggtggcacgcacattggcatggtgacgtcggtaatcggaaaatagggtgtctttcagggaatcggactgatcaagcaccacggccttgacggtggtggagccgatatccaatcccacacgcagcggcttcagttgtgaggcgggcgttgcgctcgcgtcagtgacgatgtcaaccatgtgttcctcttaattccgacttccgggagtgcacgccacgaggcatcagaaaccgtttcgggacggctggcagataccctgcggacggcttcgaccggctacttcttctggaatattagtccgattacctgcccaacatggcacgaggcgaagtgatttcgctcacgggaaggcctttcccccaacagttccaacgatattgctgagtgcggcattccagaactgctactacgaggcctgttggccttcgccggcttcgcggtctttcaaatagatttcggggatatctcgttcttgatcgtggagcttggcccagatgaccggttcgccggcttccagagacttgggcacatcgaggatgcgctggtttctggagccgcggaattgcagcagcgagtccttctggtctttgaggtagcggccgtcgacgaggatgtcgataagatgcagcaattcaagcttgtctggtgtttctccgaggcgcatgagctcttcccatgtgtagccggtccacgaccagatatctttggtatgaccgaattcctggcggatacgttgtgcgagcggcaccagcacgggagtgttgaggaatggctcgccgccaaggaacgtaatgccttgcacccatggcgctttcaggtcttcgatgatcttgtcttcaagtttttgcgtgtattcgtggcctgcttggaagtcccagatggaggcgttgaagcagtcgacgcagtggaaggggcacccggagacgtaaagggagttgcgcacgccttctccgtcggtgacaatgaaggttttgtagtcggcgatcatccgcttggacatgcgctggccatcccattgaccggctttcggatcgttggcaagaccgctggagggtacggaagggccacgcccggtctcgccggccgcaaagtcatggcgcttgggttcgggcttggtcgtatgcaactccggcatgattccctccttgcggaaagcatcagctcccctctttgagggggagctgtcgtcgtaggcgactgaggggagcttcggaatagctcctcggactcccctcagtcagctttgcagacagctaccctcaaagaggggcgcctactcacgaaaaaccctacatggcctcttcgaaccactc

SEQ ID NO: 1114 - DNA, 19660 bp, Unknown
  R81_24m  MAG No. k141_1604
gatgccggtgccgtgtctcatgggaatgccgaacgtctcgtgcatgctctgcgggcttctctcccatgcctgccggtagaggcgctcgagtcgttcgtcggtcatcgcgttggccgcgagccacgcgtcgctttcgggacgttccgtgtgctggtggcaccaccagcagatcgccttcagccgtctgaccagccgcagtccgcggtggcggcgcggcatgtcgcgcaggcgtgcgttccatgattcgacgaggttgttggtggacggcactgggccggctgccgcgagcccctcgtcgaggaacatgaacggttggccctcgcggatgcgcctgcggatcatgcgccgcgccttgacgagcctttggtgcatgtcgttcacgctgccgcaatcaacgacatggtttgcgtgtacctgacgatgtacaagtggtcggcttcgataacgtgccggaagccgagtactcggcgccggcgctgaccaccattgatccacatatcgacgattatgccaagcatgccgttgacatgcttatcgaccgcatcgaaggatactcaggcccggcccgtacgtacaccaccgatttcacattggtggaacgtgcctcaactcgacttgcccactagcatccaacaagttcgcatcggcttcgtgaggagtgtgtgtctactcgaacaatgcggcgtcagtcgctgggtagccaagttggaacgcggtgtaggcgtgcttggcggccagtgcggcgaggatgagcagcgtatcgctctcggtggaagatttcgattcggtcacggccttgatctgcgcgcgggcgcagtccatttcgatggcggcggcggtcggtacggtctggccgcttgccttgtcggcgatggtggtggggttggccagtagttggtcgatggcatagaccttttggcgggggtcgctctggccggaagaactggactgtgcgccggaatcatcaaaattgccgttcgccagcgacaccagctgctgcccggcggtcttatgcatatcgctcaacgccaatgtagccccagcggtctgtcctcgtgcggccaagacctcgatagcgaatccggcgcgatcctcggccacggccatcgcatccaataccggtcggtcaacgttggcggacgtgacgccatcaagacgcgccggcgtcacctcaggcgcggactgcccgaatttatcggccagaaaagccagccattgcttggtctgcgcgtcacgtaacgttccctcggcaaaacgacccgaacaatacccggcaacgtcaatccaagccaggggagcagccaggccggtggcatactgctccaataacggcgtgccttcagccggatgggtggcgtagtccgccaacgtcatcgctttctcgcaagggctcatctgagcttccgcctcggcccgtccagccagtcgcggcatcgaacacgccgaaagcgaacacagcatcgcgctcgcgcatagtgcggatgccaagcgccgggtaaaccgtcctgaagagaagcgtgtctgcatggaaacctacactaatagctaactgtgaccactcataggccatgcgccacataacttcataggaggtacggatcgatggaactggacctgacaggaatacacaagctcgccgtcgagcaaggaatcgaccccggaaccctggatgatgcgctggcagaggccctgcgcctcgcctacctcaagaccccgcacgccgccaggcacgcgcgtgtggagcttgacgaacgttccggcaacttcaccgtctgggccgccgacgaaatcccggtcgagcccaccgaggacgacccgcaccccgctcccaagctgggcgaggaatacgacgacaccccgcgtgacttcggccgtctcgccgccgccactgcacgccaggtcatcacccagctgttccgccgcgccgaagatgagaaggtattcggcgcgttctccggtcagaagggcaagctcatcaccggcatcatccaacaggatgcttccgacccctccaacgtgcatgtcgcgatgggcgatgtcgaagccattctgcctcgccgtgagcaggtgcccggcgaacgttaccgccacggcgaacgcatccgcgtgtacgtggtgaacgtggcccgtggcatcaagggcccggaaatcgtggtgtcccgctcccacccggagctggtccgcaagctgttcgagcgtgaagtgccggaactggtctccggtgccgtgtccatcatggccatcgctcgtgaggccggcgcccgcaccaagatcgcggtcaaggccaacaccgatggcgtgaacccgaagggtgcgctgatcggccccggcggcgctcgcgtgcgtgccgttatggagaaccttggcccggagaagatcgacatcgtcgactactccgacgatccggccaagttcgtggcagccgcgctgtccccggctgtggccaccggcgtacaggtgatcagcgagaagaacaagaccgccatcgccttcatccacgacgaccagctatccctggccatcggcaaggaaggccagaacgcacgactggcagccaagctgaccggctggaagatcggcatcgaatccgccgaggcccatgccaagaaggtcgccgccgaaaaggccgcccaggctgcggccgaggctgctgctccggaagccgaataggccgccgggctcgaaggcgaatgatcttcagggcgcattatttcctgatacgagccgcgtcagcaatggcgcggctcgctgcgtctacgctatccagcgctatgagtatgcttgattggcgtatgtgggctggtgcagtgtgcgcgaaatcgcccacaccagagacgaggtaacacgatcatggtcgcacgatgagacagggtaggcttgccgtcatcaccaactgaccacgcccatgcacgcgcgtggtcacagaataggagtaattagtggcgaaaccacgcgtatacgaactggctaaggttttgaatgtcgatagcaaaaccgtgcttgagaagcttaaggacatgggagaattcgtcaagtccgcttcttctacgattgaaccgccggtagcccggcgtctgaaggcagagttcgccaaggacaacgccaagggcgattccaagcccgcatcttccgtacaaaagcctgctgcccagcccgtgcagcagcgccgcccggccgcaccttcggccccggcttccacttcatcttccgcaccgactccggccgctcccgcacgtcaggcatcgcccgcctcggcacatcagcaggctccgactccgggcgcaccgacaccgcgtccgcagggcggcgcacgccccggcatgccgacccccggccgccacggtcagcacgacaaccgtgagaatggtcgcgataatcgcgaaggccgcgagaacggtcgtcagagtcgcccgaacgatcgccgtaacaacgatcgtcgtaacaaccagggccgtccgaacaatggccagccggggcagcatcagaacaaccgcgacaatgcttcggctccgcgcccgcacgctcagggcggcgccggtgccaatggcggcaatgccgcttcaaacgcgattccgcgcccgcacgctcagggcccgcgcccgggcaacaacccgttctcccgcaagcagggtatgcacaccccgacgccgggtgatattccgcgtccgcatccgatggctcgtccgactgctgatagcggtcgtggcggtcgtccgggccgtcccggccaaggccaggggcagggccgcggcttccgtggcggtcgtccgggccaaggtggtcagggcggtcctcgtcccggccagtggggccacaaccgtccgggtcagggcggcggctcccagggtgccggtcagggcggcgcacgcggcggcttccgtgggggccaaggcggcggcaataacttccagggcggcggcgcaccgagcaacggtcccgcacgtggcggcggtcgcggcggtcgcggcggtgccgcaggtgcattcggacgtcagggcggtaagtcctcgaaggcccgtaagaaccgcctggcaaagcgccatgagtatgaggagctgaaggcaccgaccatcggcggcgttcgcatccccaacggcaacggtcagaccatccgtctgcgtcagggcgcttccctggccgatctggcggagaagatcaacgtcaaccaggccgcgctggtcaccgtgctcttccacctgggtcagatggctaccgccacccagtccttggatgaggagaccttccagattctgggcgaagagatcggctggaacatccagctcgtctccgcagaagaggaagacaaggaactgctccagcagttcgacatcaaccttgacgaggaagaactgcaggatgacgaggatctcaagcctcgcccgccggtcgtcaccgtcatgggccacgtcgaccacggtaagacacgactgctggataccatccgcaagaccaacgtcatcgcacgtgaggccggcggcattacccagcgcatcggtgcctaccaggtcaccgtgaaccttgaaggcgaaccgcgcaagatcaccttcctcgatacccctggccacgaggcgttcaccgccatgcgtgcccgtggtgccgagctcaccgacgtcgcgatcctcgtggtcgccgccgacgatggtgtgatgccccagaccgttgaggccatcaaccacgctcaggccgccaaggtgccgatcgtcgtggccgtcaacaagatcgatgtgcccggtgccaacccggagaaggtccgcggccagctcaccgagttcggcctggtccctgaagagtatggtggcgacaccatgttcgtcgacatctccgccaagcagaacctgcacgtcgacaagctgctcgaagccgtgctgctcacggctgacgctgagctggacctccgcgccaaccccgacatggacgcccgtggtgccaccgtcgaagcccgactcgacaagggtcgtggtgccgtggccaccgtgctggttcagcagggtacgctccacgtgggcgatgccatcgtggccggcacttcgtacggccgcgtgcgtgccatgctcgacgagaacggtcagccgatggaagcggccggtccgtccacacctgttcaggtgctgggcttgacctccgtgccgaccgccggtgacctcttcctggtcgcctccgatgatcgtgccgctcgccagatcgccgagaagcgtcaggccaccgagcgtgccgcccagctggccaagcgtcgcaaggtcgtctccctcgaggacttcaagaagaagttcgccgagtccgagatcgacatgctcaatattgtcatcaagggcgattcgtccggttcggtcgaggcgctcgaggattccttgatgaagatcgaggtatccgacgaggtcggcatccaggtcatccaccgcggcgtcggtgcgatcacccagaatgatgtcaacctggccacggtcgacaaggccgtcatcatcggcttcaacgtacgcccgaaccgtcaggtggcggacctcgccgagcgcgagggcgtggagatcaagtactactcggtcatctaccgtgcgatcgaagacatcgaggcatccctcaagggcatgctcaagccggaatacgaagaggtcgtcacctctcactccgagatccgcgagatcttccgctcctccaagttcggcaacatcgccggcgtcatggtgcaggacggcgaggtcaagcgtggtacgaagtgccgtatcctgcgcaacggcgtggccacggtcaacgacctcgagatctcctcgctgcgtcgcttcaaggacgacgttcagtccgtcaaggaaggctacgaggctggtatcaacctcggcaccttcaacgacattgaactcggcgacatcatcgagaccttcgagatgcaggaagtcgagcgcaagtagtcattgttaagccctctctgacgagtgggctgtcagccgcaggctgactgggggagagacatggtagttccatgattttctctcccccagcctcactgcgttcggcagcccctcgtcagagggggctcaagtctagaaaaggaaattcctatggcaggaaccaacccgcgcgccgcacgtattgcggccttgattcagcgtgtcgtcgcctcctccattgagcgcgaactgcatgacaagcgactcgccagcatcaccgtcaccgaagttcgtgtgaccaacgatctgcagatcgccaaggtctactggacccagctcggccacgaaggccacgaggaaggcgaacgcaagcgcgcccagcaggcgctcgatcaggccaagggtcacctgcgttctctggtgggccacaaggctggcctgcgcctgactccgcagctccaattcgtgttcgatgaagtgcccggcgaggctcacgagatcgaagacattctcgccgtggccaagaagcgtgacgaagaactcgcccgcgcccgcgccaccgcccagtacgccggcgacgccgatccgtacaagcacgacgacgaggccgaagccgagggcgatgagttcgagtccgacgaggagtagtgtgcttcatacaacacccagcggcctactcatcatcgacaagccgcaaggcgtgaccagtttcgacgctgtcgccgccgtgcgcggcgcgttgcacatcaagaaggtcggtcacgccggcacccttgaccccatggccactggcacgctggtcatcgccttcggccacgccacgcgactgctcaacgccatcgtggcgcatgacaaaacctacgaggccaccatacgcctcggcctgcgcaccactaccgacgatgccgaaggcgaggcgcttgtcgatgatgaagcccgctcccgctggcaaacgctgtcagcgcagctgactgagggcggccagagcggcgaaccaacggcgtcaccaactgcctcatggcaaaacctgctcactcgcaccatcgccaccaatttcaccggcgatatcgaacaagtacccaatacgttctccgccatcaaaatcaacggccagcgtgcctacgacttggctcgcgaaggcaaggatgtggaactcaaaccccgcctggtgaccatcagcgaattcaccgtgctggatatccgcagcggattcgtagcaggggagcaggccgctgaaccattgcgggaagacgcgaacacgggaacgattcccgcacttgatattgacgtgcgggtcagctgttcatcgggcacctatatccgcgcgctcgcccgcgacctcggcaatgaacttggcgtcggcggatacctgacccgtttgcgccgtacgcgagtcggccgattcgcgttgccggacgataccagcggacttatcgcctctgaggcgatgcttgacacgcgaacccataccgtcaccgcacataccgatcagaagacgttcactaatcgggaagggcaaaccgtcacgcgcaacaagtgcgtattgaacactcctgaaggtcttgccggtgacgagcgccgcaactggctgcttgaccatgccctcaccatggaacaggccgctcgaggcgcgatgccggcgcttgacatcacacctgaggaagccagcgaattgcgcttcggccgccgtatcgagcgtacaatcagcgagcccactgccgccattgtgccgcaaacgcatgatgtggcggcgattatcgagcgtgccaacgctcatcaggccaagccggtcaccgtattccccctcgcgtaaagtagacgcggtgaaaagtgcagcttgatacaggccgcgcacaacaacgcctatattgcatgaataacatcgcacggataaaaggaacagcacactgatggatatcacgcacctgacccctgacgccgaaggttcgattgaatggccctcgttcagtaacgacaagaaggccgtggtgacattgggcgcatttgatggcatgcacttgggacatcaggcggtgatcaagcgtgtggtggaactcgcgcaccagcatgatgctttttccgtggtgattctgtttgacccgcgccccgcattcgtgcacggctgggccgcctcgcaccatggcgaggaacccgcggtgcagaacgtggatgccgaagccttgaccagtgtggatgatcgactgcaccgcatggaacagttcggcgtggaccatgtgttggtggtgcactacacgctggccttcgcagccatgtcatacattttcttccttggcagactcaccggcaagctgggcatgcgtacgctggtcctcgggcaggatgccgccatgggcaaggggcgagaaggtgatgtgaagcatatcgccaatcttgccgccgccaccggtgtattcgaacttgatgtggtcgatgaccgtggcccgggtgaagtgcgcattccgcgcgatttcaagccggaagccccgagcgaatggggagagcccgtcgacccgctggccaatgccaccaaggccgagcgccgcgcatggagcaagaagaaccaggccaaggcaatgcgcgcctggagctccaccaatgtgcgctacctgctggctcatggccgaatccaggatgccaacgccattctgggtgctccgcacgccatcgaaggcgaagtggtacacggtgaggagcgcggccgcaccatcggattccccaccgccaatcttggctccgacattgcaggctacattccggtcgacggcgtctatgccggttggctggtagatggtgagaaccgctggcctgccgccatctccattggcaccaaacccaccttcagcgagaaaacaggactcaacgaacgcgtggtggaggcctattgcatcaccgatgagtggattgatctgtacgaccataaggttcgcgttgaattcgtcggtttcctgcgcccgcaggtcaagtttgatggtcccgaccaactcgttgacgaactcaagcgcaacgtcgaagagaccaagcgtcttaccgcctgaggcatatctcagggctatttacgcactcccaaggcatctaaggcgtcggacaatgtgttggactccaccagccgaagtccctcgacatgcaccggcttgcgcagcggaggaatgactgccgtcgtaaagccaaggcgcgcggcctcgcgaaggcgatattccatacgcggtaccgggcgcacctgaccggtcagggaaatctcgccaatggcgcacgtggctcgcgcaatgggttttgacgtggcggcgctcgccagtgccgccactatcgccaaatcggaaccgggctccttggcctggcccccggcaatagtggagatatacaggtcgttggacagcaggttgagcttgctgtgacggtagagcaccgcgaccagcatggcgatacggctggggtccacgccattgaccgcacgtcgaggtgtgggcagcaccgacgtggtgaccagagcctgtacttcgataggcagactgcgatgcccatccaatgtgaacgtcacacaggtgccttccatgggtgccgcgttggccgcatcagggccgtctccagacaggaacaatccggcgggatcggtgacctcttcgatgccctcaccgctcatgtcgaaacagccgacttcatcggtcggaccaaaacgattcttcaccgctcgcaacattctcagcgcggtctcgctgtcgccttcgaattggcagaccacatcgaccagatgctccaatgtgcgcgggcctgcaatcgaaccgtccttggtcacatgaccaaccagaaataccggaatgtcaagcgtcttagcggtatctatcagcgcgcttgccacttcgcgcacctgagtcgaaccgccggaaatgccatcgacctcctgcgagacgatggtctgcgccgaatccacaatggccaaggccggcttgttctgttcgatcagccccaatactgtggacagatcggtggtggaggccagtaacaagttcggctccaccgcgttgatgcgggaagcgcgcaaacgaacctgcgcctgtgattcctcgccggaaatgtacagcacggtattggcatgtaccgacggtgcgttgccctgtaccgacaccgtgtttgatgtgccgccctgcgcccggcccgactgttgggcagaccgctgaccggctcctcggaatgtactgtctcccgccacaacgcgcgcgatattgccggccgtctgcaacagcaatgtcgacttgccgatacccggttcgcccgctatcagcgtcactgaacccggcaccacgccaccgccgagcacacggtcgaattcggaaaacccggtaccgagccgctcgacgctttccgtgcccacttcggtaatcggacgggctgcagatctggcgttgtcggcaaccgtaaccgactgcgtgcgtgatgttcggccgggagcggccgtgcgagagcctgccgccggccgagcctcgtgaaattcctcgaccgtgccccactgaccacactcggggcaacggccgtaccacttcggcccgttccaaccgcattcggaacatacatactgcacacttgatttcgccatggtctcaccctaacccaaacaccagcggacggtaaatttttaccgttcacaagagtttcacgcggcttgcgcacaacgactaagattacggccgtctagcgtcacgcggctgtgagagaatcggggtatgactaatagtgagaactcctcgaccacacaatcccatggcaagttgattgcagtggtggttgccgcagctgttgtgattatcctggcagtgctttcggcctttgtgtggccgggttgggccatccagaagaatgatggcacctccactaccacccaaaacagccagcagaaaaccgaatcatccgagccgatcaagccgaccatcgacgccacagctttgccggatgatgccagtgagctgttgaaggccatgccggacagcgtgctgaattacgcgcgtaccaaggcggatgcctccacgacgtggaattccgcgtcgccgctcgaggagtacactctgacctactccactggtgatgccgccaaggatgtcacgctggtcgccgcgcagtggtcgtcggcggacaatgccaagacccagtacgatgcgttggtcgctgcgcagaccggcgatgagtcggcatccggcaacgtcaaggtttccggcaacgtcacgggcgcgtacgtggtgaaggccgatgcctccaacagcaagaacgccgctgccatctggcagaacgataccgtggtcttccaagctaccggcaccaaggaagcggtcgatcgcttctaccagaagttcccgatgtagtatctagtatcggctgtcagctgctgcacaaacttatgaacgttggggcatccacattgctgatgtggatgccccaactgcgttcagggcatatgcggactatcgacaacatactggtttcctctgtctggcaacacgtgtattatggtgcaagttgcaacttttacgattaatcgaaatggaggcttcagatgggttctgtcatcaagaagcgccgcaagcggatgagcaagaagaagcaccgcaaactgctgcgtaagacccgccaccagcgtaagtagtcttacctgcaatcaaggcattagaaaccccgtgatcgttatggtcgcggggtttctctttttggctcctttgccttgttcgggcaacagtaaagcccgcacctgcgatgtacagatgcgggcttggaaaagttcagtgatgtgagacgatcacttgttggcgttggtcaacacgcgcgggccgttcgggtcgccgacgatgaccttgtcgaccatgttgaggaacaggccgtgctccaccacgccgaccgtgttgatgaggtcttcggccagctcctgcgggtgatcgatgcgctccaggtgcagatccaccacgaagttgttctcgtcggtgcgcacttccttgccttcggcgtcaagacgcagcaccggcttgtagccgcgctcctcgaacttcttgatcacatggccggcgccgaacgggatgacctcgaccggcagcgggaacttgccgatggtgtccacaaccttggactcgtccacaatccacacgatctggttggagttggtggccacgatcttctcccacagcagagcagcgccaccgcccttgataccgttgaagttcttgtcgacttcgtcggcgccgtcaatggtcacgtcgatgtggtccacgtcgtcgatgtccacgatcttgatgccgtagctttcagcctggacctgcgtgcggcgagacgtggttacgccagtgaactcaagaccttcctcctgatgacggcggccgagctcgtccaccaggaacttcacggtcgaaccagtgccgaggcctgcgatcatgccgttttcaacgagcttggcggcttcgatgccggccgccttcttcagcgcatcctgctgtgccttatccatggtttctcctttgccatccttgcctccgccgcatggatcaacggcgtgaagccttatctcctatcctaacgcgaatgagcgattttgtgtcatcgtgtccgattgcggtacatattcgtgtgtttgggtgttagtgtcgtacgaatggtgcgttggtgatggtcaggttgccgtcgccgtccacatagccttcgatttcgatgctgcctttgatcggcatcggctgcccgttgaaatacgggctcgttttcggcgcgggggagaaggtcagcgtaccggataccgtcagtccgcttggctttgcggggtgtacggggtgcgctgattgtacaggttgcgctgattgtgtcgctaagggtgacgaagacttggtctctggccttgtggcatccgtcgaatccgtcgccgcagccggcttgcgcaaacttgccgcatccgccttgccatccagcaccaactgcacgtctggaggcacatcggtgccatgtgcgtattcggagcccagtagcgactgccagccttcaatcggcagatagccgtcgcgcgcacccgaacggcaatcgcccgcataggtgcgtgccagttcgtcgaccaactcattgccctcgttgccggcgtgacctttgacccatcggaaatccaccgggccagggcgttgtgagatctcacggtcgatcgcctgaataagctctttgttcttcacaggctttttctgcgaatttttccagccgttcttcttccagcctttgacccacttggtcgagcaattgatggcgtactgcgaatccgattcgatgagcaatggctcagggcccgggtgcgctcgcaaagcttccagcactgcgcacagctcaccaatctgattggtgccgttggtcgcgccgcccgcatcataaccatggtcgtcgtgcttatggccgggcttgccgccggcgttctgctcatgatcggcccaggcccagcccattggcccgtttggattccctaatgcggacccatctgtggatactgtgatagtcatgttctccaccctaacgcaagttgtgcaatctcttgctgaagtggggttgtccagtgcgaggcaaaacaacgtagtgaagagtgtgaataacatcacacctattgactttgcttgaaaaacatgccatcgcgcgtgaataggtgagcgctcacaagaaaaacaagacatttcctctctgcgggtgaggccggcaacaatggtgcatccggtatctggaatgagaataagggactgtacaaaaccagtgacggcaacatcgaaatcctcaaaccagaggcggacagcgatggttcgacggccacggccgcatccaagggcaccatgcttatcgcaggcaactccaaaaccgtggcactcggtccaggcggcatggccttggctcccggcctgccgctcggtcttggctggttcatccgacgccgcttgggattggatgcctccgacattctggaccgtaagctcggcttgaagtaacggctggttcggacgtgattgctgtcacgtacggatcatgacgacagcgcgaaggtcctcatcggtttacgtcgatgaggaccttcgcgcgcattaggggagtctgttgcgggctgcgctacgcgggtcatgctgcgcgggcgtgctatgcggacaaactacgcgaacaagtcgttcagtgcctcggcaatcgtcggatgcgtgaacaccatatcgcgcaacgtgctggccggcgcgtcaagatccatcgccaacttgacgatattgatcacctcgtgcgactcgacggaaagcagcatcgcacccagaatgcggccagtattgcgttccacaatcgccttcatcagaccatccggtcgccgcattacctgggccttcggcacagcggccaccggcaatcgcttgaccacataatccaatccggccgccttcgcctcgcgctcattcaatcccacgcgcgagtaaggcgtggcgaggaatgtgctcgacggcacatgcttgcggtccttcaccgtgtacggacggtcggaaccattgagctgtgaccacaccacgcgatagtcatccagcgaaatgtacgtgtgctgcgggccgccgttcacatcgcccagagcccaaatgtcggctgctgtggtgcgcagaagctcgtcgactttcacggcaccgcgttcggtgagctccacgccagctgcctcaagatgcagtccctcgacgttcggcgtacgtccggtggccaccagtaccgcgtcggtggtcaggcagaatcgggcttcagccggctcggcgaaccgcggctcgccatcgtctgatggtttcgtttgaacgtgtgacatcgtggcgtgatcggtcgggttgctagtggggctggtggttgttgtagtgtcggtggcgccggtggcgtcggtggcgtcggtggcaccggtgatatcggtatgagcgttcccggtgccggcgggggtggaatcgcaagcttgcgatgcgccgcgagtcatacccttcaccgcaacggacaacctgacgccgccgtcagcagcaggcgcgatggccttggtatccgcgttgaacaggaacttgacgccctgcgcttccaactgtgcgcgaatcgcggccgccacatccgcatcctcgcgcggcaggaactcggcattgtgctgcagcacggtaaccgccgtgccgaaatcggcaaacatcgaggcaaactcaagtccaatgaatcctgaaccgataatcaccagtcgctgcggcatatcgtcgagatccatcagtccagtgctggtgtagacgccgggcgtagtgtggataccgggaatatccggaatgcgcggcgtggcaccggtattgatgaagatcttgctggcggtcacggcgaccgggccctcagcggtggcgatttccacgctatgagggccggtgaagtgagcgcggccggtgattacggtgatgttgtcttggtcggcgagcttgtgatagttcttgtcgcgcagcatcgaagtgacgcggcgcttctccttgatagcagcctcgaacgctgcttcgcgggtttcgggagtactgttcgcgccatcccgccgcgcctgttcggcggacaaaatcagtgacttggacggcaagcatccgatattgatgcaggtgccgccgtacatgtcggcgcttgcctcggcgacgacgaccttgcggccggctgcactgagcttggcagccaaggttttgccgcccttgccgaatccaatgatcagggcgtcggtggtgatagtgggggaggtgctgggtgtgctgatggcattgggtgtgctgatggacatggttacttccttacgtattcgagtgataagagtgcgttgtgctgatgtgttgtgtgccgtgcggcgtctgttttcttctttgactgccgaagcgttatcgactgatgctggctaggggaaacgcgcgggattattggcctttgcgctcgctgaatatctgttcggtgatgtcgtggatggtggtgtgttcgagttgttcgaggcaagtgcggttgagcccggcatagatgtcgttcatcactgcgcccattgaagatgacaccagacagtcctcgtgtacgtcgcccggtgtccagttcactttcacaaaagtggtgccggtggcttccgctaccgcgcgcaaagtgatttcggcggcgggccgggccagagcgtacccgccttcagcaccctctttagtggcgatgagtccggctgaggcgagcggtcgcattactttgcgcacgcgcgccgcattggtgcatatgttctcggccaggatctgactgggcaggtgtgtggcgcgatggtcaaggtagaccaatgcgtgcactgccagtgaatggtcgccgttcatgaaacgacctccttaccgagtcgatactgtaactatgatgtgtacagttatgatactgtaatcatatcagatacagttagtgtgtcaaatcggggttgaagaggtggatgactatgtgtataagtgaggtgtccacatggttatccacaatgaatgtgcgtaagtgaagctaggaccacatacctcggatcggcttccgtttccgcacccactacccatatggtggtgtcatgaacaggatgaccgacggcatcaccaactatggagctctgccaggctctatatacgatcagcctccggaagaatcggaggcagtttttgttccgcccgaatttgcggggtcattttctactgactcgaaatacccgacttctcgcgactcgtcatcgccgaacagtggtgcacatgattctgcagcgacaccgaccatgagcgaaagcctcgcccagcgcagacgcgacatggtcgcacgctgcactgaggaagcgaaacgggcgggcaagaagctgcttttcggcatgaccacttccctcgctctgcaatccgtaccgattcccgccgattgcgacctcgactcggccaagctgcacactgtatccagtgttaagagcaagcggtttcgtacacgccatgcaccactgcaaacgcatatttggaaacatgcggctaaagccgccaatgtggaaatgaaccaacacgtgtttgcgctggacctgtttcacgtatgggcccaacttgccccgtatgtttcttttgagtccctgattgtgctcggggatgccgtcatcgctgctacgagcaaacagccagtattggccaaggatcgtgatgctgctgcaatctatcaggatctggtgaagttcgtggagcaatttacccgattcagagggcgcccgtcctgcgttcgagcattgcctctgatatcacctggtgctgattcgcccaaagaatcagaagaacgactctctctggtagcgcatgggattccacagccggttgcgaactatgtggtgccggacgcggcttttgcatctggagctcccataacgttggacttagcgtggccagagttcaaggtcgctgttgaatatgatggcgatcatcatcgtacgagtaaggctcaatggcgccgtgaccaagagaaaaggggtgtgctggtcgggcggagatggctggtcttcgtcgccacggcggcaagtatcgctaacgaggacgctcgtgctgaattcgctttcaacgtggcgagggcgcttgcttcgcgcggtgccgtattcgagtttcatgtagttgccatgtctcttgaagagttggcgcagagcctgctgtgaccatgatgttcgaaacggctgatgtaaaggcaatatttgtacgacctgttgttgtggtgtgtgcttgatattgcatgccgttcgattgcgatgcctcgtagtgatggatttcgtgaatgactagtgttcgattgtggagggaaatgtgtcatagtggtcgattgggggtgttgtcggtgcattgagcgtggatttgcgccaatgggtgtgggacgctacgcatgttttgccgatttttgcgtggcgtcccacggcccctcgggtaatggctgtgacgggtgtggcaggaatggcgtctttccggggtttccagtttgagtgtgtgggatgggggaaatgtaaaacgattgacttagctgttgtcccacgcttttgtgggatggcagctctggaatgggcaaattcgtcgtggcgtcccacaacgatgttaaaactcgaccatgatgcaagccgaccgaacgcttcggcggtcatctggccgctgtgaccccacaatgatgatggtaggcaggcgaacgtttcgcggtcatctggccgtcctgccctgcagtgatgttgagaaaatgcagtcacggtgcatgaggagaaccgttgacctgcgtgtttcagtggtcgcgaactgcatatgcgctaaaaaagctctgcagtggattgcatgaatccaatgcagagccttattagttgcggtgaacgcgactaacgcagcgatttcactcgctcagggccttgtcgaccacgacggtggcctcgtcgagcaccttgtccagagcctcgggggagacgaaggactcggcgtacaccttgtagatgttctcggtgccggaggggcgggcggcgaaccagttgtccttggtggtgaccttcagaccgccgatcttggcgtggttgcccggtgcctcggtcagcttggcggtgatgtcttcgccagccagctgcgtggcggccacatcatcaccggtcagcttggcgaacttggccttctgctccagtgtggtcggggtgtcgacgcgcttgtaccaagactcgccgaagcgctcgacctgctcctggtgaagctgggccgggttcttgccggtcttggcagtgatctcggcggccagcaggtcggggatcagaccatccttatcggtggtccacacgcggccatccttgcgcaggaagctcatgccggagctctcctcgccgccgaaggcgacttcgccgctgaacagcgggtccacgaaccacttgaagcccaccggcacttcgatgaccttcgcgttgatcgatgcggccacgcggtcgatcagggaagaggagaccagcgtcttgcccacggctgcgccctcaggccagcccggacggttgccgccgaacaggtactccacgcacacggcgatgtagtggttcgggttcatcacgccccagttcgggcagacgatgccgtgacggtcggcgtccgggtcggtgccgccgaccagatcgtacttgtcccaagcgccggcgttgagctcgtcgaccaggcccttcatggcgtacggggaagacgggtccatgcgaatcttgccgtcgtggtcgatggtcatgaagcgccaggtcgggtcgacctcaggacgcaccacgccgatgttcaggccgtacttctcgttgatgagcggccagtagttcacggaagcgccgccgagcggatcgatgcccagacgcacgccggagttgcggatcacgtcgaagtcgatgacattgcccaggtcggcgacgtagtgctcgcggaagtcgaagccctcgacgtactcggacttgatggcctcctcgtagggcacacgcttgatggacttgaagtcgccgagcagctcgttggcgcgagcggcgatggcgttggtggtctcggccggggccgggccgccggtgacggggtcgtacttgaagccgccgtcggtgggcgggttgtgggacggcgtgacgacgatgccgtcggcgaggccctcgccctcgaagcgctgggtgccgtcgaccgcacggttgtgggtcaggagggcctgggagaccaccggggtgggcacgaagtcgtcacgggagtcgacgcgcacgtgcacgccgttggcgacgagcacctcgatggcggtcttcttggccgggccggaca

SEQ ID NO: 1115 - DNA, 14269 bp, Unknown
  R81_24m  MAG No. k141_2204
atggactacttcgccaccatgatctacctgacctgcggcagactcgacctcaaagccgtcaccaccacttgaccatcacccaccacaaacagcgaatagcctcaatttgttatctttaccgcgcttgcgtggacagagaacgctcagacctcgaagatcgccgcatattcgcgagagaacccgcctagtcaatgagatatggattgaaaacacgctcggtgacggggatatggagcatcagcatggtgccgtaaccaagaatcaccagcaggaacagtccaccgggcatgtagaaccagctggccaccagcagcgccacgaacacggcatccacgatgaccagggccacggtcatcgcgatgtgggagatgccgaagatgaaggcgttcttcaaggtgccggccacggtgttctcgaagcgtgcctgaagcgcgaacacccattcgaagccgataagccagaggatggtcagcgcgaatttgatgatgagcagcggcgtgatctgcaggacgatccatgaccagaccagtgcaatcagcaccaccaagaacggcagccacaacagtgtggctttgatgaagttggctttgaatgacttgaagtagttggcggttacgcctttgccctcgccctcgatggagcggcggcaagcatcatggccggcggtcagggccgcaccgatggtgatgagcggaatcgaagtgaccagcatcagaatgttgatccatacgccgtcaacaagattgctccacgcgcgcatgaatttcgagtccggtgccagccagttcatcaactactccttgtgtcgcctgtggctcccctctctgaggggagctgtcatcgcagatgactgaggggagacttgatggagctcaggatactcccctcagtcggcttccgccgacggctcccctcaaagaggggagccggattggtggagctcagcccttgaccgctccgccttcggccctgcaattacggactcgcctacgacgaggctcatcattagcttcgccgctgtcgcggctcagcctggagcctgctggaagcccactgggcttccagccatgggctgacgacgcgagtcgtcagcccttgacggctcccgccatgacaccagagactatatacttctggcataccaagtagaagacgatgatggggatgatggccagcaccaggcaggccatcatggcgcccatatccacggaaccgtagccgcccttgaggtattgcacggcgaccgagatggtcttgtacttgccgaggtcgagcgtcaggtacggcagcaggtaatcgttccagatccacatggcttcgaggatggccaccgagacgatcgacggcttcatgatcggcaccacgatctggaagaagatgcgcggcactgacgcgccgtcgatcatggcggactcctcaagctcctgcgggatgcccttgatcacgccggtgaagatgaacacggccagaccggccccgaaaccgaggtacacgatgcacaggccccacggggtattgagcttcagcatgtcggcgatcttggagagggtgaacatcaccatctggaacggcacgatcatgttgaacaggaacagggtgtagagcagcttcgcggcccagttgttcacgcgcacgatccaccatgcgcacatcgaggtgcacaccagaatcagcaccaccgagccgacggtgataagcagcgtccagccgaaggaggcgaagaactgcgtggtctcgatgccgcgcacatagttctcaagtcccacgaacgccttgccggcaggcagggagaacgcgttcttggagatgtacgccttctgcttgaaggagttgatcagcaccaggacgatcgggaaaatccagaacagggagacaacggcaaacagcacggtccataatgcgccatgcttcacaggcttgttctcgttcatcaggctgccacctccttgctcgtggtgagcttgttctgaatcagggcgatgaccgcgaccaggatgaagaacagcacggccttcgcctggccgacgccttcccagcccatacggccgtagaaggtgcgggtgatgttcagcgccagaccttcagacatgttgctcggcgcaccgttggtcaatgcgaggttctggtcgtagagcttgaaaccgttggtcacggtcaggaaggagcacacggtgatggacggcatcatcagcgggatgatgatgcggaacatggtctgccgtccgttggcgccgtccacggccgcggcctccagcacatcggtgggcagggcttgcaggccggcgatgtagatgatcatcatgtagccgatctgctgccagcacaccaggatgaccaagccccagaacccgtaggacgccttataggtcagggcgcggccccagtgggccagtacgccgttcaggagcagcagccagatgtagcccaggatgatgccgccgataaggttcggcatgaagaataccgagcggaacagcgtggagcccttgatcgccttggtcagcatataggcgatggcgaaagcgatcacgttgatcacgatggtggtcacgatggtaaacgcggtggagaagccgagcgcgtgcaggaattccttgtctttcaacgctttgccatagttcttaagccccacccattcaccgtcggtaacggtggtgaattcgcaaaagcttaagtagacgcccatgatgaagggcaccaggaacccgatgatgaatgcggcgaatgtggggagcgcgaacagcgcccaccatctgcgtatcgccttgccagccatgctgatcatgacttttcctcctccttgagtccgctgcgttgcgacactgcatcgtgcgccggctgcggagttcaactcaatgcgagcctaccgatcgagaaccgcatgcacggcctgttctcgttcaagcctatgttcatagtaaacgtcgaatcattatatgtcaaacgttgtcattttcagcgtttcaatctcgagcatactccagctccagcaatcttctttcaactaagataatggctatataaagccaatctgacgccgtcatagacactttgcaaacgtttgtaatacaatcgttgtcatcgccgcaaatcaatcaatcagcatgtacactgtagtcagttgtgcatgtgtattgcgattttccattcaacgcaagggggctgcaatggctacgagcattcaggatgtcgcccgcgaggccggcgtctccatctccaccgtctcacgttccttcaccaggccggatctggtgtcggccaagacccgcgagcgcgtgctcgccatcgccgacaaactcaatttctcactctcccgctcggctgcggccctgaaatccggccgctccctgcgcatcgcagtactgatgagcggccatatccgcctgtggttcaccgcctcggtcatcgaggggctcaacgaggtgctgcacacgcagggctacgatatttcggtattccagatttccagcatcgaggagcgcaaggaattcttcgagatgttgccggtacgccgtaacgccgatgccgtgattgtggcgtctttcgatatcgacaacaacgaaatcgcgcaactggcttcggtcggcgtgccgatcgtcggcatcaattcagtcgagcccgaagcccgcggctttaccgccgccgtcaatatcgacgatgtgcagggctccacgctggccgcccgccatcttatcaatctcggacatcgccgcatcacctacatcagcaccaatcgcgaggtgtcgctgagcttctccgtgcaaagccgattcgactcattcaccgcctgctgccgcagggaaggcatcgagccgcaggtcatcgtctgcaaggtcgatgacgatgggcgttatgaaatcagcgacgtggtcgaccaactcatgagccaagacgagatgcccaccgccatcgcatgccaggaggatggcatcgctttgccgcttatgttccagctggagcgcaatgggttctccgtgcccggcgacgtctcgctggtcggctacgacgatagtttctacaccggcgatatcggcctgaccaccatccgccaggatccggcggagatggcccgcgtggcagcccgcatgacgctcgacctcattgacgagaagccgattgagcaaccctatatcgtgttcccggcccagctgaaggtccgctcctccacctcccgcgttaagtaggctcacacaacaaagcccaccatagaaaaagcgtgaggcaaccgcacaataacgctcaatcgcacattgtgggaaatggcgaaaaatcgccgattcatggccccacagcgtgcgattgagcgggtgcgtgcctcacactttttctgcggcggccgattttgtgcgagactcagcaatacaaagcggcgcccccgggagaaggaaaggcaggggcgccgcggattgttgcttatcggctatgggactctatgagactcagtgcgaggcctcgtattcggaagcccaaccgtccacgaaggcggtcttgacggcatcccacttgccggtgccctgcgcgtactcgagcagcgcctggccgaccttgttcttccattcctcggacggcatcatggtgaagttccaagaaacctgggtcttgccggactcctggtcttccacggcggcctcggtcagcgggttgtcgcttttgacgtcatcgaaggtcttgaacggggtggtgaagcccatgtcctgagagagggccttcttgccggtatcagaggtgatcacccacttgaggaagtcctcggtggccttcttgtcggcgtcggaggccttgtcattgatgcaccagtagttctcggaaccggtggtcagaccctgcttctcctcgcccttgacgccgatgtagatcggcatcatgcctacctgatcggcggtcatgccggccttctgcaggtcggtccaggcccaggtgccgttctggtagaaggcggcctcgccgagcgcgaactcggagttcgcatcatctccggtcttggcgctcagctgggtgggttcggtggtggagtcggcgatgtacaggtcgaagatcttcttgtagttcggcaggtaggtgcccttgatcttggccggctgctcggtgacgttgtcgtccttgaactcgtagtaaagcggcagattggccaggtgggtcttgaagcgccagtcggagctggagtcgaagccggcggaggtgaacgcgcccttgatgccgagctcgtccttgcgggcctgcatgtcgtcggccacggccttcagggtgtcgaagttgtcgatttcgtccatggacgtggccttggcgccatccagcgcgaagtacttgttgaggatgtccttgttgtagatcaggccgtaggtttccatcacatacggcacgccgaccaccttgtcgccatccttcagggccacatcttggttggtgagctccttgtacacatccgtattggacatatcggcggtgtacttcttccagttctggtagccgaccgggccgttgacctggaacaaggtcggggcttcggttttggcgatttcggacttcagggtctgctcgtaggtaccggaggccgcggtctgcaccttgacctcaacgcccttttccttggtgtattccttggccagagcagtccactgatcagccgcttccggcttgaaattcaggtagtagaccttgcccttggcgtcatcgccggaggtcgagcttccgcaggccgccaaagcgccgagggacatcgcagcgacagccgccatcgcgactgctgacttgactgtacgattcatcatcgaacctttctctttcatcgtcgacccggccgtccccggtcgggacaggtacgctagcacgcacctttacgactatcgacatgcactattgtgcaacggtttgcttctttttgcaaacgatagcaatatcggcgcgtcataaatcatcattttcaggccattgtcaacaaatatcccattaattcagtcatttttgcctcattatcgcaatgcaagcgttcgcaatcatgagagcgctaacatatctttcatggcgatcgattgccacttatacccatcaaaaaacaacacgccgacgctatcgtttgcaaatcatttatcgacataccgcaattcccgccacaaacaataaaggcccgcccgcagtagcgggcaggccagcgcaatcgcagcgcaaccggggctaggcgttccaccgttcgatgacgttatctcccttatagacgctgagcaccgagtagtgcgccgtatccaaacgcagcaaccgtgcgaaatgcgggtccacgcccagccattgcgaggtgaggatgcgcaggatgtgcgcatgagccaccaacagcacattatggccgtctttcagcagcggcgtaatctcgtcgatggcgctcttggcgcgtgccgccgcttcttccagcgtctcgccaggcccggcatggaccggcacctgttcgcccgaaggcaaggtctcgacccagtcgccctccagcgtgggcgtcagcgagcgcggcccgtcacgccacacatcccattcaaaaccgctggcctcactcacctgctggcgcgtacgcccctcggctcggccgtaatcccattcagcgatgccgtccaacacaccgtggtccgcaaaaccagccaattcagcggtttggcacgcccgcttcagcggactggaaaacacacagctctggctgaatccttcggggaaggcctcgcgcaggcgccttccggcatccgctgcctgctgctcgccgaccgcggtcaacgggatgtccgtgcgcccggtatgctgcccggattcgctccacacggtctggccgtggcgcagcaacaccaaaaatccattgccgccacgagagttctcgacggcaacggtgccgttcacgttctgttcgctcatgcctccactctagtctgcgctcgttcatgactccaccattaacgcccatcttttgcgctgagatgattgagatgctattagactgagagtcatgagcgacgaaacgaacaccgacttcccctccagcgccgaccgcgcggtcgacagcctgcaccgcatcgacgagaaggtcaacaggctgcgcgaggaccggctcaacgaccctgattctctgggcgacaagctcatcaagtcggcagtcccagcgctggcaggcttggttgccggcaaagcattccagatgatatgggacaagggcacaagcaaacgcaatctgcgcaagggactggcggcagacgcgccgcaaagtctggcaatgagtctggcattcgccgccgtttcggccgcactcggcgcagtggtttcgcagctgtcggatcggggctccaaggcgttcgtcgaccaccgccatcgcaagcccagccgctaatcccccggttggatgatggtttctgttggctgactgatgactcatcgctggaatttcgtcaaggaaccatcagtcaatcgacaggaaccatcagtccagcacagttccgccacacaatatcggcatttcactgtgaggtaatccaccgtggcgtccggcgtctgccgtgcgacaataaagccatggttaccaacgcaacaatcgaggctcttctgggccgccgctccatccgtaagttcaaggacgaggccatcgacgacgatacccgcgccacgctcgaaaccgtcgcccaacatgccgcgtccagccagttccttaacgactggtccgccatccgtatcaccgacccggccaccaaagccaagctcgccgaattcggccatcagccgtatatcgccaccgcgccgttgctgtacgtgttcgtcatcgacgagcaccgcaacgcacgcatcgccgaacgcaagggcatcgatcccgcttccgacgaattccatctcaagtacagctatcgcttcacccaagctcagaacgacgcagtgctggccctgcacgccatggagaccgccgcctattcgctgggactgggctgcgtgattctcggctctctgctcaacaacatccccggccttatcgacgtgctgaatctgccggaatacacgtatccggtgctgggtctggccatcggcaagccgatcagaacccgaccgtcaagccgcgcatgccgcgcacgatgcagttcttcgagaacacctacccggctgacgccgatggcgtactcgaccagctgcccgccttcgacgaggaagttcaccggtactacgatctgcgccaagccgaccgtccggtggacgctttcagcgatcaggtcgtcacgatcagtcggcaggatgtcagccatcagacactgctcgacaaggccgccgctcagggcttccgtctggatcagtgagaccagaaccaacgagatagcctcggataggctcgtcactgagtcgtctcggtctcagcactgcgacgactcagttccaacacctcaacatttcatcaccggataccggcaaaattgcacaaccatcccgccggtgtcgcaccatcaacaaacgttcacatatcagtcccattatgcggacaaccaacggccagttttgcaagaaaacccgccaaaccagcagtatccgcaccagtggtgggaatagactgcatgtggccgcaatgactacgaaccggaaaagagggactggatgcggacggtttggcaagtctttctacgcgattgcagacgtatcttacgcaatcccgttgccgttgtggtgacgctcggcgtagcaatgctgccctcgctgtacgcatggttcaacattctcgccaactgggatccctattcagccaccggcaatctgcaagtggccgtagccaatgaagaccaaggcaccaccaacgatctggtcggccatctcgatgcgggccggcaggtcgtcaagaaactcaagcagaacgacgaactcggctggcgcttcgtagacaatgaggaacaggccgtccacggcgtggagaccggcggatactatgcagccatcgtgctgcccaaggatttcagcgccagcttggtcgaatcggtgaccggaacctccaaacagccgaaaatcaagtattacgtcaacgagaagaagaacgcgatcgcgccgaaaatcaccgacaccggcgccaccaccatcgatgagcagatcaactccgccttcgtcaccacggtagccaccaccgttgcctcggccatttccgaaaccggagacgatctcggccaagccactggcaaagtccagcacgatacgatcgatgatctcaatacggtgatgtccacgctgaacaccgttcaggattcactcaccgacttacaggacacgctggcccaatcagacacgattctcgccgacgccaaacagaccaccgcctcactcaagcagaccgtcgcggccgcgcagaatgcctcccgccagtccggcacactgttggcggaaacacaggccgggtcacaagccttctccaccacactggtcggcgcgctcgacagcagttcagcacaactctccggactggccgtccacgtcaacaacgccgccggcagcatcaccggctccttcaacagcgcgcagaactccgtcgacaccatcaccaacacactttcggccccactgaacgccacccaaacgtcaatcagcgatctgaaagacgcgctgaccaaagccggcatcggcaaagacaccaccgacccggtcggccagaacatctggaaacaaatcgatgcgctcgactcattgatcagcaaacagcagacacagctcaacaccttccataccgacaccacacagttcatcaactccggcaaagacgccaccacgaacctttccggagccatgaccaacaccaccaccggcggcatcgcggcgctgaataccgcgcgcggctcgctgaccggcaccgtaatgccgtcgctcacctcatcattgaacagtttcgccgccctgaacggcacgctggatggcacgttgacttcgttgtccggcaccttggatcaggccgacgggctgttcgaccagcttgtcgataccctgaaccaaacgaaaaccaccatcagcagcacgcaggattcgctgcgccaggcggccagcgatgtcgccaccgtacgcaccgatatcgccacgctcgatagttccgccgcttaccagaaaatccgggatacgctgcatctggatgacaagggattcggcgagttcatgggcaatcccgtcaccctgaccacgaaagtcgtgtacgccaccgacaattacgggtccgcagtcaccccgttctacacgaatctggcactgtgggtaggcggtttcgtgctgattgccatctacaagcttgaggtcgaccgcaaaggcattcgccgtatcaccgctacgcaagcatatcttggccgctggctgctgctggtcaccatcggattcctgcaagccatcatcgccaccattggcgatctggtgctcggcatccaatgcgagcatccgctgctgttcatcttggccggaatcttctgttcgttcgtctacatcaacattatttacgcgctggccgtggcgttccgccatatcggcaaagccatcgccgtaattctggtcattgtgcagatacccggtgcctccggcctgtatccgattgaaatgatgccgaacttcttccgcgaactgcacccatggctgccctttacctacggcatcaacgcgatgcgcggcccgatcgccggcctgtacgcgaaccattactggctcgacatgctgcacctgttctggtatctgccggcggcgcttttcgtgggacttgtcgtacgccggtatgcgatgaacctgaacgcgctgttcgaccatcgtttgggagataccgacctgatgatcaccgagcacaacagcatggtgaacgaacaggtgagcttgaactccgtattccgcacggtgtccgacagcaaggaactgcgcgatatcatcgctcatcgcgcgcaccggttcttcgcgcggtacccaaagatgatcgttgccggtctgacattgctgaccgtactcccgttcgtattcctggtactgctgttcatcacccaagagaaaatcgccatgctgacctcctggattctgtcgattattcttatcgacgcctatctcattgtggttgaatacgcacgcgaaacctacgccatgcagcttggcgtcagtgccatgagtgccgacgagttccgcaatgtgatgctcaacggatatgtgtggcggcgtttccacggccacggacgtcacgaagcggcgatgggcagcaatccggatatcggcgaaaccactgaacgactcacactgttcggcgatcaggccgccgagccgactgcgcacaccgcacagttcgagcagtccggtcagtctgggcagtctgggcagtctgggcagtctgggcaaggaggcgcacgatgaagcttatctggaaaatattcgtacgtgacgtgcgccaagccacccgcaatgtgatcgccgtaatcgtggctatgggattggtgattgtgccggcactgtacgcctggtacaacatcgccgccagctgggacccgtacggcaacaccaaggccttgaaggtcgccgtggcaaacgtggataagggctataagtccgatctgatgccgatcaccatcaacgtcggcgaaaccgtgaccaatacgctcagggccaatcatgaccttgactggcagtttgtggatcgtgctaaggccatcgatggcgtgaactcaggcgaatactatgccgcgctgattattccaaagagcttcagctccgatatgatgacgctgttttcaccgaagatcaagcacgccaagctcgaatactatctcaatgagaaaatcaatccgatcgctccgcatatcaccgaccagggtgctaccaccgtggccacgaccatcgaccagacatttgtgaagaccttggcgagcgtggcgctggatttggtttccaacgtggccgattacgcgcaaagcccgcaaatggagcagtacgtcaacaacgcctccagtcatattgccaccatgtcgtctcgtttgaccggcactgcgtcgcagatggattcctatgccaatctgctcggggccgccaacagcatcattgattccaccgataagctgctgggatcaacaggctcagctgcggccacaaccaaaaaggcgttgaaacagacccgcaacggcgtttccagcctcgacaaggcattgtccggagccaccgatggcgtcggtacggcattgcagcaggccggttcatcctacgacaccattgccaagcagatcgatgccgcttttgccgatgtgggctcacaatcctcgcagatatcaaacaagctgaccgatatgcaatccaaagtggaggctcaggccgacagctttggaaagtatgccgccgctttacgagatctcgccaaacaagcggcttcactgcccgtgggcggagataccgttgccgctcaactgaacgcggctgcagaccaagccacaaaggcgcagcagagcatgcagcaagccgccaccgcgttgggcgatgcggccacgcacatagcaaatggtactgccgatgccgatacagcgcgtcgagatctgaaatcacaaatcgccgccgccaaacaatcgattactcaggcttcagacacgtacaagagcacgctgaaaccgcaactgaacaatctgacctcgtccatggacgaagtggccacgcaggcaagttccgtaatcgacgggcttgcgtcgaccgtcagcagcgtgtcaggtctttctggcggcgtttcagacagcctgacggatatccagtcggccttgactgacgcagctaacgctttgacccgttcggcgaagaaactcgacaacttgtcttcccaactcgcctctatcaccagtggcggcaccaacgacctgtctgtgatttcctctgcgaagcccgatgccattgcttccatactggcggcacccgtagcggtcgaccgcatcgcgctctatcccgttgccaactatggttccgcgatggctccgttctacacgattctgtctatctgggtcggtgcgatcattctggtcgccatgttgaaagtatcgatttccgaccatgagaaggcccgtatcttagggttgggcaatgatctgccgctcggttcgggagtgggtcttcgcgaggccatgattgccgggcggattgccggaccggccgccgcgttggatgtgctgaagaagccgcgtgccgagtcttccggcaatgcgcggcagttcggtttacgcttgcaccacgaatatttcggccgatacatgattttcggtttccttgctttgctgcaaggtacgctggtgtgcctgggcgatatgttctatctcggcgtgcagtgtgagcatccgattcagtttttgatggtcgggtggttgtctgcactggtgttctcgaatattgtgtatacgctggccctatcgttcggtgatatcggcaaagccattgccgtggtactgctggttatgcaggtagccggttccggcggcacattccccattgaaacactgccgacgttcttccaggtcgtttctaaatggctactgttcccctatgcggtggatgcgatgcattcggccatggcgggctcattcggcatggaatactgggtttccatgggcaaactggcactgttccttgttccctcattgctgttgggacttatgttgcgcaagccggtaattcgcttcaacgattgggttatccgcaaccttgaaagcaccaaggtgatgtgagtgttggacggagtgtgtccgagcgccctgaacgcttagcagcctacgacctggcgtgtttggaccgtaacctgcctcagatacggcgttggcgaggcctgtggagcttctgacgctaacgtctacgtggcttgtagccctttttacgactgtgtggcttgagttgctggttcagcggtacatgccggtaactggattgtggatcgcgatgtgtgaggtgccagcatccgcaatattcgcaacggtacacccatagctcggctccacgctcgatcaggctttgatcagcggcacgctgagcctgcgccttatcgtggtacatgattttattcgacgtggcgcaacgtttaggggtgaagtaatgcatagcagaagccagtgtagagcgaccccataaccaagccagtttctggctcccctctggaggggagctgtctgcgcggcggaccgggggcctgggcgttgggctcccacggtcgcggacgcgccgcgccgttcggcctcgccgtcggggctggccgggaatggtcccgggcgtgggtctcatgggtatgcggggaggtcccggtgcccgtgcgggttcgggccgg

SEQ ID NO: 1116 - DNA, 3479 bp, Unknown
  R81_24m  MAG No. k141_2430
acgtgtacacgctgctgaagattgacgaggtctccaacctgggtgccgccaagattcgactgcgctcgctcaaggccgccgtcgaggaacgcgaagccaacaaggcccgcgaagccgccgcggccaaggccgtgcaaggccccaagtccgccggattccgcaagaccggctccaccgcgccaacccccggccgccagattctgcttgacagcaccatggccgccaacccgaagctcaccaaggccatgcgcgccgcctccaagcgtgccgccgaacgcgacctgcaggccgcagtcgccagcaagaacggcacttcggacggcaccaccggcgtgacgaacgccaagaagtccggccacaacaacgccaccatgtcccgatacgcgcatcgcgagaagttcgtcaaggacatgaagaagaactatacgattgttggccctcagatgagcccgattcatatgtccttggtcgaagcggtgattcgttccggtgggtacaagttcgacatcctgaagcacgcgagccgtggcgatgtggaaaccggcctcaaatacgtgaacaatgacgcctgctacccggccatcatggtcgtcggccagctcatcgacgcgattctggaaggcaaatacgatcccgaccatgtagcgctcgccatcacccagaccggcggcatgtgccgtgcgaccaactacttcggcctgatccgcaaggctttggtcgatgccggctatccgcagattccggtcatcgccatttctacccaggggctcgaagataaccccggcttcaaggccaccctgcccctgctgcaccgtgccatcaaggcgctgattctgggcgacttgctcatgaagtgcctctaccgcgtacgcccgtatgaggtggagaaaggttcggccaacaagctgtacgagctgtgggacaccatcgtgcgtgagaccatcgagcatcacggctattccaagaccgcagccaaggcgccgagcatcaagaagggctatctgccgtataacgtgctggccaaggagatcgtgaaatcctttgatgcattgccgctgcgcgacatcccgcgcaaggtgcgtgtcggcgtggtcggcgagattcttgtcaagtaccagccggacgcgaacaaccacgtggtcgacgtcatcgaatcccaggattgcgaggccgtggtgcccggcatcatggaattcatgaccacccgcccctacatcaccgactggaacgagaagaacctcggcatgggcggcaacaagacggtttacgccctgatgcgcaagggcctcgacctgtacaacgcgccgatcaaggccgcgctggccacatcgaacggcaagttcaagcaggacgagccgatgcccgaactggtcaagaaggctgctgaagtcacctccatcggcgtgcaggccggtgaaggctggctgctgacggccgagattctggaactcatcgaacagggttgcccgaacgtgatctgagcgcagccgttcgcctgcctgcccaaccatgtgaccggccgcggcatgttcggcaagatccgccgcctgcatccggaagccaacatcgtctccatcgattacgatccgggtgcctccgaggccaatcagctcaaccgtatcaagctgatgattgccgctgccaagaaggcccacaacgccaagttcgccgaggccggcgagccgcagggcttcacctccgcggactgatttatgctctggctcgtccgcaattaaggacgagcttcgctcgcgacatgctggttcgcctatcggctcaccctcgcctacggacagcccacagggctgtccgctttacggctcggcctctgtgaggggagctgtcgcgcagcgactgaggggagtctctagagcgagaaaccaggccggagcctgctatcggtttttcgtatagcgtattacgggctttcgggcacgcgcaccggccggctcgaatacgatacaaagcatggttactccccgaatcagttacgcgcacctactcgccaagccgaaccccaagcacgtcgaaagcctgctcaagttctttgagaatggacgctcccagcggggcgccggcggcttcggcgtggagatcgagcacctgcccgtgcacaacagcgacgacactgccgtaagctactacgagccgaatggcatcgaggcattgctcaaacgcttggctccgtactacgacgaggagaaggaatactgggagaacggccatctggtggggctcgcgcgccccggcgtcgccgtctcgctcgaacccggcggccaggtggaaacctcaatcggcattctgaagaagccgtccgacctgaatacgttgtattccaagttccgtcgcgagctcgccccgattcttgacgatctcgacttccgactggtcaactacggttaccagcccaaatccagctttgcggatgtgccggtcaaccccaaggatcgctacgatgcaatgaccgactacctcggccgcgtgggtcagttcggcccatgcatgatgcgttgctccgcctccacccaggtcagcatcgactacgtggacgagcgcgattccatcgaaaaactgcggttgggcacggtcatcggtccgattctggcgtacttcttccgtaacaccccgtattttgagggcgagacgaacccatggccgctgctgcgccagcgtatgtgggattatctggacttccagcgcaccaatgtgctgcccggcctgttcgatgatcgctatggttgggaggattacgccatcgacgtgctgtccacgccgcttatgttcgctgacctgacccatacccctgaagctgtggcttctggagcaagtcccaaggaactgcatcgcccggccttccgcgagaacgcgggggaggtgtacccggaccgcgaactcaacccgtacgagatcaaccacatcatctccacgcacttcaatgacgtacgcctgaagaacttcatcgagcttcgccactgggattccttgccgatcgagcgtgccgaacgtctgacggagattgtgtcctctctgttctacgtgcccgagcatcgcgaccgcttggaaagctacttcgagggcatcagcgaggaagaggtgttcgaggccaaggccaacattcaggcccacggccgcgaagccacgccgtacggccagccgctcgacttctggaaggaattcctggggctggagggccttctgtccgacatccccggcgacctgaagcaccccgacgtgttccaggagtagttggggcgatcgaggaaagaagtcggttactatgttgcgcaatggcagattgcttgtggatgtacaactaatctgccattgggggctggtgccgttttgttggactcgtcgttgattccatcaccaccgatcatgccacaaaccgagctcgcgtcgacgatccatgatgcccgtgtccgggctccgtcttgatccgcctgtcccggtaccggaccatgtagtcgtcgagcatg

SEQ ID NO: 1117 - DNA, 15508 bp, Unknown
  R81_24m  MAG No. k141_2486
ccggccagaagccgaagatcaccaaggccaagaagtccgtcgcgcagttccacctgcgtgaaggccaggccatcggtgcgtacgtcaccctgcgtggcgaccgcatgtgggagttcctggaccgtctgctgaccctcgcgctgccccgtatccgcgacttccgcggcatcaacggccaccagttcgatggccagggcaactacaactttggtctcaccgagcagtccatgttccacgagatcgatcctgattcgatcgatcacgtgcgcggtatggacatcactgtggtgacctccaccaaggacgacaaggaagcttacgcgctgctgaagcacctcggcttccccttcaaggagaactgatatggcaaaaaccgctcttaagaacaaggcggccggcaagccgaagttcaaggttcgcgcttacacgcgctgccaggtctgcggtcgtccccactccgtctaccgcaagttcggcctgtgccgcatctgccttcgtgagaaggctcaccgcggtgaactgcccggcgttacgaagtccagttggtaaacatcgacgctgaaggtccgcggcccgaacgcttctagaagaagcgtgagggcggcggaaaccatagcgagaaagggcaacaagcccaaatgacaatgacagatccgatcgcagacatgcttacgcgtctgcgtaatgcgagcgcggccaagcacgaaaccgtggatatgccgtactccaagttcaaggcgaacatcgccgagatcctgaagcgcgaaggctacatcaaggacttcaccgctaaggaagccaaggtcggccagactcttgaggtcaccctcaagtacggtccgaacggtgagcgttccattcagggcatcaagcgcatctccaagccgggccttcgtcgttacgcgaagtccgactccctgccgatgccgctcggtggcctgggtatcgccatcatctcgacttcttcgggactgctgactcagaaggaatgcctcgatcgaggcattggcggcgaaattgtcgccttcgtgtggtgagaaaggagagctgaaacatggcatcgcatattggtaagctccccatcgccatccctgctggcgttgaagtcaagattgaaggccagaacttctccgccaagggcgctaagggttctgactcctacgtggttccggaaggcatcaccgctgccgttgaaggcaacgagatcgtcctgaccgccgctgatgacctgcgtccgacccgtgccaagcacggtctggcccgctccatcatggccggcatggtcaagggtgttcacgatggctactccaagactcttgagatcgtcggcaccggttaccgcgccgtcgccaagggcaagggcatcgagttcttcctcggctactcccacaccatcaccgtcaacccgcccgaaggcatcaccctgaaggtgaccgacgccaaccacgtggttgtcgaaggcaccgacaagcaggtcgtgggccaggttgccgccaacatccgcaagctgcgcgctccggaaccctacaagggcaagggcatcaagtatgccgatgaacgcatcctgcgcaaggctggaaaggctggtaagtgatatgagcgttgctattctcggaaaaggcaagaaggtagctctcaagcgccgtcacgcgcgtatccgcaagcgcatctccggtacccccgagcgtccgcgcctggtggtcacccgctccaaccgtcacatggttgctcaggtggtcgacgataccaagggtattaccttggtgtccgcctccacccttcaggccgacttcgccggtttcgaaggcaccaagactgaggccgccaagaaggtcggcgagctgatcgccgagaaggccaaggctgccggcatcaccgcagtcgtgttcgaccgcggtggcaacaagtacaccggtcgcgtcgcagccgttgctgatggcgcccgcgagggaggtcttgcactgtgagcgacaacgaaactaaggaaacccaagtggctgaagaaactcagaacactgtggcgaccgaatccaacaacgaggaccgcaagggtcgtcgtggccagcgcggtgaaggccgtcgcggcgagcgtcgtaaccgtcgtgaagaaaaccacggcgacgagctgctcgatcgcgtggtgaccatcaaccgtgtgtccaagacccacaagggtggccgtaccttcagcttcgctgcactggttgtggtcggcgacggcaacggcaccgtgggtgtcggctacggcaagtcccgtgaagtcccggccgccatcgccaagggccagctggacgccaagaagcacatgttctctgtgcctcgcgtccgcggcaccatcacccacccggttcagggtcacgacgctgctggcaccgtcctgctgcgtccggccgccccgggtaccggtgtaatcgccggtggctccgtgcgcgccgtcatggaatgcgcaggcatcaccgacgtcctgaccaagtcgatgggctccgccaccgccgttaatgtggtgcgcgctaccgtcgacgccctcaagcagctcgaagagcccgaggagatcgccgcccgtcgtggcctggcgctcgacgaggttgctcccgatgctctgctgcgcgcccgtgccgccggcattgccgaggctcgcaaggctcgcgaagaggctgctgccgctaaggccgccgaagagaaggatggtgagtgatactcatggctaagaacctgaagattaccctgcaccacggcatcgtgaaccgtaccccggctcagcgcgccaccgtcaagaccctcggcctcaacaagatcggtaagaccgttgtccgcgaggacaccccggccaaccgtggtctggtgaacgccgtgcgtcacctggtcaccgttgaggaggttgactgattatggcagataacgaaatcctgcagatgcacgacctgaagcccgccccgggcgccaagaaggaccgcacccgtgtgggccgcggtgaaggctccaagggtaagacctccggtcgtggcgccaagggccagacgaagcgtaaccacgtgcgtccgggctttgaaggcggccagctgccgctgtacatgcgcctgccgaagcttcgtggcttcaagaacccgttcaaggtcgagttccaggtcatcaacatcgctcgtctcgtggagctcttccccgagggtggcgaggttgctgtggccgacctgatcgccaagggcgctgttcgtgacaacgctccggtgaaggttctgggcgacggcgagaccaccgtggctttcaccctcaagggtgttaaggcttcggcttccgccaagtccaagatcgaggccgccggcggttccgtttccgaggactgattagtcctacggggagcgcaataggctgtacaacccccgcccgccaataggtggacgggggttcccttttctcaaaaattgttgttctgagcgcagagaagcagtctcaacacaatgatcgttttgagtatgcttccccccgttcagtacgacggagcataattcaggtaacattcgcgagacatgaagtggccgaagtaggcactttagactatgctcgttcgttagtttgtgtatttcgcgtgattggcgcgctatagggaggaaatccaggtgaggacactaatccaggccctgaagaccaaagagttgaggaagaagattctcttcgtcctgttcatcatcatcgtctaccgcatcggttcgttcattccgacccctggcgtggactacaacgtggtgaacaagtgcatggccactgtcggcagcgcctcccaggagaacttcatcggactggtgaacctcttctccggtggcgctatgctccagctgtctatcttcgcgctgggcgtcatgccgtacatcaccgcgtccatcgtggtgcagctgctgcgcgtggtcatcccgcgcttcgaggccctgcataaggagggccagtccggagaggccaagctcacccagtacacgcgttacctgaccatcggcctggccgtgctgcagtccaccaccatcttggtcaccgcccgctccggtgccctgttcaactaccgctgcgaccaggtcatcccggacggctccgtgtggaacctcgtggtcatggtcctcatcatgaccggcggcaccggcctgatcatgtggatggccgagctcgtgaccgacaagggcatcggccagggcatgtccatcctgatcttcatgtccatctgctccggcttcctgccgcagctgtgggagatcggctacggcaccaacggcaagaacggcgactggaccaagttcggcatcgtcgtgggcgtgctcgtggtcatcctcatcttcgtcgacttcgtcgaactgtgtcagcgccgcgtcccggtgcagtacacgcgccgcatgatcggccgtaagatgtacggcggctcctccacctacctgccgctgaagatcaacatgtccggcgtcatcccgccgatcttcgcctcctcgatcctcgccatcccgaccctgatcgcccagttcggcaagtccgaccagtcctgggtcaagtggatcaacgccaacctggcgaacaccacatccgtgtggtacatcgccctgtacgcgctgatgatcgtgttcttctgcttcttctacacctcgatcacgttcaacccggacgagaccgcggacaacatgaagcagtacggcggcttcattcccggcatccgcgccggcaacgccaccagccgttacctgacctacgtgatgaaccgactcaacaccgtgggtgccgtctacctgctgttcgtggccctgatcccgaccgtgctgatcatggctctcggactcaacgccaagctgccgttcggtggcaccacgatcctgattatcgcgggcgtgggcctcgacaccctgcgtcaggccaaggcccagaccgaacagttccagtacaccggcttcctgttcgaaaacgtggaccacaaagaaggctgacgcccgcttggcagcggtcgcccgcaatgggcaggcggccgcgcgaggagtggaacagtccagtggactgttccacgacggagcaatctttcttccatatataactcaatggctcccctaaccaagggagccaaaaccgtattaataaccgacacaaaaggagaccaccatgcgtctgctcatcatgggcccccagggcgtgggcaagggcacccaggctgctctgctcgccgagcacttcaacatccccaccatctccaccggcgacatcttccgctacaacatcaagaacaagaccgaactcggtcttgaggcgatgagctacaccgacaagggcgagctggttcctgactccctgaccaacaagatcgtcaaggatcgtctggccaaggaagactgcaagaacggctggatcctcgacggctacccgcgtaacgccgcccaggtcaccgctctcgacgagatgctcgccgacctcgacactccgctcgaccacgtggtggccctcgaagccgcccgtgacgtgctgctggagcgtatgaagaagcgcgccgccgagcagggccgcgctgacgacactccggaggccatcgccaagcgcctggagacctacgagaaggaaaccgctccgctgctcgacatctacgaatcccgtggcctgctcgtcgtggtcaacggcgtcggcgacatcgacgagatcagcggccgtatcatcagccacctcgagtagtaggttcggcagcccggccaacaagccggagtgatgccgaaataccacatcaacgtttccatacccctgtgcgacacgccgagtgttcgtacaggggtatgtgcgtatatagttgacagttggtgtgtcttcggatatgccatagtaatcatccaacggaataggactagaggcacatggcaaaagacggtgtgattgaagtcgaaggacaggtagtggaagcactgcctaacgcgatgttccgcgttgaactcgagaacaagcacatcgtgctcgccacgatttccggcaaaatgcgtaagaactacattcgtattctgccgcaggatcgtgtcgtgctcgaaatgagcccttacgacctgaaccgcggacgcattacgtaccgttacaagtaaaggtacacaagaaaaggataaccatgaaggtcagccctagcgtgaagaggatctgcgaaaactgccgcgtgatccgccgtcacggccgcgtcatggtgatctgcgtcaacccgcgccacaagcagcgtcagggctgagagcagattctccagcggcactaagtaaataaggcactctctcacagtgcttcccgcaagggaacgacactgaaccacgggtacgtaggcccgtgccgggtatccgggcgagcgggtgcaagacctacggcaacaagaaggaatcgcaatggcacgtcttgccggagtcgacatccccaatgagaagcgcatcgagatcgccctcacctacattttcggtgtgggtcgcactcgtgccaaggaaacgcttgccgcgaccggtatcagcccggacatccgcgtcaaggatctcaccgacgagcagctgattacgctgcgtgactacctcgaagccaactacaagatcgagggtgacctgcgtcgtgaagtcgatgcagatattcgtcgcaagattcagatcaactgctaccaaggccagcgtcaccgtaagggacttcctgtgcgcggtcagcgcaccaagaccaatgctcgtacccgcaagggcccgaagcgcacggtcgccggaaagaagaaggccaccaagtagtcggtggcatgattcgggccacgggatgatttcatcccatcgcccgaacgtcaacaacaaagttcgttactaggaaacgagggtcaatggcagcgcctaagcaagccgctcgtaagccccgtcgtcgcgaccgcaagtcggtcccggtcggccaggctcacatcaagtccactttcaacaacacgatcatttcgatcaccgatccgtccggtgccgtggtgtcctgggcgtccggtggtgatgtcggcttcaagggctcccgtaagtccacgccgtacgccgctggtatggctgccgagtccgccgcccgcaaggcgatggaacacggcgtcaagaaggtcgacgtgttcgtcaagggcccgggttccggtcgtgagaccgccatccgttccctgcagtctgcgggcctcgaggttggttccatcaccgacgtcaccccgcaagcccacaacggcgttcgtcctccgaagcgtcgtcgcgtctgagcactcagcaataccaaatccatccaaaaccgcctgaccggtgagtgcaccaccgagttcaagctgaaaggataaccacagtgcttattgcacagcgtccgactcttaccgaggaatctctgaatccgcagcgctcccgcttcaccatcgagccgctcgagcctggcttcggctacacgctcggcaactcgctgcgtcgcacgctgctgagctccatcccgggtgctgccgtgacctccgtgcgtatttccggtgccctgcatgagttcaccactctgccgggcgtccaggaagacgtcaccgagatcctgctgaacatcaagggcatcgtgctcaccagcgaatatgacgagcctgtggtcatgtatctgcgcaagagcggcaagggcgaagccgtggctggggacatcaccccgcctgccggcgtcactattgccaacccggagcagcacatcgctaccctcgccgacgatggcgaactcgagatcgagttcactgtcgagcgtggccgtggctatgttcctgcccagatgaacaagcaggacaacgatgagatcggccgtattccggttgattccatctactccccggtactcaaggtgagctacaaggtcgaggccacccgtgtggaacagcgcacggacttcgacaagctcattctggacgtggagaccaagcccgccatctccccgcgtgacgcggtggcttccgccggttccaccttggtggagctcttcggcctgtgccgtgagctcaacgcccaggctgaaggcgtcgaggtcggtccggccccggtggccgaggagaccaaccccgagatggccgttccgatcgaggacctcaacctgacgcagcgttcttacaactgcctcaagcgcgagggcatccacaccatcggtgagcttgtctcccacaccgagcaggacctgctcgacatccgcaatttcggtatgaagtcaatcgatgaggtcaaggagaagctgcagaccctgggcctgagcctcaagtcctcgccgatggccttcgataccaataatctcgaaggtggtacgttcttctcgccggaagacgagtgatctgcctctttgaccaatcgttcgttcactaggcaggcggatgttcgggcatatgcccacctgcttgcctgaagaacggacatataaggagtaaacccaatgcctacacccaagaagggcccgcgtctggcttccagccccgcacacgagcgcctcatgctggcaaacatggcgaccagcctgttccagaacggccgcatcaccaccacgctgccgaaggccaagcgccttcgtccgctggccgagcgcctgatcaccttcgccaagcgcggtgatctgcactcccgtcgtcgcgtgatgcgcgtcatccgcaacaagtccgtggtgcacatcctgttcacccagattgccgagcagatggagcagcgtgaaggtggctacacccgtatcgtcaagatcgccccgcgcgttggcgatgccgctccggccgctgtgatcgagctcgtcaccgagccggttgccaagaaggctgttgtgaaggaagctgaagccgccgccaaggttgccgaagaagaggctccggccgttgaggctgaggccgctgaggctccggtcgaggagaccgccgccgctgaggctgaggctcccgctgaggaagccgctgacgccgagaaggccgagtgagctgaatagcgtttcgccaagctagctgaaagggctggaatccgtttgggttccagcccttttgcgttgtttcatagaaactacaacgtacgtacggctcgaatggcctcggctcttgcggccagctgatcatcgacggggtatgcgatatgctccaaagtcaggccctgcggcgcaatcggcccgcttgagccttcacgcactggctcggccattttgccggcaaaccattccagagatttgcgtcccgaaccaactttgatgcatgagccgaccaaggagcgcaccatattgcgggcaaaggcgtccgccacaatcgtgaacaccgccagtccggactccagcgacggagtccgatatgcttcatgcgatgccatcgcatccggcaccaggggagtgatcggcacccgccgccaataggcggtcttgacttcgcggatcgtagtgcctcccggattcggagtggcgaaggaaccaaaatcgtgcaggccgatggtcaatgaggctgcgcggttcataagctccagatccagcgattcatccacggtaagcacgcatccacgcaggcgcgggtcgatctcggacgaacgatcggcgacccgatacacataagtgcgctccaatgcggagaacctggcatcgaaaccggccggtgccacggcaatgccatgaatgacgatgtccgaaggcagcacagccttgagtctgcgagtcagcgcctcggtgaccggaatggtcatgtgacctacgcagcgattcagtacctcgtcggatacatccaaatgcgccacttggtgggaggcgtgcacaccggtgtcggtgcgcccagccaccgtcagacgcaacggttcggccgcatcatcggccggcacccgcagcaccttgtgcagcgcatcttcaatggtgccttgcaccgtacgcagattgggctgtttggcccagccatagaatccgccgccgtcgtaggccaagtcaatgcgcagtcgtgtcatagccattcattgtaacgagtgcggtcggcgagatgcgcgcggtcggcgagacgagtgcggtcggcgaagtgacctgcctgtaacattctcgcgcgtttgctgaaacggggccgccttaggttgtaaccatcaaacccggttacggcttgcggcgtcagcgtgcgctcgaaacgcctaaccgcttgaggccacagaagccgccacagcaaggagcaggcacgatgatcgaatccgcagcacgcagactggcccatgaactggtaaaccgtcgcgaggcgatcaaccgcgagctgtcccgcaacggcgtacgcttcggcatctacaagaacggcgaataccatgaccggctcttcccgtacgatcccgtgccgcgcattatcgaatccgacgaatacgacgaattggagaagggcctgaagcagcgcgtcaacgccctgaacgcctatctgaaggacatctactccgacaaggccatcatccatgacggcgtcgtgccggaggaatacgtatacacctcggccggctacttcccgcaggtcaacggcgtgacccctcccggcggcatcttcgcgcacatcgccggcgaagacctggtccagggtgaagatggccgctggtgggtgctggaagacaacctgcgcatcccctcgggcgccagctacccgctgttcgtgcgcgacatcgagcgccgcatctccccgcgcctgttccgcgacgtgcacatccgcgacaatcgcgaatacccgcgcctactgcgcaaggccatggactttgtgtccactgagggcatcgccgtggtactgacccccggccgctacaattccgcgttcttcgagcacgcctatctggcggagaaaaccggcgccgcactggccttccccgaagacctcgaagtggtggacaacaaggtctacttcctcgactacgccggcaaacgccaccgtgtgggcgtggtctaccgccgtctgtccgacgaattcctcgatccgtttgccttcaatcctgattcggtgatcggtgtgcccggtatcctgtccgcctaccgcgcgggcaacgtggccatcgtcaacgcgccgggcaacggcgcggccgatgacaaggccatctactacttcgtgccgcagatgatcaagtactatctcggcgaggaaccgattctcaacaacgcgcccacgtatatgccgatgttcgaggccgaccgtaaggaagtcctgaatcgtatgggcgagctggtcatcaaggatgtggccgaagccggtggttacggcgtggtgttcggttcgtcgctggatgctgccgcacgtgaggagcttgccaaccggatcaaggaggagcctcgtcgattcatcgcccaagaggtgattcagttccgcgatatcgatgtggtggacccgaagaccggtgagatgtcgccgcgcaaatgcgatttgcgtgcctttgtggtcaccggcaaaaacacgcacgtgtggtattcgggcttgactcgatactcgtcggtgcccggccagatgatcgtcaactcgtcgcagggtggcggattcaaggatacgtgggtgttggcacccgaatccggcgtggagcatgaatacggtgctgaagtgcaggtggcgaacctgctgagccagtcccgccgccactcgttgtctctggtcaccgcctccaaggcagacaacctgtattggctgggtcggtacaccgagcgcgccttcaccacgctgaaccagttcttcccgttctacgatcgtgtgatggacaccgatgtggacgccttccgtccgttcgctcacgcactcgacctgcccgaagatttcgaggacttcgacgggttcgtgaacagcttcctgtacgacgggtccaaccctgattcggtgcggtcggccgtaacctccgcattcaacaacgccgtgattctgcgcccggaattgagctcgcgtctgttgcagtacgtggagttggcgatgaccaatatcaccgatgccgccaaatacgcggccgccgccgaggacatctacaagcagcgcgatattaccgatgacatgctcgccttctggggcggcatcgagaattcgccggtcgaccccacgctgaaggcgttcatcttcatcggcaagtatcttgagcgcatcgacctgtacacgcgcttcggcctgacgatggaggagatggaagccccgcttaggaagctcgcctcctactcgatgatcctcgacggcatgccgttgcctagttgcttcgccgatgggctgagctggctggtcggtcagctgccgtctcgcgggtatcaggaagtcgccgacctgctgaagaagtaccttgacgattattccggccgtgtcagcgccctggccatcaaagacatgggctcactgagctccatgaacatggatgccagcgcccctaacccgacgttcgccctgacgggttcaaatgctatggtggtatggcgaaaaaccgtgcgcccgagtgccggccgatgcgtatcggcgaattgccggaatatatgcgtggactgtgagcgcgcggaccatacctcagccatggctgtagtgtcgttatcccgagaatgtgccggttgccggttcgtgtgtaagtgcaggagacgttgtgaaaaaactcgtgttcgactatgagatgaagctgtccttcagcgcaccggtcaccgatcacaggttccagcttcgctgtattcccgccactggccctcgccaacaggtgattgacgtggaagtgaagattcagcccgaaaccgaactcgaaaccaccatcgactcctttggctccgtggtgatgaccggattcatccccgagccgcacgacatattcagctattcggtgaccggcatcgccttcgtggacaatgcgcatatccataaggaagcctataaaccgctgtaccgattcaattcagcgctcaccattcccggcccgaacgtggaggcgatgatcgacgtatgccgcgaacgcttggctgcgttgcctgccgacgccactccggtgcagcaggccgccgaagtgatggatgaggtctacaaggcgtttgtgtatacgcccggttccaccacgattcgcaccaccgccgaacaggccttggcccagcgcaagggcgtatgccaggattatgcccatgtaatgctgtccgtgtgccggcatgtgggattgaccgcgcgctacattgccggtttgcttgggggagagggcgcgacccacgcttgggtcgaggtgtatcaggatggccgatgggtcggactggatcccacgcataaccgattggtggacgacagctacatcaccatcgcccacggccgcgattaccgcgactgcatgctcgacatcggcatcttctccggctacaacgtccagcagacccaatgggtcaatgcctccgtccacgaacaggtggcgtaaaggacgagatccaagctccctctgatgagctgagccgtgaagaaaactccggaggcgtttttaggcgaaggcgaacgacggtgagcaaataaaatggcagctggaaagctgtccttaaattgcgttcgagctgtcgagcgtagcgagactgagagagaccgctcaatgcagagtggccccgtcaccgcttctaccaccaccaatattcgggttttcgtcgttgcaacattcggattttggtagttgagaaattcggattattgtagttagaaagttcgggttttcgtcgttgcaacattcggattttggtagttgagaaattcggattattgcgatggcggacgtgaaataacgggaggtgcgcggaatggccgattctctggcgagcgacatcaagccgaaagcctatcgccctcgtatcgtggatgcacagatcgaacgatatatgcgcatctttggcgcggtggagattaccggcaccaagtggtgcgggaaaacttggtctgcgcgggcccatgcagccagcattacctatgtggatcgcaataacaatttggctgcggctaaggcggatccgtcattgatgctgctgggagataggcctcatatcgtggatgagtggcaactcgctccagctatatgggatgaagtccgtcatcgcgtcgacgatgattccgcgaataaaggtcagtggattctgaccggttcatccactcctctcaatgagaatcggccgaaccatagtggtgcgggacgaatcggacgtatccgtatgaatcctctgactttatatgagtccggactctcgacaggtgcggtaagtctcagtggactgtttgaacataagttcgccgctgcaaaatcagagataagtacacaaatgttgttggatgccgtatgccgaggtggatggccggaggcggtggctctgcctgtatctgacgcacagattctgattcgggaatacatgcgactcacgctgactgagagtgtgcccaggcaaggcaaggatcctgatgtggctcgtcgtctgctggattcgcttgcgcgcaatatcagtcaagctgtgacattcaaaaccttacgtaaggatatgtacggtactgaagaaaaccttgacgatttcatttcggagagaacggtatccgggtatacggccatgttcgagaacatgttcgtcatcgatccgataaagggctgggtcccgccggcacgggatccaaagcgactccagaccaaggcgcgtcggtattttgccgatccttccattgcggccgcaatgttgggcatgagtcctgctgctcttatcggcgattggcagacttttgggtttctgtttgagaatctatgcatccgtgatctgttggtgtatgcgagatctctcctcgatattgggatagaaccggttcggtattatcgtgacgattccggtctggagtgtgatgccattattgaattgtccgatggacggtggggcggcatcgaaattaagtccagtgaggataaagtccctgaggcatcggcaaatctatgcagactgaaagataagctgctgagaaatccgagtgcgcgaacccgtgaaccggagttcttggcggtgttggtgggggtcggcgagttcgcgtatcaacgcgatgatggagtgtatgtaattcctgtcggagtgcttggcgcgtaaacgcaatgccagcgcttcgggcgaattccgggattgtgatctgacatgtctcaagcggcatacactcgagacttgctcagcgaaactccgatttgccaggtcggcagaatgtggcataatgaacaagttgccattttggcagcatggataagtgtccgagcggtctaaggagcacgcctcgaaagcgtgtgaggtgaaagcctccgcgagttcgaatctcgccttatccgcctttagggttccggggtttgtcccggaaccctttttgtttttgatgcgaacgtccgtattcggggttataggccaaaatgtatgtccggcggtctagtcgttcgactgccattcgaccctggtgtggaactcgttccagtcgatgccggtgccgtgtctcatgggaatgccgaacgtctcgtgcatgctctgcgggcttctctcccatgcccgccggtagaggcgctcgagtcgttcgtcggtcatcgcgttggccgcgagccacgcgtcgctttcg

SEQ ID NO: 1118 - DNA, 7307 bp, Unknown
  R81_24m  MAG No. k141_2621
ccggcatggtcgccaccccgcaatccgctcaggacgcagccaacgcgattcgcgatgatttgaagaccacgttcggtcaaaaggtgtcggacagcgtacgcattctgtacggcggctccgtcacctcaaagaacgcggcagaactcatctcccagcctgatgtggacgggttcctcatcggcggcgctgccttggatgtcgaggaattgtccaaaatcgcccgtcttgcgctgaaaacaacatcttcacggtcgtaatacactggttttccgatatgtgcgctatgcttatcaacagtagattcaactcggaggtaccctgtgaccgctcttaagatcacgctgcaagtcatcgtcgtgctgctcagcttcgtgctgaccctgctcatccttatgcacaagggcaagggcggcggtttgtccgacatgttcggcggcggtctgacccagaacgccggtacttccggtgtcgccgaaaagaacctgaaccgttggaccgttatcatcgctctggtgtgggtggcattgatcatcggcctcgacatgatgaccaagttcaacctcggctgatcggcttgcacgccatatagacttgtcgctcgcgacccatgaccgttaccgtcggtcatgggtcgtatgcgttctatcgagtattacgaaaggacatcaccatggtcactatgaaccgcaacaaagtcgttatcgtcggcactggccaggtcggtgccaccgccgccttcggcatcgtcacgcacggcctgtgcaatgagctcgtgctcatcgaccgctccgccgccaaagccctgggggaggcccgcgacctcgatgacggcagcgaattccaggaccgccacgtcaaggtgcgcgccggcgactacgccgactgcaaggacgcggacatcgtcgtcatcaccgtgggccgcaagccgccggccaactccaaccgcatggccgaactcggcttcaccgtgggccttgtgggcgaagtggtcgacaacgtcatggcctccggcttcgacggcgtgatcgtcatggtctccaacccagtcgatgtgatggcctggtatgcctggaaacgttccggcctgccgcgcacccaggtgctgggcaccggcaccgcgctcgacacctcgcgtctcaagaccatcatcggcgaagagaccggccttgacccgcgtaacgtgggcggcttcgtgatgggcgagcacggcgactcccagttcaccgcatggtccaccgtctcgctcggcggcaagccattcgcccgcttcctggccgacaaccaagaccgtttcgcctccgtgtccaccaccgaaatcgaagagaagacccgcacccgtggcgatgagatcgtcgcggccaagggcggtaccaacttcggcatcgcctccaccgtggccggcatcgtgcagaccatcctgtgggacgaacgccgcatcgtacccgtctccaccctgctgaacggcgaatacggcgaacatgacgtgttcctcggcgtccccactgaactgcgcgccaatggtgccaacgagatcgtcgaactcgatctgagcgaggacgagcaggccaaattgcaccattccgccgaactcgtgcgtgaacactgcgaggggctgctgtgattctcgacgccatcacaccgaaacaaccccgactgctggtcgccgacctcgacggtacgttgctgcacgacgccgaggtattcgaggaccggttcatcacccagcgcagcatcgacaccatcaaccgcgcgcacgatgccggactgaaattcgccatcgccaccgcgcggccggtgagtaccggcctccagttcgccgaaaaactgccggtggacgccgtaatctatctgaacggtgccctcatcgatttcgacccggcccactccgacttcgacctgctcacctcaggtgccacgccggccgatgagaaccatttgatcaagattggcttctcctcacggcgtgcctgcgaagtctgtctgttcctgctcgatcgcatgcccggcctgaagctcggcatcgtgatgaacgacgtgcgctacaccaacttcgatgtgcgcgtgtattggaaaacacaggccttccaatacacgaacttccacgacgtgcccgaaggcgtggcggataagatcaccatcttccccgagcctgaacagtggaacgagctgcgtgcgctgattccgccggacttcgacatctccattagcgaaggcgtgatgtggatgctcatgaacccgcaggccaacaaggagcacgcgctgcacctgctgtgcgaacgactggacgtgccgctcgaacagaccgccgccttcggcgacgacctcatcgatatcaacatgatgagcgaatccggccggggtgtggccgtggccaacgcgaaccccaaggtgttgtctatcgccgacgagatctgcccgcccaacaacgaggacggcgtcgcccaatggattgaagcgcagttgggctgaaccggccgagactcgagaacacgccaaaattgaacttgtgttgaaccgggagtatgctttgaactgttgttcaaaagataaattgaactcccggttggaggcataaggatatgagcgtatcggtgtttgcggaacgtctgcgcaatgcgatgaacagtaggggattgaagcaggtcgatttggtgcacgccgccgaacatcgtggcgtaaagatgggcaagagccatatcagccaatacgtggccggcaagaccatgccccgcgaagacgtgctcgaattcctggccagcgaactggacgtcgacgcgaactggctgcgcggcgaggaatccaccccgcaattgaactcggacgcttccaacagcgtcacggacggcgaacacgccgccacgccgcttgccacgggcaccgccaagcccctgacggacagcgagattcccgtgggccgccgccgtaccttcggcaaatcgcacaagctcgacaacgtgctctacgacgtgcgcggcccggtcgccgacgaggcgatgcgcatggaggccaacggcacccacatcctgaaattgaacatcggcaatccagcacccttcggcttccgcacgccggacgaagtcgtctatgacatggcccaccagctcaccgacaccgaaggctactcgccgtccaagggcctgttctccgcgcgcaaggccatcatgcagtacgcgcagctgaagaacatcccgaacgtcaccatcgacgacatctacaccggcaacggcgtcagcgagctcatcaacctgtccatgtccgcgctgctcgacaccggcgacgaagtgctcgtgccctccccggactacccgctgtggaccgcctgcgtgaacctggccggcggcaccgccgtgcactacctgtgcgacgaacagtccgaatggtatccggacatcgatgacatccgctccaagatcaccagcaacaccaaggcgattgtcatcatcaacccgaacaaccccaccggcgcactttacccaaaggaagtgctccagcagatcgtcgacatcgcgcgtgaacaccagctcatcatcttctccgacgaaatctacgatcgcctcgtcatggacggcctgcagcacatctccatcgcctcgatggccccggacctgttctgcgtgaccttctccggcctgtcgaaatcgcacatgatcgccggctaccgcatcggctggatgatcctgtccggcaacaagcgtatcgccaaggactacatcgagggcctcaacatgctcgccaacatgcgcatgtgctcgaacgtgcccgcccagtccgtggtgcagaccgcgctcggcggccaccagagcgtcaacgactacatcgtgccgggcggccgcgtgcacgaccagcgtgacctcgtttacgacatgctcaaccagattcccggcatcaccgccgtcaagccgaaggccgcgttctacatcttcccgaagatcgacgtcaaacgcttcaacatccactcggacgagcagttcgcgctcgacctgctgcatgacaagcacatcctcatcagccacggcggcgcgttcaactggcatcgccccgaccacttccgcgtggtgtacctgccgcgcatgggcatgctgcacgaaaccatgggggagctcgccgacttcttcagctactactggcagagctgatccttggtacaggcgaacacgatcgatgccgggctgggcaccaaaccggtgccccgtctggccctgaccatgtcggtccccaccatcgtggcgcaggcggcgaacgcctcgtacacgatcatcgaccgactgttcatcgggcacatccccgaagtgggcaacgcggcgatgaccggcgtgggcatctgcttcccgattctgccggccgtcgccgccttcgcctcgctgatcggcgcaggcggcgcgccgcgcgcctccattgaacttgggcgcggcaacttcaagaaagccgaacgcatcctcggcaccagcgccgcgttcctcatcgccatagccctgaccctcaccgtgctgctgcagttggcgaaaccactgtggccatggtctccgtactcatcggcaccggcatatccatccttcttgaccccgtgttcattttcgtgttcggatggggcgtcaggggagcggccgccgcgaacgtgctcgccacattccccggcttcttcgcctcatggttcacctcggaacagacggtcatcgacatcgtgacccgcatgatgccgattttcgtctgcggctggggtatcttcggcatccagatgggcgcgcaatgcgcactcgtcggcatgggccaggccaaacagtcggtgttcttggccatcttccgcaagatcatcctgctcgtgccgctcgcgctgctgctgccgcactggatcggcgtcaacggcatcttcatcgccgaacccatctccgacgccacctccggcatcgtggccggcttcctgttctatgccacctaccgcaagattcggcgagatatggtctagactcctgattcaatggatgtgccgtctcatgcgttgcgaaacacgggacggatagaatgcctcgcaaaacgggtgcccgttgtttcgtgatatgaaggagattttatgccggtggtgtcgcgtcgtgcgcagccaacgtgatggccataatcgccgaaagcagggagaacaatggcagcacgcacaacacgacggtcagcagtcccaaagcttcacggccgatgcaataagcgacaagacctgcattgtcagttaccgatagcgctgggcagaaatcggtgtgtctaccagtgttgtagctgtaggtaaagaacgtgagacctgaccagaacagggcaacgggaacagagccgatggcgcgaaaagccctgtactcccgcaacggtcagacagagaatcgcgacaacactcagcgcagtcaccgtcataaaccacagtggtgaggtgacgcagactccataatcgtcagttgcttggcccgagagatagtaggtcattctgccaatcgccggacagttcggatgcagcatcatgccgccccaaatgcgctcatatagtggtgtatagtggtgcgaacgatacaccggcaccgctgagcgtcgcaacaaccgccatcaccgaccgaccgccagactccggcacagaccgggaagaactaccgtcgcggagcatcggcgataccaatggcaacaccgaggatagccgggaccacccagccgagctggtattgctgcaagggcagcatggccagcgtcgtgtccagccagccgatggagccgccgaagacggtgatcaggctggagatgcaggtggcgaaggagtcgatgcccaccagcagcacggtccagaagtagacatgcgggaatcgcgcgccgagcgacttgtgggtcagcgccagcagcaccagcacgatggcgatcggatacagtgcggacaacaccggcacggaaaccttgatgatcgcacttagcccggcgttggacacgatgaaactgaacacggtgaagatgacctgccaggtgcggtagctcaacgttctccctgcaacggtctggaaccgagtgtggaagtaggtggcgcaggtaccgatcagtccggtgcatacgttgaggcaggcgatgacgaagacgataccgaggaacgcggtaccgaacgcgccgaacagggacgaggtgagattggtgagcacggtcgcgcccgtgtctttggcgggatcgatggtggcgatggcgccggacaccacgcccacgtagctcagtgcgccgtagatcacgatcagcagcacaccggtgccgagtccggcatacgcggtctccttctgcacttgcgattcgtcatcgacctgctgggtgcggatattcgcggaaatcacgatgccgaaatagagtgcggcgagcagatccatggtctggtagccgtcgaggaagccacgtgcaatctggtttgtggagtagtcgcccatcggtttggccggggtaccgataccgtggattaggcaggcgatgaacaggacggcaatcagcaccagcagcaacggtcccatgaatcggccgagcactttggagagtttttcgggatgctgggcgaacaggaacgccagtgtgaagaacacgagcgagtagatgagttgggccagccagccgtaggaggacggcacgaaaggcgccaccatcatttcgaacgaggtggtcgccgtacgcggaatcgcaaagcaggggccgatggtgagcatgatcgccaagccgaggaacagggcgaatttgggggagacccggccggcgagtttgtcgaagccaccggcgaaggtgaccgccagcacgccgagaatcggcaggccgaccgcggagacgatgaagccgatggccgccggtatggtcgcggaaccggcctgagctccgacaaacggcgggaagatcaggttgcccgctccgaagaacatcgaaaagaaggtaaaggtcatcaccagccgctggcgtgcgacaagtttgttcattacggttcggcctttctctcatgtgctcgtactactgtagcaacaaacgtaagaagccccgaccggttggggtcggagcttctgtgagctaatcagttaatgcgcgaaatgcgcatcagctaataatctcaggcgttcacgcggtcgatgccggactggacgtcagccagcacggaatcccaggacttgatgaaggcggcgacaccgtcggcctccagcttgtcagtgacgtccttgaggttgatacccagctcagccagcttgttgatgacggcgtgggactcctcgtaggtgccctcgatggacggagcgccgttgccgtggtcggccagagcgttcagggtcttctcc

SEQ ID NO: 1119 - DNA, 23515 bp, Unknown
  R81_24m  MAG No. k141_2647
gcaccaacggccacatcctgccggtcccgaacatgaacatcatgaacggtggcgctcacgctgacttcgccaccgacattcaggagtacatgatctccccgtacggcttcgacacctactccgaggctctgcgcgctggcgttgaggtttaccacaccctgaagaacgttctgaagaaggaaggcctgaacaccggcctcggcgacgagggtggcttcgccccgaagatgaagtccaacgaggactccctcaagtacatcatggacgccatctccgccgccggctacgagcctggcaagcagatcggcatctgcctggatgtcgcctcctccgagttctacaacaaggagaccggcaagtaccgcttcgacggcgaagagcgcgactccgcctacatgctcgactactacgagaacctcatcaacgagtacccgatcgtctccatcgaggacccgttcaatgaggaaggctgggaagactgggctgccatcaccgctcgcctcggcgatcgtctgcagttcgtcggcgacgacctgctggtcaccaacccggctcgtctgcagaaggccatcgacctcggtgccgccaactccctgctggtcaagctgaaccagatcggttccgtcaccgagaccctcgacgccatcgagctggccaccgccaacggctacacctccatggtttcccaccgctccggcgagactccggacaccaccatctccgacctggctgttgccaagaacacccgccagatcaagaccggtgccccggcccgtggcgagcgcgttgccaagtacaaccgcctgctcgagatcgaggaggagctcggctccaccgctcagtacgccggctacagcgccttcaaggcctgcaagaagtacttggccaagtgagctgaaacgcccgtaaaggcgtgagtttccactgaagctcgatacccgtcgtgttcgtcaagtcgaatgcggcgggtattttcatgtgacatgagcaagtcgtcccgtaccggcaaacctggcaaaaccggcaaagcacaagtcaggaaaaaagggtcggcggggcccatagcgttcttcgtctccctgttcatcatcgcactcggcaccatccagctggtctccaccttccacacttatgccctgaacctggccgagctcaatggcctcaagcgtgaggaagcctcgctgatcgcccaaaagcaggagttggagaacgatatcaagcgttgggatgacaaggcctacatcaccgcccaggcccgtgaacgcctcggcttcgtattccccggcgaacaggccgtgcgtgtgctgcatcccgaagccgtgaccggctccgatcgcgaatcccagaaaacggaagattccaataccagcaacaaaaaagtcctgccatggtacagcgaactgtcttactcgctcaaaaaggccgatgagcctgtgaccgatagcgagtccggcaaatccgatacttccggttcctctgactcgtcatccaacgactcatccaagcggtccgataagtcagaccagaacacccaatccgatcagaacacccagcaaaacacaggggagggaacccaacagtgaccatcgatatcgccgccaaggccaaggcccttgtcgacaccatgcttgccgagcccgccaacgaccatgacatcgaccaggtgcagcgtcagctcggccgatacccgcgcggcatggtcgccgtgggggcgcgatgcgtctgcggtaggccacttgccgtaatcacccgtccggtgttgcccggcggaattcctttccccaccacgtgctatctgaccggtccggaagccgtcaaggccgcctcccatgtcgaggccgccggcgtgatgcagcaatacaacgatatgctggccgctgatgaggagctcaaggccgcatatgagcaggcccataatctgtatctggcattccgtcacgaactggcaggccgtcttggcgacagtgaggagcatattgaaggcacttcggccggtggcatgccggtgcgcgtcaagtgcctgcatgccctgctggcccagtccttggttatggggccgggcgtcaaccccattggcgatttggtgctggaacgcgtcaaagacgagttcgatccgaccgtctgccgttgcacactggacgattgatcaacagatgagccaccgcgaacagcccattcatacgcactaagggatacgaggagaaggcaatgagcaagaaatccgtaaccgtcgccggcattgattgcggcacgaactccattcgactgaagatcgcacgtgtcgatgccgatggcatgcatgaggtggtgccgcgcatcctgcgtgtgatccgccttggtcaggatgtggacaagacccatcgttttgccgacgaagcgttggaacgcgcctatgtggccgctcgggaattcgccggtgtgattgccgagcatcccatcgacggcctgcgtttcgttgccacctccgccactcgtgacgcggaaaaccgtgaggagttcgaggacgagatcgaacgtatcctcggcgtgcgccccgaagtcattcccggcactgaagaagccgacctgagcttcctcggtgccacttccgtggtcaatcgcgacgatctgcccgccccctatctggtggttgatctcggcggcgggtccaccgagctggtcatcggtggcgacggcgtcagtgcgcccaccacccaggttcagggcgcattctccatgaacatcggttccgtgcgcatgaccgaacgtcatctgaccaacgatccgccgacccaggcgcagatcgatgaggccgttgcggacatcgacgagcatatcgatgaggccttccgcaccgtggacgcaggcaaggcccgtaccatcatcggtgtgtccggcacggtgaccacgatgaccgccttggctatgggattgaaagaatacgatcacaccgtggtcgacgggcatcggttgagccttgaagacgcctatgccgtggacgacaagttccttaggatgacgcgcgccgagcgccgcgaatacaagaccatccaccccggccgtatcgatgtggtcggcggcggcgctgtggtctggagccgtgtgctggcgcgtgtcagcgaagccgccaaggccgatcatggtgaagccatcgattcgttcgtcgccagcgaacacgggctgctggacggcattgtgctcgattatggtcgccggttgctggctcaatagcgtaagtggtaagtgcctccagcgggctgagccgttaagcaaacagcccggtgggctgtttgcgttatatgcgacgccggcgacgctatcgctaccggctgctacaaacagcccactgggctgtttgtaggcgaagggagcggctatgccgcgacggctgcacgaagcgcagcaacccgcaagcaatgctcagggcaggagatagcttataatagaaaagttggcctccgtggcgaaatggtatacgcagtcgacttaaaatcgatcgcttcggcttgtgggttcgagtcccaccggaggcaccttgaaatcggcctgtggccgatgccgttttttgcggctgtgccgcggtctctcccccagtcggcttcgccgacagctcccctcgtcagaggggcacgcagcttactatgtggagagcttataaggccgaaacaaaaggccgttaggctatgtggcgttgtgacgatgtacctgatgaaacgaggaatccacatggcttcacgctggaccgatgtcgaacgagtcgaacaaggcgcactgcccaccatgcttgcccaagccgtcattgcgggcactgcactcaccgttggtgccatcgcctgctcgggattctatctgtccatgatcggcaatgtggccgcactcctgccgtgggcgactatcgtgatactgatcgccgtggcgttcacctacatcgtcggcttcgccctgttgtggtgtgccgaagccctgaccctgcgtgccaacgacaaactcaagccatggctgtacggcgtcgtcggattaatcggctacggcgtgtggggcatgttcgtgatgagcgcgatgatgaacacgctgaaccagccgctgaacggcgtggtgttgtcgaacagcgatgtgatggccctgaccgtcaactacgcggtgttcggcttcatcgccttcctgttggcacaggcgtacgcgcccaaaatcgccaccaagaagggactgaccatcggactgatggtggtgcagatcgtattggccatcatcggtatcatcgtactggttatgatgttctccgcactatctcactgactgacttatcgctcgccggcacgacgcgcgcggccatcatcgcgcaaagcgaaagattccgggcgctaggctggaatacgatatcgtgatggcatgacgcctggtgacaccggcatgccgaaccagcaggggagaaggagccaaatgttcagtgtgcttgacatgttcaccatcggcgtcggaccttcatcctcgcacaccgtaggcccgatggtcgcggcacatgcctttgcctcctcgttgctggccgaccatttggtcgatcgcaccgcacgtgtcaaaatcacgctttacggttctctggcgctgaccggtctcggccacggcaccgatcgtgctgcgatggccgggctcgaaggcaatctgccggccaccgtggataccgaccacatgatgcgcatccgcgagacctgcgcgttggacgatactctgaacctcgccggcctcaaacgcatccatttcgactacgaccgcgacgtggtgttcgaacaatggaagcgcatggccgcgcaccccaatggcatgcgattccaggctttcgacgccgccgcaagcttggtcgacgaacaggtctggtattccatcggcggcggattcgtgcgcaaaggcgctcccgaagacccgatgatcggcattcatgaacgtcctccggaaggcacctcctttgccgacgcggacgaatcatcatccactgatttcggcgtcgaggcaccctacccgttctcatcatgcgccgaactggtgtcgttgtgccgggaacatcatctcagcatcgccgaacttgtatgggccaacgaaaccgcttcacgctcaggcatccaggtccgatccgatattgatgccatctggcgtgttatgcgcgcctgcgtggaccacggatgcacctcggcggagcccacattgcccggtggccttgacgtaccccgccgcgcgccgaagatgtatcggcgtctcgcttcgaattccgatgtgctgcgccgcgacagccggcgcaaagacgccgtgctcgagtcttccgacgccgcatgggtggatctcttcgccttggccgtctctgaggagaatgccggaggcgggcgcatcgtaaccgctccgaccaacggttccgccggcatcattcccgccgtgcttcactattactggcatttcgtggacaacgccaatgaacagggcgtggtcacgtttctgctgaccgccggtgccatcggatacctgttcaaacgcaacgcctcaatttccggtgcggaagtcggttgccagggcgaagtcggctcggcctgttcgatggcggcggccggacttgccgcagtcatgggcggcacgccggaacaggtggagaatgctgctgagatcggcatcgaacacaacttgggcctgacttgcgatccggtgggcggactggtgcagattccatgcatcgaacgcaacgccatggccgccaacaccgccatcaacgccgtgcgtatggccatgctcggcgacggctcacacatcgtgaccctcgatcaggccatcgaaaccatgaagcagaccggtgaagacatgatggccaaatacaaggagacctccaagggcgggcttgccgtcaatgtcgtcgaatgctgattgacatgtctggtattcaccagcatgatgaccggaatcgacgtatacggccagcgtgtcgtatcgcacagggatgaaggactaccgccgattcgccgatggtgctaaggtagggcgcattgtgtctttgaaggaggactaatggcagatcagatgcctcaggtgaacgccgaattcggcaccacgcccgttatcgagttcccggcgcccgaagccccgaagggcctcaaggttgtggagctgaccgagggcgacggcccgatcgtgcgtcgcggcgacaccgtcaccgtgaactaccacggcgtggtgtggggtaaggacaccccattcgactccagcttcgaccgtcatcagcccgccagcttcggcatcggcgtgggacaggtcatcaagggctgggaccagaccgtgccgggtcataacgtgggctcgcgtctggtggtttccattccgccggaatacggctacggttcccgcggcatcccgcaggccggcatcggcggcgaggacacgctggtgttcgtcatcgacatcatttccacccgctgaccataggtcagcacatgacgaacgccggggtcatagccggcgttttgtcataaataacgaaaattgtttcagcatcgacaacggttcaggaggacgatatggctgaggacaaggtctacctgctgacgcaggaagcatacaacaagatgaaggaagagctcgcccatcgtgaaggcgagctgcgtgaggaaatcgcgcacaagatcgccgtggcgcgtgccgagggcgacttgtccgagaacggcggctaccaggccgcccgtgaggcgcagagcaagaacgagggccgcatcaccgagctcaccgtcaagctgcgcgattccaagatcatcgagaatgccccggaaggcaccgtgggcgagggctctgtggtgaccatcgagctcaacggcaatgagatgacctacgtgctcggcagccgtgacatcgtggccggcaccgactacgacatcatgaccccggattccccgattggcaaggccatcgaaggtgccaaggtgggcgacgtcgtttcctacaccgcaccgaacggccgcgagctgtccgtgacggtcaaggccgccaagccgctggcctgagttataagtgactagtatgcccccgtaggcgggggcatacttatatgtcgtagcgtttattgccacagcgagacgatcaccatgtagatggccaccatatggcaggcatatccggccaccgttccgcagtggaaaatctcatggaagccgaagacgcgaggccaagggtcgggcttgcgcaaggcgtagacgatggcgccgaggatgtagcaggcaccgccggcgcacagcagcaccaccacggctggccccgcatacggcgaattccagaacatcaccatataagccaggccgtagatgccgaagatgatgtacaccaccgtatacagccagcgtggtgcattgatccagatcacatgaatcacgatggcgatggccgtgcacgcccacatcgatatgatgatcacattgcgccagaacggttccagcgcaaacgagaccggggtatacgtgccggcaatgagcaggaagatgttgacatgatcgatacgccgcagcacatcggtgacgcgcgggctccaatcgcccagatggtagcaggccgaattggtgaacagaatcagcgacgctgtcatgaacacggcacacgcccacttcagactcgcgccatgtgccaggcatataagcacgatgcctgccgccaatgacaggggagcggcaatcgcgtgaatccagccgcgcatcaacggctttggtcgtccgtgcacgtcgagacgaatcttgcgttccacttccgcaggggcaatgccctcgattttcagcgcacggtgctccgctttggcgagcttgtgccgggccttctcctcggctttggctcgaatggcctcggccttgaactgggccttggcccgtacggcatcagccttggcctgcaacgcctgttcgcgcgcctcgatagccgcctgacgcttggatgcgatggtggcatcctctgcaatcgtcgcgctgttatgagcgtcgtgatgcatcgtcttttccgcgtcgtcggttgttgatgccatggtgatgcccccgtttcacgagttgacgatacgcttcttacgctgccgtaacctacgttagcgtaacttttatgcttgtcaataccgactcacacgaacactatcacccaatggtggcgatactatggaatccgaagatgagaacgtcacagcaataaggggttcggtgatggtgtattgcacggagtgtgggtttgccaacgagcaaggaaatgccttctgttcgcagtgcggaagcccattggagcagcccgaggccaatccggcggcccctgcctatgatgataacgcgctgacgctggtgaagcagccggcggcgccgttgcccgccgtcgcgccgccaacggcgccgggttccgcggtgccggggcctatggcaccgggacccatgaccgctggccctgcggcacctgcttctcctgaacctcccgccgggcgtcctggcggcgatcacaccaaagcggtggtgattgtgctcatcgcgctgatttgcgtcgtggcgttggtcatcggcttgttcgtcacccatagcatgggattgtggggagctcagccgcaggcgcaaacatcggtacagtcgaccgggtccgatgcgtcggattccgccgatgatggcacgacggattcctctgacgccaagtccaaggccaagaagaacacgtctgatagcgccaaagacaagaacagcgacgattcgtccaagaaaagctcgacggagaagtcgaagccttccactccggtgatcacatccagccagttgtctgacatcgcggattcatactcgtcctccgatgtggccgtctccgccatggtcatcgatggaacatacgccgattcctcagaggacgccaccatcgcgaccacgtcgcagtccggcaagcaattcgtggctgccggtctctatctgccggtctatcttgcggcccaggacaatggcgatgacaacgccaaagcgcaggcaaacgcgatgatgggttccatggacaacaatgccggcaatatggcggccgcggcggtaggtggctggagcggcgtcaattcgtgggcatcttcgcatgggtataagggcgcttcgttcaaccgcgatttcggcgatgtggcggccagcaatgccggttatgagaattacggttcctcccgcgatgcggcccgcatgctcgccgcagtggacgccaagggaggcgcgtcattgatgaacgtggacattgcttccgaaggcgtaaccattccgtccgacatgatcgtgcatgcccaccgaggccaaggcatccaggacacctggaattacttcgccatcgtcgaagccaatggtcataaggccgccgtggccgttgtcacccaatatcaggggcagtcggtggccgcggacctgatgagccgggtgctggccagtgttgacaagacattggggcagtgacggtggctcggcataccaagcatagtagcgacacgcgtgcaacaggcagcgtcgtgggattgatcctgatcgccgccctgatcgccgctttggtaatcggcgtcggtggatggatgtacgcgcataacggtctcggcgcatcgcacgccaaaacatcgcccgtcgcctcggcatcggactcaccggcaacagcgtcggcatcgtcgtcaacggcgtcatcgaaacacgaacaacgccctgtgcatgacaccttggagcgcaaggcggcacctgctcccgacctgaccacggtggcggaagagaagcggatgtcagatgtgtcctcggcggtcacggcagctgtggccggcaatggaggcacctggtcggtgtatgtcgaggatctggccacgggcaaaaccgtgagcgtcggcggccagcccatggtggcggcttcggatatcaaactgtacgtgatgcttgccgtgtacgataagcaacatgccggcaccttggccgcgggcgggcaagataccacctcgctgatcaaccagatgatcaccgtcagctcgaacgctgccaccaatcagctggtattgatggtcggcgatggcgacatggccacaggcatgcaacgggtgactggtacggccgcccgatacggcttcagctcatccaagcagttgcgggtgttgtccgatgccggcacagacgggaccggcaccgagaactggacgtcggcttccgattgcggcagattcctcgctgcattgtaccgaggcaaactggtttccgccgaagccagccgctccatgcttgacgtattgctcgggcagacgcgacgcgccaaaatacccgccggagtaccgtctggcattcaggtggccaataaaaccggtgaactggccggcgtggaaaatgatgccgccgtggtgtggggcaaggccgcggacggaacagaacgggattatgtgatggtggttatgacctcgggagtggtctcgggaaccgcgcagcagcagatcgccgcattgtcctctcaggtgtatgaggcgatgaccgcctgaacggcgggcagccgtgcaacgcgattggtgcggtattgaagatgcgatgtcgtaatagtcgtcatacttgcccgtgtggcttgccgcaatggcggcgacgtgtctgcgtatgataggggcatggctgatttttcacacatccttgcaacgcgccccgacttcgacgacgaggaccgcgagtggctgcatcatctcgttgccgattggcaggtgatcgccgatctgagctttgccgacctgctgctgctggtacagaacggtgacggcaaatacgtggtggccgaacaatgccgcccatccaccgtgatgacgctacgggcggaagacgtggtgggaaacgtcatgccggatgacatggtcggcgaattggacgccgccatgctctccagcgtggtgttccgctccacggtattgagaaccgtgggcaaggcgaccgtctgcaacgtgtacgcgccggttcggcacaatggcaagaccttgggcttggtcgtgcgtgagaccaatatggccacacgagaatccaacggtcgatatgagtcggaaagcattaacgcgggcaaacagctgtacgagatgattccgcgaggccagttcccctacaaggattcggtgatgagccagcgccatatcgctcgcgtggcggacggcttcatcatcctgaccatggacggcgtggttcgatacgcagccccgaacgccatcagctgctttaggcgtctcggcctgctgaccaccatgcctggccattacctcagcgaactcggcacacagctgttgaaggagaacgaccccgttccggaaaccctgccgttggtgctggcgggcaaagccgcggtcgactccgaactcaacgccaaccgttccgccgtctcgatacgctcgctgcccttatatgacaacaacggtcgtatcggagcgattctgctatgccgtgacgtcaccgagctgcgccgtcgtgagcaggagctgcagaccaaggacgctacgatttccgagattcaccatcgtgtcaagaacaacctgcaggccgtctccgcattgctgaggcttcaggctcgtaagaccaagtcggatgaggtcaagaaggaattgcaggaggcgcaacgccgcgtgcagaccattgccatggtgcatgagggattgagccagaccgccgacgaggtcgtcgacttcgacaaggtgattgccaacctgctgcgcatggccgtggacctagccacgatgaaagaccagcacatcgatatcaactacatgggcaagttcggcatgatgcccgctcaggatgccacgccgctgtccctcgtgctgaccgagctcatcaccaattcggtggagcatgggttcgaaggccgcaaggatggccatatcacgatttccgtgggccgctccggcccgaacctcaatgtggtggtcgaggatgacggttccggtctcggctccgaagaacagggaggattggctcgttcttccggttctggtttgggcacgcagatcatcaacacctttgtgaccaatgatttcggtggttccgtgcattgggagccgcgccgcggaggcggcacccgcgtggtgcttgatatgaagctcagggccgctcaggatgagtgatgcgaagcccaaaaataaggaaaccctcccaagtgggagggtttcctagtatgacgaagcgataatcaaaacatcagatttgcatctgcatggcctgagaacggcgggcgcgcatggcgcggcgcttcagcgcacgacgctcatcttcgctcaagccgccccacacgccgtaatcctgattggtgtccagagcgcacttcaggcatgcatcaatcaccttgcaggtgcggcacacggccttggcctcctcaatctgctgataggctgcaccggtgttgcccaccgggaagaagagttccggatccttgtcacgacatgcggccttggctcgccaatcaaaagcgctgctcattgcttgcctcccttaaaagccccgtggctggtgttgttccttaagtccagtaccaaggtaaccacgaaccgtggtgattttcaagaggtttcgccgagaaaaaaccgaagttttcacgaagcgcactgcaccagacatgccgatgtgccctcgatgagcacggcccggcccgcgttgtcggcatcgatatgactcatcgtatccaataggcgagcggggactccggccataaggtcagacgttcgttccccgcacgggaacacgattctggtattgcaatgctctggtatacgtatcgggcgaatcgtgctgacggcgaataccacgctgacggactcatcggccaacgcatgtgtgaaagacagcgcctgctcgtcggtgcggaatgggtcgaacaactcatcggcgtcgtcgacgaaccacacgatatgtggaggcggtggtgcatccgagctggcatacggcgtgcagcggccgttgcgaagccattgcgatccccatacccggcgatgcggggaactgacacgtaccgccaagccatcagccatgctggcgtgtcgagccaatgttttcagcaacgtggttttgccgcgcccctgcgggccgatgacaccgatattgccaccggtgagggataccgtcgcttctcgcaggttgatgccatcgtcggcaagtccaaatcgaatgcgttgcggtgcgtgattggccacagtccggtcttttacgtgccggggaagtggcgcggtaaacagggacggctgcggcgggctcccgacgaaccgcgatgcgaacgcgatctggcggcataccgcatcgatatcgcgcgccgttgcacagcggaatgccgtcacctgttcggaatcgttgcagaacgccgcaccgggcattgccggactgaggtcggcggcacgaccatcaccaagcagctcgcatgattgcagacggtcccgaacccgtaaacaaatgctgacggacatattcgccttcatatcggcactgacctgacccatcggattctgcgtacaggcgatcagatacatgcccagtgacctgccgagcgaggcaatacgcaccagacgattcacataatccgggagctggtccttcagggcatggaattcgtcaatgaccacgatcaggcgcggtggcggattgaccatatcacggatatcggaagcatggacagcggcggacagctgttcacggcgtgtcagttcggcttccagcgcacgcaacgcgcgtacggcatgcgccagatccagatcgcatacgctgcccacggtatgcggcaaccgttcgagtttgcggaacgcggaaccgcctttgaaatccaaaaacacgaaattcagatgctcaggcccgttcatcgaggcgagcgccagacaccagctttgcagcaacacggatttgccggaaccagtggtgccggccaccagagcatgcggcccctgacggttcagatcgagcctcagcggctcgcttccggtcatgccgatcggcaccgcaaggtcaaggggttcaagccaatggcccacaatggtgcgccatggcaggcgtgcgaagtgcagcagcgattctatcggctgcgacggcgcatgacggaggtctgcggcgcgggcatcggcatcgtccgtgataccgatatcgatcgttgcctgttgcggggcgggggtcttctccgggcccggaggtggggggagcgtcagcagcagggacacgagacaggcgaatatgcccggtgcgatcatggcggcgaacagccattgcccgtgcaacagcagtatgaccatcatcaatgcctgcgcgatcatcgggcacgccgcggcaagcatggtcaggcgggcgcgcaatggcggcgcgcccaaacggtgcttcgcccgggatacggcggatgccgtgtgggcggaatgtcgcttcgaatcgttctgctgtgatgccatgcttccagcgtgggggaacgcatgccgaaagcgcaagccgaatcaaggtatgtggttctagcttgccgagttatccacatgacattttgcccgtgcatgattggctgcgtgggcaacggcggcgatcatgcgccgacgatgaagccgatgggctccgggaaagcgtcggtcagccttccgccagattgcccacggcgccggccttatgcgtgccgtcggcaagctgattgaacagttcggtgttcttggcgtcgtcaagcagcaccgaggagccaacgccatcaacgtaataatcagggtcggaccagtacacgctgccggagatgccattcgagccggtggcgcttttgaacgccaacgccatggtgagcaacgtgtaagggttggttttttcatccacggtgagtgcgctcatcgcggcattggacactgccacgactttggacggattggtcagggtcccactgctggaagcctttttgacgatggccgagatgacctgccgctggcgttcgttgcgtccgaagtctcctcgcgcgtcggcgtatcgcatacgagagaaggacaatgcagtggaaccatccgtcgtatggcatcccgccttccagttcagtccggaataggaatcctgaacatcctcgtcatagcacagttcgataccgcccaaggcgttcaccacgttctgcagaccgccgaacttgatctgcgccacatggtcgattttctggccggtaatctgctcgacgttgcttaccaaggctttcttgccggcaatctgcgccaccgcattgattttcatgtactggtcatcgacgttcataagcgaatcgcggggaatggaaatcagcgaactcggcccgcttttaggcttgatcagcaccagaatcgtatcggttctgaagcctgagatattgtccacgccgccgtaatcggtggaaccgtctcgctcgtcggagccaagaatcagccaggtcgaggccggcgtgttgggggtgtcggtcagccagtcgctccggttcagtttgctgtccacccattgccaggcaccgaaaacagaaagaatcaacgccgccaccagtaccgcaatcgcgcataagatgatgcgcaaggcgcgcggccggtgtgccgttaccgttttcgccgttgccgccgccggccggccaagatggctgaacttcgtggacacgtttgctgctggcgatgagggccgggaaaccgacatatccgacggattgcgcacggcgttgcgggatgagccggaagacatccgcgctcgcgacggcggaatgctgcgcggtgcggcggcatccggagccgtgctgcgggtggcacgtccggttttcggagaaaaactgggcggagtccgcctgccgttgtccgtgacgttggcgcttgccgtggcgttggcgttcggttgaggctcttcgatgtcatttcccgtgacggacggacgggccgatggagcctgacctgactgacgtgaggcgcgggcaggggcgaaggagcgtggcacctgcccggaaggtcgggtgcgtcgatttcccgcaggaatgaagcttggcgggttgatatgcggatccgccccacctgattcctgcgtcataacccctcctgaaactgtcgattgtctgaatgacactttgacacagcatccgccgggtgttcctgcgctatggtgttcctgcgcaggaacggcacaatatcatgtgcaacggcatcagggcatcgtgtccgcgccatagcacacagttccataaaaatgatgtaatgacacgagaaagaatttgacaaaaacgaaattgcatgtgtgtaatttagtccgtatgaaaagctcaataggcaaggagaatcgcatgtggggtgtggtcgacgattcagccgaagagccatggcatgaattgtggggactattccgacctgatggcgatgtatcttggcagcacaaggcgttgtgcgcgcaaaccgatccggaggcgttcttcccggaaaagggaggctcgacccgtgatgccaagcgtgtgtgcgccaaatgcgaagtgcgtgaacaatgcctgaaatgggccatcgaccatgatgagcgattcggtatttggggcggcatgagcgagcgcgaacgccgtcgatataagcgagagcaccgggagcaggcgtagttccacacacacccccttcaagtctggtgcgtacactgggagtttatgagtccgacaggtaatagcgatattcatgaggcgttggccgacgccatgtcttctcgaccgtatacgcataggcaggatgtggataccggcattacggctgtgatcaccgttgaggaggatatgcgtttcctccggtctacattgcgttcggtattgacgcagaatgttcttccgggagtcgtcatcatcgccgacgcgaccgggcgcgccggttcgaggataaccacttcgttcgaggtcattccctcgccatcggggccggtagtggaggtgccgcagtccaagcatgtgaccattcacatcgtttcggccaagggcgcgcgttccttcggcgatgcggtcagccgggcgttggatcgggccgatttggatgacgctccccgcgcattgtggttgctccatgatgattcccgcccctcggatgcctcatgccttgaacgattgcttgaggcgtggcgcaatacgccgggggccagcgtgctcgggtgcaaacagtgtgattgggaaggatcccacctgcatgatgtcggtatgtatgcaggccgacacgccgtgcattccctggtggtcgatggagaacccgatcaggagcagtatgacgggcgacaggatgtgttcgcggtgtcgctggcgggcgcgctggtgtccatgtcgcaattcacgcgactgcggggcatcaatgcctggctgaccacctacagcgaatcggtcgatttctgccgccgtgtctgcctgagcggcggacgcgtggtggtagtcccgcaagcggagatatcacatcgtcgcgcacggtatgagggcattcgtacgcgaggcggggagccgcttaaggaagatcacacggtcaatcatgcgatgacggtgcatcgctcccaacagcgctatctgtacactgacctggccatgtcgtcctggattatcgtctggctgtggaggctgattcgcagttttggcatggccatagccatgatgttcggcaagaagccgtatgaagcatgggtgcaattgtgcctgccatggttggctttggccgatatcgcgggaaacatgaaatcgcgcaggctggtggccagacagtcgaaggtcgccgcatcgtccctgcaggttttgttcgccgacagtcggcagatcaagcagttccatgatcgtcgggatgcattccaatcccagcagggcagagtgctgctcagtccgctggaacgtgcccatctgcggacacgcaccatatatcgctggagcgcagccgtggtgatggcactggtgtgctttgcggccatcgtggtgatgtattggccggtgttccgttcgatattctccggtggatcgttgtattccgatgtgttgctttccaccggtgccagcttcactcaactggtgcagtccgccaccacgccatgggtgtttggcagcggcaccggcattcctgcgccgcccacgccgtggctgctggtgctgatgctggcctcgctggtcacgctcggccatgtgaccgccgctctggcgatgatactgtttgtggccgcgccgctgagcgcattgtcgttctgggcgctggcgggcgtattcacccgctcggacgtggttcgtgtgctgggaggactgttgtgggcatccaccggcattatgttcggctggtatgcgcaggccaatatgccgatgctcaccgtaatggtgttcctgccggccgcgttcgcattcgtgttccgtgccgtgggcatgtaccataccgaagacccgctcaagccgcgcacatccgttcaggccgcggccatcgccgcactgtgcttcattcctgtggtggccgccgaaccgcagctgctgttcgcgctgatcgtcgtgttcctgatgttcctgctgttcgtgcgccgcaagcgcgccatgctgttgcttattccggttcctgccgcctttgcggtggcccctacgctcgtcaatgcggtgcgttacgccgatttgggcatgtggcgtcaactgttcggcgacatcacggtgccaacgtcatccgccaacgggtcgccggcgtcgctgagcctgcttgaggccgtacagcgtgcgctgggatggcgaatgggatcgaccgattatgccgatttggcggtcactgtgctgttcggcgtcatcacgctgctcgctcttgcttcgctggtgctgccgttcgcgttgcggacctcgcggctgatgtgggtggtaatcgtttgcggaggcgcgctcgccctgatttccagccgtgtggccatagccgtggatgccgatggcgtcgtggccggttccgcgcagcctggcatcgcgatgatgatattgggcttccttgcctgcgtgtgtctcgtcgccggtggggcggtgaagcgattccaaccgttgcgtgcgtctggcagcgatcccgcaccgaaaagggaccgtctgcatgtgctcatcgtgtctggccgtgtggtgcttgctctgatactggtgtgctgcatcggcatccaatgcatgtatggcatcgaacgtcataaggatgcgggactgggcgtgtccgaaaacggcctgcccatggtcaccaccgattatctggaggccagtgccgatcatcgtgtgcttgccgtgagcgcggagacccgcaacatcgtcaactatgcggtgatgcgcacctcgcgcggcgatctgatcgacagttccccggtccagcgggcgcgcctgttgtccggcaagcatgatgcggttgacgaacaactggcccaggcctgtgcctcgctgctgtccaatcccgacgaagaggccatcgcggccatcagcgcgcttggattcggcggcatctacgtggttcccgagaccggcgattcctcgaacgacatgccgtatgaacagttgagcgcgaatatcgccgcatcgaacggcacccagtccctggtctccacggatagcggcagctactatcgtctgacgctgcgtagcagcacctcacagcaggtggatacctcatggcagcaacgtgcacagcatagtgtctggagacacgtctggctgatatgcctaggtgtgatcacggcgttgtactgcttggtcgccatgcctcgcagacgaccgtcctacggattggaggagcaggcatgagcaacaaaacttctggtttcaaacgtgcgatcggcatcgtgctcggtgtgatcaccatgctggtgttgattgcgctgttcgtcgttctcgtcatggcccccatccccaatatctgggtggacaaggtggccgcttccgataatgccatcgaccagacagttagtccgacccagtccgaaacctactgcccggcacctataggattggccgataccggcacgtacggcgacagcgccttccaggccactgtcggcaatctgagcacacaggcgcgctacgcggcgttcggctccgtctacagcgccactgtctcggcgatcgggcaaaagtccagttcagatgacgtgactttgaaagacgccgatccgaccgacgattcctcggtgaaaaccggtgctcagaagatcgatcagggagctcgcctgatcaatacccgtatgttgcaggccgcagctggcaccggcaccgtcggcaccatcgcatcatgggccgatgacggcgatgtgagaggcgtatcggcggcatcctgcgtatcgacctcgctcagccagtcgttcttgctctccggcggcacgaccggtaccacacagcagctcatcgtctcgaatccctccaccaagccgaccaccgtcgacattgccgtctggggttccgagacagccgggaaaatggcattgtccacacaatccacgctgtctgtgccggccgagggggagtcctcgatggaactgtccgccgcggtcgatgggcagcatggtctgttcgtgaccgtttccagcaaggagactcctatcgcgtccgtggtacgtacggtgaccatggatggtctgacaccgaagggttctgatttcgcgctgccgctgccgaccgcctccaatgcgtcggtggcgccgtccatcactgccggagatgcggtcaccgcttatctgttcgccaaggcagacaccagcaccgggctgtcatggattaccgacaaaggcttggttcccgccaaagatgccaccgtcactgccgataaggtgacggcgatcgacttgggagaggctcctgatggggcgttgggcgtgatgtccaccgcagaggatgccgtgtcgttctccgtcaaggccacacgctccggtgactccggccaagccgatttcgcattggtcaatgccggcgagccatccgaattctcggggttggcccttcccgacggagtaaaggcctccatcacgctggccaatacgtccaatgcgcgcaggacggtcaccttgcacgcctacgatgatgccggtgcttcggtgacctccgaggaaatcacgctggatgcgaacgcggcgcaaacgattgagaccggcaaactttccggcgatcatggcaccgcggtcgtgctgatgttggaggactcatccaagaaagtgagctggggagcgcgtttcagtcacgattcgttgcaagacaaggacatcgccggattgtccgccatcgacgcttcaacgctgatgcccgccacggtccatgtctgggctcggaacgattcctccatcgtcaagtagagcgcgctcgccgaagcatcggtctgatgatgtttcggcgccgatatagctgcgggggccgtgccactgtcttacttgaagtggcacggcccccgcaatactgtcacaggccccaatcggggtcgatttcctcgggcctgcgcccatacaattccgctatgcgagccaccagctcatccctgacggccaactgcaattcgagcttggtaggtgcctcggtctgcaacggcatacggtagagcacgactcgtgcgggaatgccgtggctggcggggaagcactgggacgtcatattcggctcggtctgccaaggcgtcggatccgaaggcggcacatcctccaccgcgaactggagcggacgtatcagttccggccacgcttggccgagcctgcgaacctgggccgccaccatatcgtcgaacatgccggtgcgagtgcggtaacggggcagacgggtgccgaacatcggggttcgtgtgccgcgaccgtggcggttgcggtagattcgtgcgttccaaggtggctgaagcatggttcccaccataggacatggcggaggcaacatgcgttaggattggttcattggctgtgaacattcgtcaacgagggaggcgcgacaaatggtggtacgttcgtggtccgaacttgatttcgataatgtctgctccaacgccaaggtgttcggtttcgatttggacaacacgctggccagctcaaaacagccgatgaggcccgcgatgatcgaacggttctgtgcgctgctcgaccatacggtggtggccctgatctcagggggcggcatggcggtggtcacctcacaggtgctggatgtactcaccccgaatgccaggcgcggcaatctgcatgtcatgcctgcctccggctcccggtattaccggtgggatggcacgcaatgggccttggtgtatgcgcatgatctgtccgaagccaccgtggccgctgtctcggaaagtcttgagcgacatgcccgggaactgggattgtgggaacagcaggtatgggggcctcgaatcgagaacaggggcagccagatcaccttctccgctctgggacagttcgcacccgtagcggccaaacaggcatgggatcgcgataacacgaagaaacaggcgctggtcgaagcggtcaaggccgatctgccgcacatgcgggtcagggccggcggctacaccagtgtggatgtcagcgaatgcggcatcgataaggcctatgccgtgcgcaagctgacgcagacacttggcatacaggccgatgaaatggtgttcgtgggcgatcgcatgacgcctacgggtaatgactatcctgcggttgaggccggtgcgatcggtgttcgtgtggagaatccgcaagacacggtacaactgctggatgcactgcttgcgcgattcgatactccagcttgatggtgacgcgttatggacaggccgagcgtatacaagtggtggcatgcgatgtgggcacaggcctgcaatctgctgtttccacgcggctgcgctgggtgtgacgcgccggatgaggtattgtgtgcggcatgctgggccctgttcgcgcaatgccgggaacgggatgcagacagtggtggcggagcccgtatatggtccgcgtcaatctatcagggagcggcgcgtcgtgccattctcgactggaaggaccacgacgataccgagcttgacggcccgttcggccgcatcatggtgtcgctgctgaacaagacgccaataccatcatcatgcttgggtcatcgcgtattggtggttccggtgccgtcatcgcgggcgtcaatgcgccgaagaggacgggctcacacggcaccgttggccaaatcggtggcaggggcattgcgtgggtacggcgtcgatgcgcgaccatgcaatgccctgagctccttcaccaaggcacgctccgtgcagcaggtctcttcggcacagcgtgcccgccgtatcaccggtcatgtcacggtgaagcgtgatctcatcggccatggcgacgtggtgcttctcattgatgacatcgtcaccacaggcgccaccgtgcggcaatgcgttcagacatttcagcaggccggtactaaagtggtgggcgtgctggtattggcggatgccgtggtgcgacggtccgatgacgatatcagtgggtgaatgacatcggttacgatgccccagatagcaggcgaagcgccgttgctcggcatgtaatcgggatatcgaggattctcggcgtgcaatatggtgatgccggcccgtgaaaccagccgcttgatggcgatttcatcgtccatgacagccgcaacc

SEQ ID NO: 1120 - DNA, 24875 bp, Unknown
  R81_24m  MAG No. k141_2675
gtctgagagacaagccgacgcggggtggagcagctcggtagctcgctgggctcataacccagaggtcacaggttcaaatcctgtccccgctactgcgggcgaggccgtcacgattattcgtgacggcttttcgtttatccgccgtcgtgccctacggggccgcatatccgatcggggcgatgatgtcctgtgaaaaaacaacatccaagcccgctctgggcagaatcaatcaatctatggctcgactccctcaaggcggcgggctactcccccaacacgatcggcacgcgccgatgccagatgtccgcattgtcgagggcgcttaagggcgatctagggacgtggagggcgacgacctcgccctgctgatccaatccgccaacggctatccgttccccggccggtggagcggccacgcctcggtcgagaccacgcaacggtacatcgccatgcccgacgaccagctgcgcgccgccgtggaagccacgcgcctcgccgcctaggaggatcacgatgttccgtttccccgactcgattgtggtactaaattgattgtggtactaaattatggtaccataataagcatgatcgaatgcgagccgtcagccttcaagcactggctcacacagccacagatcgactacatattccggcatccggtggccgtgttcgaggtgcagtcgagacacgccggcgacagggtcatggcgatcctcggacacccggacgagttcagggaacgccccgtggagctgctggtatcccagcgcacccgcaaggtgttccacgcgatggactgccgccgcgaatggctctacaagttcgacgactaaaaaacaccaaggaggacatcatgagcaacgaaacagactgggacgagctctcggacgaatacaccgagcacacccccgccatcatcggcgagaccatccgcccgcaaagggcgatcacgatggatgacatcgacgacatcttcgccggccgccccctcgccgaccagccccgccggaaggccgacgtgctctacaaggcatacctcacgcccgacatggacgcacaggtgcgggcacaggccgaacgagagcacatcggcaagagcgctctgatccgcaaggcactggccgcatacctgaccgccaatcaggcacagcccgcgatggcctgacccatatacggcgaaaagcccccgaacctgccgcgtgatacggttcaggttcgggggcttcttgttattcagccttggatgccttggccttgagggcgctggcgccgatgacgacgccgatggtcagggcgacggcgctgatggtcgtcgcggccggatcggcccacgtccagccccatacggggccgagggtctgcacggacggtcacggtacgggacggtggggcgttgctgccggtggcgacgctgccgccgccgttgtaggtgacgacctgaccggggcgatatggatgaaaggcgatcaggcagctacggtgcccagggaagtcggcgatcataaacgtctcgtcgttttcatcgcggaccttcagttgtctaatccacgggaggcgacaggcgtgaagtttctcaacgaagcggaagccgggcacaagtcgtatgtcacaatcgacttcgtgcccagctcccgtccttctgctcagaagcggagtgcggttcaccatccagccgacatcatcggcatcatgccgcagcgggtcaacgtatcggccagcgcatcgtccagtgcttggatcggtcatagcaacgacgccaccgaacgacgatggacagtatggcgcctatcgccagagctgacacggccagaaccgaggcaagcgacacatcgccacccgtgacgggcagtgacgggcgagggttgggcgtggttgcctccgccggcgccggtggcgtctcgggtttctccggttcgcacggtttctccgactcgcatgggggcaacacccgcacacgctcccaggcatcgtcataccggctggacgccggggagacacggtcatccccctcgaaccgccaaacgaacacgtaccacccatgccgttcggcggtcagatgcatgggagcgccatgcgcgtccaacgccccggcgccgattttgaacgtgccgttcatcgcgggaatctcccaggtggccagcaaccggtggttgtcgtcttccgtggggacctctcccccggatggcttgtacgcctcatcgttggaggggttgtcgggatcgccggaccaccatacgctcaccgtcgcatacggctgatccgccgcgaaaccataggtttcatcacccatgaactggccgtggtccgccgggaaccccgatacggtgatggtgtcgctgagttcggcgccgatatccgccgaatgttcggtaaccgtcgacatgacttcgaccttcccgcgccccacgttgctttccgaagcctccatgaacgggctcacccagtcgccggtaaggtattcctgcgcccgtttgctttgctcgctccgccggaacacccacacccaggtgccaaagccgccggtcttcggagtcagataggcggcgtcaccgtccggcttggccatggcccgcacacgaacccgctgccccacaccggtgaaggacgccttgccataagcactcggctcataacccgaggacgccagccgggcgagaaaagcgtccgcgctctcccgtgcgttcggcgcgatgaccttgcccagatcgtccttgccgagcccgtcgaaatagtatccacgcgcctgcagcttcagaccgggcacccaatgactgccctcgtcccccacgccactggtcacatcatcgaacaccggcgaagccgcatcaagcaccttatcggacacctgcgtggacaccgacggaacgaaatccttgcgcacctggaacgtcgacgacgaaccgccggcggaagccatcgaatcgaaggccagcatgtcctgagtgctgtccatgacgtgcatccgcccatactcgtatgcggtgttcaccgtcacctcgccggcgccggtcgcctcccacgcgatcgaggatccggcgctcgtcgacacccccgagaacgtgttgccgccttggatgaaccgcgccggcccctgcaaggtgacagtgaacggcactcccgcgatcgcgtcaccgtcgcggttcaccactttcaccgagatggaaccgctgcgcaaagcctcggcatcggtgcgttccaccgtcgtgcccgcaggcgtcttgccggccgattgatcccatatccgggccgccttcgccacgatctcgggataccggccttgaatgaccgccatctgtctcgcccactcgtcccgatcgcgcccgaagtgatcctgcacgatgatgccgatcgccgcatgggtggcggcatccgtgtcgcggtaccggtcaaggatccatgccatacgccgggcgttctcatcggaggcaagcaccgtggtggggcctatcacatagtcgctcagtttccccgcttcgatgcagtagtacttgttgcccgaagcgtccagccccgcgacaccgacgtaatattccatatcgttgtatggaaacgtcacgtgatatctttcgtcggcgggcgtcaacgtcgcggcatacgccgtattcgccgagccgaacaccactcccaccattattatcagaccggtcagcatcgctacgatggccatgccccgttgccgccatgtcgttatcatcattcgtcctttcctggtacgttcccccgcatactgcactgtgtgcgggtaggccacgatcatggcagattttcattcgctacagccggtctttcgacctatgtggtccgagcttgccgtttgccggcgagttgtggataactcctccgccgagttatccacctcatgcggttgaccgaacgtttacctgaaagttatccacaatgtgcaacatatgttcaaaagcctctagaatagggccttatggcagcagtacaacatcgcgcgaccacgcgcactagtaataccgataacaacaccacgaagacgaagtcaaagacgacttctgcccgaaagagccccgcaaccaagcgcaagagagtcagcgccgaaacggcacgcgccgcagcagcgctgaaaggcctggctgtcgaagcccccgcaccgtccatcgaagcaaacgagcccggccagttcggccgcatcaatgtcatggacatcactcccaccgaggagcgtggcatcttccccgcccgtgtggaactcggcgaaccgtttgagatgaccgcccaagtgttcatcgaaggccgtaccaaggtgggtgccaccgccatcgtgcgcaacccgcgcggcaaggaaaccatgcgccgggccatgacctgcgtaaatcccggcctcgatcgttggaccgtgatggtcaagtgcggcgaacacagcgatctgaagccttgggaggatggctacgcggccgtcaagcgtcagctcggcgaatggaccgtgaccatcgaaggttgggaagacacgtacgtctcctggctgcatgacgcccgtatcaaggtgcgtgtgatggacgacgtggacaacgcgctcaattccggtgccgagctgctggcccgttgggccgcaaccccggacgccggcctgaccgcacgcgatcgcaagaccttggagaaggccgctgagaccatggccgatcagacgctgagcgccgaggatcgcctcgccgccggcgacaaccctaccatcgccgccctgcacgagactcacccgctgcgcgatggcatctcccccagccagccccagcgtttcaaggtggaacgcccgaagtccagcttcgcggcttggtaccagttcttcccacgttccgaaggcgccaccatcgatccgaacaccggcaagatcattcagggtacgctgaagacctcgatggccggcctcgaacgcgccgctgccgaaggcttcgacatcgtctatctgccgccggtcttcccgattggcgtgaccaaccgcaagggccgcaacaacacgctggtcgccggccccgatgacccgggctcgccgttcggcatcggctccgagctgggcggccacgacaccgtggatccgctgctcggcaccatggacgatttcaaggccctgtgccagcgtgcacatgaactgggtctggaaatcgcgcttgatttcgcactgcagtgctcgcccgatcacccgtgggtcaaggcccacccgaactggttccgtcacaagccagacggctccatcgccttcgccgagaacccgccgaagaagtatcaggacatctacccgatcgacttcaacgccgacatgcccggcatcgaaaaagaagtcgaacgcatcatgaatctgtggatcgaggcgggcgtcaccatcttccgcatcgataacccgcacaccaagccggtgcgtttctggcaggacgtgattgccgccgtgaccaagaagcacccggagatcctgttcctggctgaggcattcacccgcccgggcatgatgcgtgccctgagctacgtgggcttcacccagtcccactgctacttcccgtggcgcaacaccaaggacgaactggaagagtatctgccgatcaccaatggcgacgacggctactaccagcacaacaccttctggcccaccacgccggatattctcaccgcttacgtgcgagacaacggcgtagccggccactgcgtgcgtgcggtgctggcagccatgggctcgccgtcctggggtatctacaacggttacgaactcatcgagaacaagcagcgccccggcttcgaagagcagatcgacaacgagaagtacgaggtcaaggttcgcgattggagcaaggccaagcagtacggcgtggccgagatgctcaccgcgctcaacaagattcgtcgcgcccacccggccgcgttgagctaccacaacctcaccgtgctgcctacgtccgaccagaatattctggctttcgcacgccacacgccggccgaactgaccggtaccggccaagcggacacgctgattgtggtcgtgaacctcgatggacacaacgcacaccagtcgatgattcacctggaactcggcgagctgggtctgcccaccgaccgcccgctcaacgtgcgcgacgagctgaccggccgcgaattccagtggggttgggacaactacgtgtctctggcgccttgggcggatgtggcccacatcctgtccgtgcagtgatgcggtagtgcaacggtaatgcaacagtgatgccgttgacgtgcatgggtttatcgtgtgcgtaaaccgctagaaatcctccccttgaggggaggatttcgtctgtttagacatagtgtcggcataatctcagcacggtttcttgagttccgcacctgttttgcaggcgcaaacagggtattgtggtgagacgataacgtaactgtcgattttcaaggagaaatgacatggcagaaaccttcaacgtcgttgtggaaattccgcgcggctccaagaacaagtacgaagtcgatcacgagaccggtcgcgtcttcctggaccgtaccctgttcaccgcaatgggttacccggatgactacggctacatcgacggcaccctgggcgaggacggcgatccgctggacgctctcgtgatgattccgaactccgtgttcccgggctgcgtggtcgagtgccgcgccgtgggcctgtaccacatggtcgacgaggccggcggcgacgacaaggtgctgtgcgtgcccgccgacgttcgtttcgatgacatcaaggacatcgacgacgtcaacgagtaccacaaggccgaaatcaagcacttcttcgagcagtacaaggctctggagccgggcaaggaagtcctgccgggcgactactggaccggtgctgacgccgccgagaaggaaatcatcgcggcacgcgaacgcctcgccaacgaaggcaagtgattcgattccgaatcgtcggcgggagacctctccggaggcctcccgcctttttgattcgacgtgcatcgcgtgatatagtgctggtgtatttttcagctaggcgtaggcggcgtgtaggaacgctggtcgaggcccatcgcacggtaatccggcgatgaaccttctgtcgcaccatgattccgataatcattcaaatcctgcttatttctgtttccgtagctatggatgcattcgccgtatccattggcaaaggtctggccgtatcccgcgtacgagtgcaagacgccgcgaaaagcgccctctggctcggcggattccagatgctgttccccattctcggctatttcgcggcatctacattcagcaaatacgtaacccaattcgatcattggatcatcttcgccctgttggtgttcatcggcggcaacatggttcacgaagccttcgaagaagatgaggaaaactccaaggagaccgcccagttcgattggaagcatatgcttcccctggccgtggcctgcagcatcgatgcgttcgccgtgggcgtgagcctgaccttcatgttcaccaaagcccatatggcattcgccatcctcagcatcggtgtggtcaccggactgttctccgctgcgggcctgtacattggccgcgcgttcggctcccgctggcaggagccggcgcagatcgccggcggcgtggtgctgattctacttggcgtcaaagtgctgttggagcatttgggcgttatcgcgttctgatttagtgtcataagccccttcaccagaaagggctattttgtttgatttcaccgttccaatgcccgacgtaggattgggatggaaattcgattatctgagaggcgtatcatgaccgagatcacccaggagggttggaagaacaaagccctgagcatgttgttggcccaactgacgtcctatgtactgctcatcgcagccacggtcattccctcccctggcaccgtccccatcatccctttgattatcgccgctctgacgttggccgcatttgtcgtgttctggccgttccgcggcagcatgctggatcgtatcgtcactttggtgtttggcgcgatttctctgattttcgtcatcgtacctttcccgaccggcaaggttccgccggatcagaccgctgcggatggctcggtacttccttggtattcatgggcactggccatgggcctgctgctggtggtgctggtggtcttctcgttcggacgtcagatggctcgtgagaagcgcgaacatcttatccgcgcactctctcacgccgtgacttccggtgtggcggctctcgccgtggccggctggtgcttcctgcctgatttgggcgcgatgctcgccaagggcaccgttgcgggaaccgttgccctgatcatcctcatcgttttgggactggccttggccgtggcctccacgttgtgggtgcgtgacgccgatccggacccggatatccgctatccgtggatcggcaccggattgatgccggtgatgctgatgggcgtgaccatcgccgcaaccgcactggtgctcggccgtgtcatcggttgatggacgtctgccgttccatattccgcaaacttgtaacccatgtgtccactacaagcgcgtagaataatgaaaaaccgcgcgaaagcggcataacgccgctgacgactcgtacagccacaccaagcaattgcgtaacacattgcaggataaagggggattagcgtgacggatcttacgttgatgactttcgccagcgaccccgccaccgttttgccatcactcgccctgctttctcatcgcgtccgcgtgctgccgatggatgcagccagcttggtgaagatgccggagaacaccattctgtttctggatgcacgcgatgatctggcgaccgccaaaaccttgtgccgtctcatccacgcttccggcctgtccacgccaatcgtgctggtgctgaccgaaggcggcttcaccgtggtcaactcccagtggggcattgcggatgtggtggtcgccaccgcttccccggctgaagtcgagggccgattgcgattggtctccgagcgcggcaacgctcccgcagccgcagcagccggttctcccgccgaatccaccaccacggtggaagatggccagattcgctccggcgacctcattgtggacaccaacggctataccgcctccctgcatggacgccccatcgatctggcatacaaggagttcgaactcctcaagtacttggtccagcaccccggccgcgtgttcacgcgcgcccagttgctgcaggaagtatggggctacgactactacggtggcactcgtacggtcgacgtgcatatccgtcgtctgcgcgccaagcttggcggcgaatacgaacacctcatcggcaccgtgcgcaacgtgggctaccgattcgacccgccggagacggataaggaaactgccgccgcacagcaggccgccaaagcatcctctgccgccatcggcaccgatgacgatacccccgatctcaacaccgccgcctgacagaccagcagcgctacaaaccatcaatcatcgacattacgccgcttaggtccatacgatgagagaaaccaaatccgcgcgtctcacgcgcatgcatgacgaatacgacattctgcgccaggtgattccggcacccgcttgcgcactgcatttctcgaatccgctcgaattgctgatcgccaccgtgctcagcgcccagaccaccgacaagcgtgtcaacacggtcaccccggaactgttcgccacctaccccaccgcccgtgacttggcggccgcgaacccggcccaagtcgaagacatcattcatccgctggggttctaccgttcgaaaacccagcatctcatcggactggccacggcactggacgaacggttcggcggcgtggtgccgcgcacgatggatgaactgaccagcttgccgggggtcggccgcaaaaccgcgaacgtcgtgctcggcaacgcgttcgatatccccggattcccggtcgatacgcatgtgatgcgtgtaaccggacgactgcgttggcggtcggattggcggtccgcacaccctgatcccgtgaaaatcgagaaggaaatcaccgcctgttttccgcccgaagagtggacgaatctcagccaccgactgattctgttcggccgggccacctgccacgcacgtacccccgactgcgccaactgcccgctgtccgacacctgccctagctatgcgccgcccgccggcaagagcgcgtccaagcgctaactcatacctcatcatggtgaattgcggattctaggctgaatccaccgctagactgaaaaccatgcagcacagcaagcggaacaatacatggtccaagtgggggatttttctcggagtcgccgtggcactcggcgcactcgtggttgcgggatggacgttcatgcaaaaccggttccagccgggatcatccctcgatgccgatgtgaccattggcatcgacgatatgccgcaatccttggatattcggtccgattcctctgcggcagccgagcgcctgctcgtcgacaatgtgtatgagacattagtgaccgtcgatcaagacaacaagattcagccgggactggcgacaagctggaagacttccgatgacggactgaccgtcaccctgacactgcaatcgggcgtcaccttctcgaacggtcatacgttggacgcctcggacgccgtgtggtcgttgcaacagaacgtgaccaacaaggtggcggacgtcgacgaattgggcgatctgacgtcggtcgccaatccgaacgccaccacggtggtcattacgcttgccaagcccaatccgacgctgctgcgagcgctgtccggcaaactcggcattgtctacgattccgagtcgtccagtgccgattatcaacgcaaggccataggttccggaccattcaccgtggccaatttccagcctggccattccctgaagctggcgcgcagcgatacctaccatggcatcaaagcggccagcaatatcgttgaatttatgcaatactccgacgccgatgcgctcagcaaggccctgaccgacggcagtctcgatatggcggcaccggtttcggcttcgacggccaccggtttgaacggcaaggatggcctgaccgtcaaggagggggccactacggataaggtgctgctggcctacaacaacggcatcgattcgctgctctccgacgaacaggcgcgtaaagccttccgctatcaaatcgacgcagccggcatcgcctccgcccaacccgacgcagccggagcattgggcggccccatcagcccgctggaacccggatacgaagatttgaccggactgtatccgcatgacgaaaaccaagctgggcagatgttctcctacttcggtgcgcaatatctgactacggtgaatctggtggttcccgaagaataccggtcgttggccgaaaccatcaagcagcagatcgagcggcagccgcgccccacggtgaaccttgaagtgctctccgatgaggattatgccaaacgaatcaaggacggcaaatgggaactgaccgtgatgagcatggacggcacggatgatgccggcatattcgccgaccccgattccatgttccattacgaccataccgaagcgcaacaggcctatgcggatgctcgcgccgccactaatgacgccgattatgaggcacgaatgaaggcgtacgcccggctgatcagcgaggatgcggccagtgattggctgtatacccgcaaatgcttcactgtggcgtccaccaaggtctccggctacccgacctcgatgatcaatcgtcgcatgccgctggccgggttgacggtgaagtaggcaaccttcagtcacggacaggctacgcccgatagtccttggctcactatcgttcgatcgttcgtatctcgcctgcgaacagcctactgggctgtttactgtacagttcggcttgtcatgcaacgtgcataaactttggctttatgactgaaggcaaatccatcatcaacgccaacctcaccccgctgcccgacaaggtcggtgtggacggacttgaggacaagtggcgcgccgtctgggatgaagacggcacctacaaattccgcaatacccgcgaccgcaaggccgtctactccatcgacaccccgccgcccaccgtctccggttcgctgcacgtgggtcacgtgttctcctacacgcacaccgatgtgattgcgcgttacaagcgcatgcgcggctacgacgtgttctacccgatgggctgggacgacaacggcctgcccaccgagcgccgcgtgcagaactactacggcgtgcgcgtggacgtgtccctcccctacgacccggacttcaagccgccgttcgagggcaccgatggcaagaagatcgacgccaaggatcaggtgccgatttcccgcaagaacttcatcgagctgtgcgagcgtctgactgctcaggatgagaagctgttcgaggccctgtggcgcaagctgggcctgtccatcgactggtcgcagacctaccacaccatcggccagcacccgcggcgcgtggctcagaaggccttcctgcgcaacctcgctcgtggcgaggcctaccagcaggacgcccccggcctgtgggacgtgaccttccagaccgcagtggctcaggccgagcttgagtcccgcgaatacccgggcttctaccacaaggtggctttccgctttgaggacggcaccccaatctacatcgagaccacccgccccgagctgctggccgcttgcacctcgctgatcgccaacccgaatgacgaacgttacaagcagtacttcggccaggaagtctactccccgctgttcaaggtcaaggtgccgattctggctcacccggccgccgaaatggacaagggtgccggcatcgccatgtgctgtacgttcggtgatgtgaccgacgttgagtggtggcgcgatctgaagctgcccacccgcccgatcattcagcgcaacggccgtatcgtgatggacaccccggattggatcaccgacccggccggccgtgaggtctttgccgaaaccgctggcaagaccacgttctccgcccgcaagatcatcgtcgacaagctgcgcgagtccggcgatctggacggtgagccgacgccgaccaagcgtatgacgaacttctacgagaagggcgacaagccgctcgagatcgtcacctcccgccagtggtacctgaagaacggcggtaccgacgagaaactgaacgccgagctcatcgagcgcggcaaggaactgaacttccaccccgacttcatgcgcgtgcgctacgagaactgggtgcacggcctgaacggcgactggctgatttcccgccagcgcttcttcggtgtaccgttcccgctgtggtacccggtgaacgcttccggcgagccggattacgatcgcccgatcaccccgagcgaggatcgtctgccgatcgacccgaccatcgatgtgccggaaggctacgacgagtcccagcgtgatgtgcccggcggcttcaccgccgaaaaggacatcatggatacctgggccacctcttcggtgaccccgcagatcgtgacccactgggccgagccggacgaggcctccaaggccctgttcgcttccaccttcccgatggaccttcgcccgcagggtcaggacatcatccgcacctggctgttctcgactgtggaccgcgcgcacttggagaacaagtgtctgccgtgggcccatgccacgctgtccggctggattctggaccccgaccacaagaagatgtcgaagtccaagggcaacgtcgtggtgccgaacgagccgatcgagaagttcggcgcggacgccgtgcgctactgggctgccgccgcgcgcctaggcctcgatgccacgtatgacatcggccagatgaagatcggccgtcgactggccatcaagctgctgaacgccaccaagttcgcgctggccatcggccgtgaggacgagaaccatcacgtgggcgctgccgccgagacctcgtggaacccggccgatgtgaccgaaccgctggatcgcgccgctatggccaagctggctttggtggtgcgtcaggccaccgaggcgctggaatcctacgagcattccaaggcgctggaagtcatcgaatcctacttctggcagttctgcgacgactacatcgagctggtcaagaaccgcgcctatggcactccggacgagcacggcaatgtgccgtccgagaaggctgtgaagtccgcccgcaccgctctgggtctgggcttggacgccttcgcacgtctgctggccccgtacctgccgtacgccaccgaggaagtgtggagctggatgcacgccggttccggttccgtgcatcgcgccgcctggccggtcgtggacccgtatgtcgaggccgccaccggtgcttcccccgagctgctgacttgggccggcaaggccgtggagcagctgcgcaagatcaagtccgaggccaaggtctccatgaagaccccaatcctgtctgtggcactgtccgctgcttcggaaggtgtgaacgcgattcacgccgccttgggcgatatcgcgcaggccggtcgcgtggtcggcaagttcgacttggtggccaagcacgccgaggaatccgccgccgaagacgcgcccgaaaccgaggtcgccgtcgaagccagcgagctcggtgagccgccagccaagaagccaaagcactgagcgttgcgcacaacaacagtaggtctcacggcaatgccgctcgttccgagcctacgggaagcccaccgggcttcccgcttaacggctcggccagccaagaagccaaagcactgagcgttgcgcacaacaacaaaagaggggaacctcctattgaggttcccctcttttgttttttgacgttcggatgacacgactgtgggacggcacgcaaatatcccgcattgtaagctggcggcccacaatagcgtgggccaccacgcgtgtcaaacgttttatatacgcggcgtcccacagaccgaatcaacaaatccttggaatttagccattcttcaaactatagttagctctgacttacaagagggtgtgggacgccgcatcgaaaaagccagtttttgatgcggcgtcccacaccgataacgcactttacgcgtattgggcacctgtcgcatgcggattttcccgcatacaccatcacaccgtcggaatcacgatgaggtatcgggtttcggcggttttttgttgcgtattggggctatcgagctgcgcgacggcctgcgccaagagcgtgccagcatcgctgatctccacggtctcattgatcagcgcgctcatgtcatgcttgagcagcgtgccgccagtgccaaagtcgaacagtactggagcggtgtcaagattgttgccggaatcgccagtatcgctcgacttggctgagtcgttcgttcccgaaccagtgctcttagacgagtcggacttatcaccaccaccgatggccgaagtaagaccacccgcatagttcatcacatcgccagcagacatggacatggtgtcatcgaccagtgaggccttggaatgctgcgactgctgctgttgcgcggctttggcctgcttacgggcggcatcggccttacgcttggcttgggaggcccgggtcttgccgtagaacgattgcgattgcgaatcgaccaggccagtcagtgcctgagcctcggtcaccggaccggaagagacatcaccggacgagccatcgccatcgctgccggaagccgaggacgcgactccttcgaactgatcggagaatcgcaatacaatctggcgcaaggccgtggctttgcccgtatgctcggaggcggtggcaagcgtgctcatcgcggcatcgaccttggattgagcgtcggcgagttcatcgctaccgttggtttcggcgatggcttggctctcgtaagcagtggcgcccgaagacgtgccgccggtcagggcgctcaaattggccgtgtagacgtccgtgtatttcatcgaatacggaatcattgcggcggagagctggctctggccatcggcgtattgcttggagcctcgagtggcttcctccgaagcctcggcggtcagatcatccaccagtccggtggtgccttgctgctggatgcggcgaatcacctcatccaacgcatcgaccgcaccggcatgctgatgtgcggcactgacgttgttcaccgcgttggccaagtcgagtacggcttgcgccaaaggcgtatccccggacagttcgccggccgtgcccatcaacgccggcaactgggtggaggtaccaatcgatccagacaggtgcgtggtatatgagcccacatacgcggccatatagtcttcaaacgtccgcttatgggcggtttcgcgttcggccactacggacttgtccagcgcacgctcattatcgcgcagggtttgaagctgctcgatgagctgttgatgctccccggaaccggcgtcggtcagtgaatcgaccagtatggcggcagaggcgacgagttgggcgacatccgtatcggcagcaggctgtgcggcggcattcgcggcatcgggattagcaccaaccaccggactgctggaattggaaggcaatacggcgagcgccacggaactcatggagaagtctttggcgttcatatagcagctgaattccaagccggttgcggcttttccagctgcggcgactacggtattggaaccttgcgtggttaccgtaatggagttgtcagcggaaacatcatcggctacctgcgtaggcacggtaaaggcgacaaccgggatcgtacggttggcctccttggtttgcggcttaatatcgatatacacgccgatcagtccagatgcgccggcaacctcgtttgcctcgacgtttggaccgtcaagcgagtaggtgacgctgactttccatggcagggtggcggcggaagcggggatacgagaaaccttggacgtgccggaatcactattggcggaatcggtatcagtggaaccgctattgccggaatcggcactggcgccattgccggcgccgcccttccctaccacataccaacggaccggctccccttcggcatcggcgacggcgtacatatcacttgccgtagcgagcaccggaccgtaatcaaccggagtcggacgagacatccaagcaccgccgagaatcgaagccacgcacaatgcgcaactgaccagtgcggcaccacatctcatctacgtatcccattcatacagtcggccactatgggcattccattcccgtattaatgtagtcgctgccggcaacttgccctatagacgaatatccgaaaggtgcccattcgctgcgggcgaatcaggcgaatacgtcgagtacgcccgggtcgccaccggcatcggcgatgcgctggtggcgcttcttggcttcggtaaccacgaattcacggtacatttcggcaatttccggatcaagcccggcatcgatggcgatgcggtggaggcgttcgatctgatagtcctcacgcttggtgtcttcgggcgcgaatccggcgttggctttgagcacgccgacctgcgaggtggccttgaaccgctcggccagtaatgcgatggccgccgaatcgatgttatcgatggtttggcgcagcgctttgatgcgcgccaccgcttgtgcggtttccgggtgggccgccgcctgggcggagtcgatggtggtcctttgccagccgctgctcgtttcgctcatagattcgaggatactcccgattgcggctttgcacgatgcgcaaagtcagatatctcagatgtcatagtcgcctgtgaggatatggctggcatccgcatcgccgaacatggccgcaccattgcccactcccaaaacaatcgaacccattgatacatctttcatctcatatatcgtcagcgtgcatgtgaacgttgacggcaatactacaactgcaatgtgatagttgatgtatttgcatcatatacggcaagggctgcgccccgtatcaatcggggtgcagcccttacactattgttcagcggtctggtcagttgccgttgaccgcgttgccggtgttggcctgctgcacgatggcggcgaggaagtcgcggttggtggcggtcttcttgaggcgcggcaccaacgtctggtaggcctgctctggctccatgccgcccagcagtcgacgcagacggtagataatcggcagttcctgcggattggtgatgagctcctcgcggcgggtgccggaagcgttgatgtcgatggccgggaacagtcgcttgtccgccagctcgcgggacaggcgcagttccatgttgccggtgcccttgaactcctcgaaaatcacctcgtccatcttggagccggtttccaccagcgcagaggagatgatggtcagggagccgccgttttcgatgttgcgggccgcgccgaagaacttcttcggcgggtagagggcctgcgcgtccacaccaccggacaggatgcggccggaggcgggggcggcgatgttgtaagcgcgagccagtcgggtcatggaatcgagcagtacgaccacgtcctggccgagctccacaagacgcttggcgcgttcgatggccagttcggcaaccgtggtgtgatcggaggccggacggtcgaaggtggaggagatgacctcgccctggaccgtgcgctccatatcggtgacctcttcgggtcgctcgtccacgagcaccaccataaggtggacctcggggttgttggcggcgatggagttggcgatgttctgcagggtgatggtcttaccggccttcggcggggagacaatcagaccacgctggcccttgccgatcggggaaacgatgtccatgatacggccggtgagcttgttcggggcggtttcctgcttcaaacgctcctgcgggtacagcggcgtgagcttggagaactgcggacggttgagcgcttcttcaacgctttggccgttgatggaatcgatggcctgcagtggcacgaacttctggcgttggttgcgacgatcgccttcgcgcggggcgcgaatcgaaccatggacggcatcgcccttgcgcaggccgtacttcttgacctggcccatggaaacgtacacgtcgttcgggccgggcaggtagccggaagtgcgcacaaaagcgtaggagtcgagcacgtcgacgatgccggccaccggcaccagatcctcctgcggctcttcgcggcggctatcacggtcattgcgatcgctacgattatcgcgatcatcatagcgacgatcatcatcggcgttgtcgcgatcacggccacgcatgcggcggttacggcgatcgttgcgatcattacggttatcgcgatcgttgcgatcgctacggtcgcggcggctacgacgcacaaactcgtgatcgtcgttctgctcgccgtcttcggacgtttcctcgtgcttctgcgtgggcagcgtggccaggatatcgtcgaggtcacgcacggtttcttcgctgttttccgcagtgcgacgacggcggcgaggctgctcgtcctcatcatcacggactcggcgaatcagcggaacttccacgtcctcatggcgctcgcggcgacgctcggtaggcgctgcatctcccaaatcgagcgtggccagcagatcgccggcctcatcggccttcttgcgcggcttgcggcgagcgaaatcggactggtcgtcatcgcgacgatggcgggccgcacgcggttcggatgcggcatcatcggcggccttacgacgggtgcgtcgcggttcggtctcgtccttcttggcatcgtcggccacgggaagcggcaaatcgagctgcggttccgtggcggccggagccggagccggcgactgggtggccacgtcagcattgtctgtggtattggcctcagcggcatcggactgcggagccttgacgaccttggcggttttggcggccttgggggcgcgcacggtcacaccggccggcggctctccaccattgcgcgccgcctgcagggtggcgagcagctcgggcttgcgcatggtcgacgtaccgcgcaggcccatctgtttagcgagctctttgagctcaggcagcttcatatcctcaagattctggctatttgccactggttgccctttccataccgaacagacccatgcctatccaggcgttaagagtgattattgcggttgcaccgctcatgaatgttcgctgcgtctctgagttttcacgaacttcgtttactgtacaacgccaactcgaccaacgcaaaacggcccgccgaaaaccaaaaaagctccctctgtgacgagggagctcaacaaggtttattcacttctcttcgtggtaggacttttcggtgttgacggaccacacgttcttcttggacgtcttgccggtcttgatgttgccgacggcctccatggcggtggccatggagtggtccatgttgttgtagcggtgctggccgttgcgtcccacgcagtagaggttgccgaagccgtcgaggtactcgatgagctcgtccatgtgctcgtaggtgtcgaagtaggcggggtacgccttcttgacgcgctcacgatgggagtcgatgacctcgtccgggccgttgatcacacgcatgcgggtgagctcggagatcgcgaacttggtgacgtcctcctcgctcatgttccagaacgagtcgccctcctcgcagaagtactcgaggccgacccacacggtgtcgtccacgttcttgaccaggtacgggctccagttgttgaagatctgcagacggccgaccttgtagcccgggtcctgcacgtagatccagcagtccggcacgatcggcggattgccgagggtggggatgttggtggtgttcttgagcttcaggtgcttgaccagcaggcccacggtcacgaagtcgcggtacggcaggccgttggccacctcggtcatatcggccggggcgggcttggaatcagcggcctcgggatcgtcgccggccgcgtcgatggcgttgaccaggtccttgaccggcatcgaggagatgaactggtcgccggaaagctcggtgcggttgccctcggaatcctcgtacaccacggaagacacggcgccatcggtctggcggacctcgaccaccctggcgtcggtcagcaccttgacgccggcggcctcgcaattggactcgacggtctcccacagctggccgggaccgtacttcggataccagaactcctcgatcagcgaggtctcgacctccgcgttggagcgcttcctggggctaagcttctggaaggcgttcttgagcacgcccatgatggacaggcccttgacgcgctgggcgccccagtcggcggagatctgggaggggtggcggccccacagcttctccgtgtagccctcgaagaacatcgaatacagcttgcggccgaaacgattgatgtagaagttctccaggttgtcttccggcagcttgtggaacatggacttcaggtagctgaagccggccaccatggtgagcttgaagcccatggccttcaacgtgttggggctcagcgaaatcgggtaatcgaagaagtggcggttccagaagatacgggacacgcggtggcgcttgagcatcaccttgtcctccgtctccggatcggggccgcccggctccatgtcgtggtcgcggccgagcttcttgtcatcataggagggtgcgccctgcaacggcagaacggtcttccaccaatccatgatgcgttcgtctttggagaagaaacggtggccgccgatatccatgcggttgccgttgtgcttcacggtgcgcgagataccgccgaattcgcgggtcccctccagcacggtcacgtcatagttttccgcgccgccgtccttgatgagttcccatgcggcggtaagtccagccggaccgccgccgataatcactacggattgcttgtcggtcattatgctccttataaacgcaaaatcagagacagtttactagaagccccggaatcgcacaccgaaagatgagcgaatgcttacagaattctcccgatatacgaccgatgcgccgtcttccatcagcagaaaggcgacgcatccaatcgtgaggtaggggtattcggcaacgctgcgtcacgcacagcgcggcgaatcggtttggtcttgggctaattcgtcagcgacgaaccttccatagattcagcgagattcctgcaagtgcaagcagcatcatcttctatcaaccgcaagcaaacaagacacacgatggcaaggttacgaatctgaacttttgctatgcgttgtatgaacaatgcgcgacgccccgccgtaagatgacggaatgccgcgcattgtcaatacaggctgtatcagacgattgcctgtcagtgaatatcgtcgggaatgtcgatatcggttttctggacttcttcgacgttcacgtccttgaaggtcacgatgcgcacggacttgacgaaacggctggaacggtagacatcccatacccatgcgtcagtcagctgcacatcgaaatacacgtcctggccagcggaacgcacgttgaaatcgaccttattcgccaagtagaagcgacgctcagtctccaccacataggtgaacagcttgatgacgtcacgatattccctatacagcgcgagttcggcgtcggtttcgtaattgtcgagatcctcggcactcatgcttgtttactcactcactttccgtatcgcgtttgcggccgcggcccagcgtacgccaccatgcttcctttgagggcttgcgttccgcctggccgtacggccagttgctttcctcttcgagactgtggcgcgtgttcttctgcgtatcgtcgtggtgcccggcctgtggctcgactggctgtgcggccgccggcgtctgggcctgggactgcacgtcactcgtcgtgacggcggctgcctcaccacgctgtgccggctcgggttccggcttgttctgctggatggcgatggaatgctcacgcgcggacagcgcttccttgacacccgggttgtcctcaatcaagtgcataccaaaagcgtcaagcgaacgaatcggatcgtactcgtcgaccaacgtgtccatgacgataaggtcctgatatttgttgttttcgacatcccacaacgcgtcgcgcgaggtgccggacggcacgaagccgagcgactggtagaccgaaatcgaacggctgttcttttccggcacgctcacccagatgcggtgcatgcccaggccggccggttcgggcgcaaagccgtaagtcatcacacgcggcatggcgtcacgggagtagccgcggccacggtactcacggcccaagatgatctggatgcgggcggacttggaccagccgtcgatgtcgatgaggaaaatcatgccgatgacattatcggtgctggccgcatcgagctgaccgtcatcgtcatggtcggcgtcagtcaatacggcccatgcgatggtgcggcgggattccgggtcgcccacgccggattcggcgggtgcctgaccggcttcccaggcttgggagcggcggacccatgtgtgtacgatggcgcgttcggtgaccgcatccttgccggtgatcttggatgcgccatagaaggcatcaagttcatccaaacgagccaggtcctcgatggtggcggggcgcaggtgcaccatttcgccacggattggcggaatgacgatgctctgtggcagatcgcgcttcagttgcgcttcggtagccatgctcagcgtctcgttggttgcggtcatcggtatacatcccccggttcggcttgtttcggctcacggtccagtgccgaacatatcttactcgactgggtgaacgctggaaatgctctgagacgactttcttacagaatcaataaaggctcccgctggcgggagctgtccaacgaatttgaactggaggatttccctacaaataagtgctcccgctggcgggagctgtccacgaagcggactgagggtggtcatccgtacatggcgaccaccctcagtctcactccgttcgacagctcccgccagcgggagccagtgaatctaatcagcccttgatcttgcccatgacgaccttggtgacggccttggcgtcggcctgaccgcgcgtggccttcatcacggcaccgatgatcacgcccatcggcttcatgttgccgctcttgagcttctcgacgacatccgggttggattcgaacgccgcgtcgacggccgcctcgatggcaccgttgtcttcgacgatcttgtagtcgtgcttcttgacgacttcatccggagtgccttcgcccttaagcacgccttcgacggtctgcttggcgagcttgtcgttgagcttgccggaggcgatgagcttctcgacctcggccacatcggccggggtgatcggcagctcttcgagggacatacccttggcgttggcttcgcgggaaagctcgcccagccaccacttgcgggcaccggcggccttggcaccggccttgacggtttcctcaatcaggtcgagggcgtcggcgttgaggatgtcgcgcatctgcagatcactcaggccccactcagacttgaggcggttgcggcgctcacgcggcatttccggcatctgggccttcatctcctcgatgtgctccttggtgatgtggagcatgacgaggtcggggtccgggaagtaacggtagtcgtcggcatcggacttcagacggccgccggcggtggtctgcgaagcctcatcccagtggcgggtctcctgcagaatctccttgccttcgtcgaggcgcgcggcctgacggcgaatctcgtactggatggtcttctcgatgccgcggaacgagttcacgttcttggtctcggaacgggtgccgtagggggcatccgggcttggacgcagcgagacgttcacgtcggcgcgcatgttgccctgttccatgcgggcgtgggagatgttcaacgca

SEQ ID NO: 1121 - DNA, 3256 bp, Unknown
  R81_24m  MAG No. k141_2679
ctcgcgaatacgacgccgacgaagacggcagtctgctgaccggcgaccccgaggccctggcctccgcgctcaacaagatctcctatggtgcccagaccacgcccatgcgcaaaacggccggcacccagtccgtctccgcgatgatgattgccaatccgttctccgcggtcggtttctccaaactgttctccacgcatccgccgactgatcagcgcatcgcgcgcctgatgcaaatggccaatgaaatgaacggcactccggtggccgcatccacgtattccacgcgcgcaattcactagtccagcacagaactcaaaccggcacatggcgcaaggtgccgcataggtgatacacttgcctctcgtgcgtggaagcgcacatgcggacgtagttcatcggtagaatgaaagcttcccaagctttagaggcgggttcgactcccgtcgtccgctccatcgattttccttgaaatttcaacggttttccctcttttgagagcttattttcctgccgtatgaccgctatatgagaacaattcacgtcgtccgcgtatcgtgatgggcgatgtgtgaacccaagaccgctgcaaccaatggccaaccaacgccaaccctcgaacgcaccccgcacgacatcttcgtcggtgccggactggcgctcgccggaggcgtcttctggggcgtcaacgccaccgtctccaaactcctgatgaacgactatcacgccgatccgctgtggatcgcctgcgtgcgcgagctattggccggtgtcatctttctggtttgcgcaggaatcttcacgcctgacaagttcatcaactcgcttaaggactaccgttcctacccgagacttctgctgtgcgcgttcttctgcgtgctcatggtgcaggtctcctacttgaaggccattgactggaccaattccggcacggccacagtgctgcagacgctcaatctgctggttgtactcgtattcgtatgtattatgggcaaacggctgcccgacaaacgcgaaagcatcggtgtggtactcgcttttgtgggcacggtgctcatcgccacaggcggcgatctcagccagctcagtctgccgctgcccggtctgctgtggggcctgaccgatgccgtatgcacgtcactgcttgcgattctgcccatcgcattaatggccaaatggggcaacttcatggccagcggcgtcatgttcatcgtttccggcctaatgctgctgccgctcgtgcgcccgtggaccaccgcccccgcgttggactggttcggcattggtctgatggtattcaccgtggtgttcggcacattcggtgcctattggctattcctcggcggcacccagcgctgcggtgcaatgcgcgccaccatgctcggcaccagtgaacccgtaaccgccactatcaccggtgtcctattcgccggcgcggtctttaccccgaccgatttggtcggcttcgccatgattatcatcatggtgttcctcgtgagatagttcacagctcgcctggccccagaacctagtctggcgggcacaccccgagcgataatgaagccatgacaatcgcaacaccggaacgttatgccgaaatgctagacgccgcacgacgcggcggctacgcttaccctgccatcaacgtgaccagctcgcagacgctgaacgccgcgctgaaggggttcgcggatgccgaatccgacggcatcatccaggtgtccgtcggcgcagccgcatacctttccggcatcggcgtcaacgaccgtgtcaccggatcgctggccttggccgcttttgcacacgaggtcgccgcgaagtacccgaacatcaccatcgccctgcacaccgatcactgcgccaagcagtatctggacgaatgggtgcgaccgctgctcgcacatgaggccgatcaggtggcgcatggtcaggagcccacattccagtcgcatatgtgggacggctccaccgtgtcgctcaaggaaaatctggacatcgccgaggagctgctcgataagtcgcaggccgcgcacacggtgctggagatcgagatcggcgcggtcggcggcgaggaagacggctattccgccaaaatcgacgaacgcctctattccacgccggccgatggccttgaagtggcccgtcgccttggtttgggcgagcgtggccgatacatggccgccttcacgttcggtaatgtgcacggctcctacaagcccggcgtggtcaagctgcgtcccgccctgctcggtgatattcagtcccgtgtggcgcgcgcggtggtcgagggtgagctgcccagcgccgccggcatagtcgactttcccaacggcaagccgttcgaattggtgttccacggcggttcgggctcccgtccggaagagattgcagaagccgtgagccatggcgtgatcaagatgaacatcgacaccgacacgcaatactcgttcacgcgcccgattgccgaccatgtgttcgagaactatgacaaggtcctcaagatcgacggtgaagtgggcgaaaagaagttctacgatccgcgttcctggggccgcaaggccgaggaatccatgtccgcccgcgtggttgaggcatgcaagcaactcggctcggccggcaaagcactcagataacacccaaataaactgtcattcgccgtggcggcgccttggtgtcggcccgcctcgcgcaacgcgcggcaaagacaccagaagcccgattgcgtgagatggccgcgccccgagtagagggtgtaaggtagtctgtttccggcggaatcgtgcgaatgcggaggtgcatcatgcctggaattgttcttatcggtgctcagtggggcgacgagggtaaaggtaaggctaccgatctgatcggcaccaaggtcgattacgtcgcgcgcttcaacggcggcaacaacgcgggccatagcgtggtggtcggcgatgagtcgtacgccctgcacctgctgccctccggtattatcaacccgaacctgaccccggtgatcggcaacggcgtggtcgtggatccggaggtgctcttcgaggagatcgacggcctggaatcccgcggcatcgactgctcccacctgctggtgagcgaggccgcgcacatcatcgcgccctaccaccgcacgctcgacaaggtgaccgaacgcttcctcggcaagcacaagatcggcaccaccggccgtggcatcggcccagcctacgcggacaagatcaaccgtgtcggcatccgcgtgcatgacctgttcaacgcc

SEQ ID NO: 1122 - DNA, 3195 bp, Unknown
  R81_24m  MAG No. k141_2954
attgtgctgctgtccgccgaattctttattcccatgcgtcagcttggctcgttcttccacgtggcgatgaacggcatgacctccaccaagcgcatcttcgctctgctggacaccccggagcccgagcatggcacggcgaccctgccggccaacgattccgattccgctgacgacggtctgacggtccgcttcgaccacgtcggctattcctatgatgatgccgggcacggcgactccaagtccgcatccgcaaagaccgataagcaaggtgaaaccagccccaattccgccgtcgctcctgcgctcaccaacatcaccttcgccgcacggcccggtcagttcaccgccattgttggcatctccggttccggcaagtccacggccgcctcgctgctcgccggtacactgaccggttaccgaggttcgctcacgctgaacggcgtcgaggtatccgatttgtcaggcgaaacactggccggagccgtcactgtgattggtgccagcagccatctgtttgcgggcgcattgcgcgagaatcttctgatggccttgcccgatgacgagattcctgattcgccggattccgtggactcccgtctgtggtccgcgctcgagcaggcgcgcattgccgacttcgtgcacgcacagccgaacggactgggcatgccgattgagtccgatgccgccaacctgtccggcggccaacgccagcgcatcgccatcgcccgcgcgctcctgcatgattcgccggtatttgtgttcgatgaggcgaccagcagcgttgacgtggaatccgaagagctgatcttggatacaattcgcgaattggcacaatcccgcggcaagacggttattatgatcacccatcgcatggccaacgccgaacacgctgatcaagtggtggtgctcgaacacggcaagtcggttgagaggggcacccataccgagctgatgacggcggacggcgtctacgccaagctgtttaccacgcaggcagatattgagaacttcggagaaggccatgctcggcgtgtgctgcaggttggttcccgcaagcaggagctgtccgacgacagtcggactgagggtggcgcagcgcgcgtaagcgcagaggcgggtatgacggttgaccgcctgcagtcagctttgccgacggcttccgttggcgggagtgagcaggcctcggctgagactccggctggtgttgcaaatagcgattcgtcttccaaaatgagcacattccaagtgatcaggcgactgcttaaggaagcccgacctctggcaggactgatggcagcggcctccaccgccggcaccatcggccatctttcggccactttcctgcccgtgttcggcattatcgcggcatttgcacttaccggtaatccggtgtggggcatgggtgttgcgcccgccgtcatcatgatgattatctgtgctcttctgcgtggcatcacccgatacattgaacaatatctgaaccacaatgtggcattccatctgctcgcactcttccgttccaaggcgttcgccgcgttgcgcagactggcgccggccaagctcgcgggcaaaggtaagggcaaccttatcgccatgctgaccaccgatgtggaactgcttgagatcttctttgcccacaccatcagtccggtggccatcgcggtaacctccaccatcatctacacgattgtggccgccaccctaagcccatggatggcgctggcgttgattgccgcccacctggttatcggcatccttgtgccgcgattctttgccaccggcgtacgtaaccttggccctgccatccgtggcgctgccggagaactcgacgatgtgatactcgatgacatgcgcggcctggacgaaatcatccgatttggccgcggcgaggaacgtgcgcaggccatcgaggaccgtacccatgcgttgtggaaggatcacaccaaactcagcaaggtcaacggccgtttcaccggaatcagcggactcttggtggctgtgctcacagcggcttcggtcgccgtggctattgcctgtgccggcgcgaacccgcagagcattccggctctgattgccgccttcgtgctgttcgccagctcgttcgaaccgactttggcgctcgccgccttgcccgctaacctgactcagaccttcgcgtccgctagccgactgttcggactgatggacgaggtgcccgctgtgaccgagaacggcactgttgtgccgcaggagtatatgggcatgcgtcttgatgacgtcacctttgcatatgcgggggagcatgaagtcctgtccgacttctcgcttgacgtgccgcagcatggcgtgctgggtatccaggggccgtccggccgaggcaagtccaccatgctcaagctgctgctgcgctactgggatccgcagcgcggtcaggtgacgttgtccggcacgccgttgcccgagatcgatgtgcatgctcgccgacgtattcaggccatgatgagccaggaaacccacctgtttgatggctctatccgagacaatctgctgattgctttgcctgagtccgaggttgaagctgcaaatgttgcaggcaatggggaagtgggtgccaagaccgttgattcccgacagcagcagttggcggcgcaatcggcagagggcgatgccgttcaggtggcagcagctgacggtctcgatgctcgtttgcgtcaggctctcgccaaggcctccgtgcttgatctcattgattccctgcccgatggccttgatactcaggtaggcgagttgggcgaccgtctatccgaaggtgaacgccagcgtatcggtttggctcgtgtgttcctgcgcaatgctgatctggtgcttttcgacgagccgaccagccgtttggatgctttgaacgaggctattattctacgttccattcacgctatggccgtgggtgagcagcatgcagacaaggagcgcggcgcggctgtggtgctggtctcccaccgcgaatccgccatgcgcattgctgatgcggtactcaatctgtaactgcctgtaactacgcgggaatcgcatcgcattgcgttacgttaccgcgttgcattgcggttcctcgcgggtggcggcgatgccatctccggttgtcattgcgttgctgcgtttgtgttgcgatatgtgatgcggcaacgcagcaatgcggcaatgcaatgtgatgtggcaacg

SEQ ID NO: 1123 - DNA, 4031 bp, Unknown
  R81_24m  MAG No. k141_3120
gcgctggacatggcgctggataagttgacgctgcgtctgcgtcgtactcgtgaccgtcgcaaggatcaccgtcgtggttacgcaaacccggtcccggtggatctgggtgttatcgccccggagcccgagccggaggtgtcggaggaagagccgaacaacagcccgcaggctgcggtcgcctccgatcttggccctggcgaatccgtggaggtccaggttggggatacgccgattgtcatccgtcgcaagctgcacatcgccgagcctatgagcatcgacgaggcgctgtacgagatggaactgatcggacacgatttcttcctgttcgtgaacaaggagaccggacgcccgtccgtcgtctatcaccgtcacggttggagctacggcgtgttcgaaatcgacactccggagaatgtcaagaaggcctgagggtaaggcctgctgacatgatcagctgataccgcatggaccgcttccaatatggaagcggtccattttttcgtaaaaaggtcgaaaaattcgattgctgacggtgcgaggcgctattctggtacgcggacaccaccacttatcagtcaagggagaacccagtggtcgatattgttgacaaagccctgcgaatgggtgaaggccaccagctcaagaagctggagaacgtggctaaggccgtgaacgctctggaggatgagatttccgccctctccgacgaggacctgaaggcccaaaccccgaagttcaagcaggaaatcgaaaacggcaagagtctggacgagatcatgcccgaggcgttcgccaccgtgcgcgaggtctccaagcgcaccctcggccagcgtcacttcgacgtgcagctcatgggcggtgccgccctgcactggggcaacatcgctgaaatgaagaccggtgaaggcaagaccctggtcgccaccctgcctacctacctgaacgctctcgaaggcaagggcgtgcacgtggtcaccgtcaacgactacctcgccagctaccagagcgagctgatgggccgtatctaccgcttcctcggcatgaacgtcggctgcatcatcaccgagcagaagccgccggagcgccgcaagcagtacaacgccgacatcacctacggcaccaacaacgagttcggcttcgactacctgcgtgacaacatggcctgggagaaggccgacctcgtgcaacgcggccaccactacgccatcgtcgatgaggtcgactccatcctcatcgatgaggcccgtaccccgcttatcatctccggcccggccgaaggcgacgtgacccgctggtaccgtcagttcgccaagctggtgctgaagctcacccgcgacgaggactacgacgtcgacgagaagaagaaggtcgtcggcatcctggacccgggcatcaccaaggtcgaggacttcctcggcatcgacaacctgtacgagccggccaacaccgccctgatcggctatctcaacaacgccatcaaggccaaggaattgttcctgcgcgacaaggactacgtcgtcacccaaggcgaggtgctcatcgtcgacgagcacaccggccgtatcctgccgggccgccgctacaacgagggcctgcaccaggccatcgaggccaaggaaggtgtggaggtcaaggccgagaaccagaccttcgccaccatcaccctgcagaactacttccgtatgtacgacaagctcgcgggcatgaccggtacggccgaaaccgaggccgccgagttcatgaacacctacaagctgggcgtgctgccgatcaagaccaacaagccgatgatccgcaaggaccaggacgacctcatctaccgcaccaagaaggagaagctggccgccatcgtcaaggacgtggccaagcgtcacgccaagggacagccggtgctgctcggtaccgcctctgtggaaagctccgaagtggtctccgccctgctcgacgtggccaagatccctcatcaggtcctgaacgccaagcagcatgagaaggaagccgccgtggtcgccgtcgccggccgcaagggcgccgtcaccgtggccaccaacatggccggccgtggtaccgacatcatgctcggcggcaacgtcgagttccttgccgacgccaagctcaagtccgaaggttactctccggaagacaccccggaggagtacgagaagcgttggccgggcaccctgaacgagatcaaggcccaggtcaaggacgagcatgaggaggtcaaggagctgggcggcctgtatgtgctcggcaccgaacgccacgagtcccgtcgaatcgacaaccagttgcgcggtcgttccggccgtcagggcgatccgggcgagtcccgcttctatctgtcgctggaagatgacctgatgcgtctgttcaacacccagctggtggcccaggtcatggccaagggcatggaggaaggccagccgatcgaggccaagtccgtcaccaagggcgtgcgcaccgcgcagaaggccgtcgaatcccgtaactatgagattcgcaagaacgtgttgaagtacgatgacgtgatgaacaagcagcgcaccgtcatctactccgagcgtcaggccgtgctcaagggcgaagacatccacaaggacatcctgcgtttcatttccgacaccgtcgagtcctacatcaagggtgccaacaagggatccgagaaaccgaaggactgggattgggagggcctgttcaaggcgctcaacaccgtgattcccaccaaggtcgacgaagacgaggtcaggaagatcgtcggcggcctcaagggtgcgaaggccgtcgaggccgtgcgcgacctgatcgtcgaggacgccaggcagcagtacggcgaaatggaggagaccatcggcgagaccggcttgcgcgatctcgaacgccgcgtggtgctcgccgtgctcgaccgcaagtggcgcgagcacctttacgagatggattacctcaaggacggcatcggcctgcgtggcatgggccagcgcgacccgctggtcgaataccagcgcgaaggctaccagatgtacaactccatgatcgaggccattaaggaggagaccgtccagctgttgttccacatcgacatcaagcaggtcgccaccaccgacgaggccgttgacgaggtcgaggagaccgccgaaagcgccgacaccatcgccgtggcctccggccccgacgagaacggcgaatccgtggtcgaggccgccgagggcgaagtcgaggaagaggacgaggatgcggatgcggacgccaagcaggcgatcgccgaatccgcagccgcctccgaggccggcgagtccacgctgcctgttgccggcccggctccggtcagccacgccgaaggcaaggtcccggtttccaagcgtccgaagagcgaagagctcaagacgccgtgggccgacggccgcaccttccctggcactggcaagaacgccccgtgcccgtgcggttccggccgcaagtacaagatgtgccacggccagaacgagaagtgacgcatcgctagttagtaactagctcatggctccccacacggggagccattttctatgcggttcatcagcatgtattcgtgcggtgccgtacgcgcgggacggcacgcgattttcgcggattttgacgtcgtatcccacactgttgcgggatggcacgagtgtcaatcgattgactagcgtggcgtcccgcagtacgaattacggaatcgttgaaattccgccattctcggtgttatggtgtcacggtccgcaaagggtgatgtggaacggcacggctcaaacggcgaaaatgagctgccgtcccgcagttttacgggatagcacaaaaaagaggcttctgctgttttcgtgggttgggttcttggttgtggtgggcgtatgtcgagtccgccgcggcggagcatgacgagggcgatgggattgttcgcgtggtggaagccgtaggccatgcggatggtgaccttgatcctgttgtcggacgcctcgagcctggcgtttgaacagcccaattcgattgtcccgaggatgtcgggcccatga

SEQ ID NO: 1124 - DNA, 35444 bp, Unknown
  R81_24m  MAG No. k141_3138
gaggcgatggactcaccgttcctgcgacgcgaacggatagactgtatttggggcatgctgatcattgcctttccggacctttcccgaatggaactagaagcaccatcaggctaaggcccacgggtggtcggcatgcctttctgcctaaacccgaaaaaccttcgtgactaaaacctcaacttcctattgaacaaaaacactcgccggtctggtggttcgaggcggggcgcccggaccggccgcacgtggccggcatcgcctgcgtgcgcatggccaacggacgcttcggctgcacggcgagcccgccgacgtgctcgcccgcgggctcgccggccggtcgtgcgccaccgccatggacaccggggggcgccgcgggcgccggaacaggcggtatcatggggccgcctcgcatggcggcgcggacggtctcgtgcgccgttccggccatggcgcgcggtgcatcggcctcgtgtacgccaccggggtcggggaatccggcatgcctcccccggccggcacggccggcgacccgtaccgccatggccgggagcgccgacggcgcgtacaggaccctcgtctggcggcacgagcccttccgggatccgagggacccggaatcggcgacgttccggtgggtctcgtggcggggacccgaagcgtccgcaccggcccccggactgcaggacaccggaacggaccgaaaccgggtattgcgcgaaccaagcggtgcaagccgccccactatcagagcggaacaaaaatcaggccatatcattatgattaaggttcgcgagaagatctgaatcccattcctgttgtcgaatagaggctttacatggcggaaaataaggtgaaaagaaagcatttagtctatgttgacgtactgaatattatgtcatgcttcgctgtggtcatgctgcatgtttctttgaatgttttcaacccttccgacacttactggacgcaggcggttttatttcaggcgattgccattttcgctgttccaatttttttcatgattagtggtatgaaccttattggttatgctgataaatacgatacgaaaacattttttaaaaagagactgtggcgtgtaggtcgtgcgctcattctggcaagtgtcttctgctatatcttattctgcatatttccgttctctttttatggcgccgaacagtatgcgagcggaattggggtcagggattttgtatcgcgttttttaacgaattcaataaacgacatttattggtttttgtacacaataatttatctatatatgttaacgccgttgttgactcagatacgaaataataagaaaattctgcaatatttgattgtgctgcagtttgctattagcattctaattccgttaattgaacgatttggcgtacctaaaaaatatttcggaacccttttcaattggccgctgttctcttcaagcgcattgctttattttttgttgggattctatatcgccaattacctgtggaagcttcctcccctttggcttgcaggaatcatttgtgtaatttcggctggggcgatgtttttcggtggtttgtacactaacggatacttcgcagtacgcgatgttgaataccatagctacgtgattagtgcttcctctccattgtgtgttattgaggcggttgcattgttcctatgtgccatgcaagtggaacagcgtttgcgggagatatctcctacggttttgcattgtatccgcgaggtttccggtgcatcccttggcgtatatcttttccatattttagtgattaattggatgggaaagcgcaattggggcaatgtatctcaattctggggagagcatatgggagtacgagccatggttgtatatttggttacgttgattgtcgttgtcatatgtagacatattctgatgcagattaagaaaatatttactaagcggaggcctgattgtgttgcctgaaatagtattgcacggagatgagaagaaacgatttgctggatggggattcccagtggtactgggtttcgtcttcgcttgtggaacgaatgcttcgactgatgcgatagttccatttgatcgtccgtatttttatgcgcagtggctgctctttgcagttctcttcctcgcggtttttcagattggtttcaaaatcgttcagatgggagcatctgacggtttaacgaagcaggcttcgaagacgaatgctttttcgaataagtttttgttgcttcgatttgagtatggccaatcaaaaaagtccaagttcaaagattctttgagaatcttggctgcttggctgccgtatattgttttgctctatccaggtgttttgtattgggataccggagatcaagtcgcgcagttcttcggaatctctgctttcgggcagaagccgggcaagatctgggatcaccatcctttcttcgatacctatctatacggaggattcatttggctcggtcatgcaattaccggtagctacaatgtggggattttcctatatgccattgcacaatgtgtttttgttgccgtcgcacttgcgtgttggttgagttatttgaaggaacgtggcgtcggacgagttccgttgaaaatatgcgccatgttcttctgcttcttcccgatcttccctatagcgtttatgagtctgtcgaaagacatcacgcatgccgcgttctttatcgcatggcttctgatgttcatgcgcttggttgacacgaaacttgaaaaaatcaagcagccttctttcttctttggtttcgtgattctcggactgtgctcttccctgagcaagaaaatgggaatgtatatcattctattctgtttgattatcctcgtctttggaaaattcaggatacgattcaaggcagtggttgcggggattgctgcatttctttttgcaatcgtcagtatcgttctgcctaattactactatccgaaggcgaatattgttcctggaggtggacaggctgcattcgcgatgccgattgaactcttaggacgttcggctcacgcgtatcctcaggatgttactgattcggaaaagaaagtcattgaatcgtatctggtatattcttgggatcagattagcacgcaatacaatccgtatattgccgaccctgttacgggatataagttgcgcaaaggggcttctacgccggatttcctcaaggtatggttaaagattggtttgaggcatccaatgacatatctcaatggttttgtctgtcttgaatctggatggatctccttttccggaaatgataaatcttctgtttcctataaggatgtaaagaaatcggtacaatatccagtgcagttgcaaatggatgccagcgtatacactgtcgcgaatgaagacactctcggcaagctaattcccaataaagacaagaattgggcacaggaaatagtcgacagcattacttctatgctgaaatcgattcctgtggtgaatgttcttacctatgtggctttctgggcatcggtatttcctacgtttatcgcttacctgctatggcgtaagcgtaaagaatatgtaacagctaaaacgatgttccaattgctgccttacttcgtatcggcagcttcgctcttcgtctatcctgtgtcccgtgtaacgggaggtaaacatggcggagatgctacgagatatatgttccatgcattgttgcttgcgcctatcgtgatagggcttttgctttcgctaaagaaaaagccccaaaaagaaaaataaatagacggagtctctaccaaggacaatcgggataaggtaagggcgagatgattcgcccttaccttatcccgattgtcttaccgcctgccgcgtgctacgcgcgcgatggccttcaacgcatcacgacgcctcgaaccaatcggcatcaatgggtcgatgaacttgcggatcggattgtcctctccgaccgcacgctcatgtttcggcaggaaggcatcctccgggatttgcggctcgttcgccagcgccacgcgcttgatcagacgttcgtagaacggtgtttcgcgggcatagcgccagtagatcgaggcgtaatcgcaatccgggtccgcccacggcttctggtagccggcatagtggatgatctgtgggttgctgcgcgactgcatgtaggcgtcgtagatatcgttcggtgactgggtgaacaggttgtccacacgtccgccacaatcgtgcaccacgttccattcccatggcagatacagcacgttaccttcgcagtgcgcgttgagcacatcctggtcgttgtagatgaaatcgtcattcgatgcgtaagcgagccattgctcgatggtgtaatgctcacgcatcgccttggtattgagcaccagcacgccagcctggaagtaatcgtaggggttctgcatcttcagcacggtcttcgcgtaattcatacgcttaccatgctttacgttcaaattgccaaggaaatcgatatcgcgcactgcgccaagtagcttgccctgcaaatcgatgttgtagagctttgcgatatcaccattgatgatgatatcggaatcaaggtacagcaccttgtcatagaacggcaggagcttttgaatcaggaaacgatagtatgtttccacgctgatatgggcgttgttggtggaaagctcatatccggcaagttcgcggtccacgttggtgaatcgcagattcatgttcgggaactgtttgaagaacccgcgcatacgttcctgcttgtcccaagagatgttgcgctgcagtacggtgacatcgtagaagtagctcggatcagcgttcttcatggctgagtacacggtagtggtcagctgcggcacgtaattgtcatccgctgcgaacaccactggaatgatcggcttatcagtgacgtcaagcggcttgagctgctcggctggttctggattggtgaagtgcacgcactgcagttccttgaatttccaattggatccgatgcgcttgtgatgcatgagatagatattcagcaggcgttcggaaagatggcctggcgtacgcagtgcttccttgctgtacgtgctgtaatcggtgttcttgtcgaattcctcaaggatcgggaacatccactcgcagtagtcaaagaagatttccttcttcatgatgaacatgttgcagaagcatgccttgttgccgttgaagaaaccctgcgcatcctccttataatcaggatacatggcgcacagaatctgataacagcgcttcaaatcgtcatcgtgcagcaggggagcggcctcccacagagcgcgtgggcttccatacttgttgatgattatatccagattgccgaacggtgtggtgatgacgtcatactgtttgaccacgcgggcgatgttctcatcatccagaccgtactccttctcagccttggcgtcgatataatcatccataatttcaccaaaggcattttcctcatgcgctgtttcggagaaatcaaaataacggcggtaatggcagaagccgtagtagtcggcattgatgtttttccatgcccagtactgcgtggtcagttcgcaatagcgtggattgagattggcgatgttctcgccttcgtcatcatggaacgcccaagggaagcgttcgttcttcgggccaacctgtactggttgcatgatggcactgccaaaacggtcgacgtttttatgcgcggtgacgaaaatgcggatatcctgcttgtcgtagttttggaacgcttcggtattgcgggttttctcgatgagattggtcatatgggaagtggcgattcgcttcatctcatggaatcttatggtgtctgcagatacttgatcggtaggcatactgatggcgttggctatgctgaaccagctgttcagatcagcgtcatgcggaaggagctggttatcggaaagcagcgcataagcatcatcgcgtacgaaacggtacaattcgcgccccgtgatggccgggccgaacacagcttccatttgcttggcggcctcaaccttttccgcttccggaaccctgaccttccaatcattggcaaggatttcggtcgccttgcgctggaaaccttgtgcgcaagcgtgaagcatatcggaatgctgctcatcggcgaattcgtaggctgcatcgaaatccgccttgaaatggccgcaatagcgggcatacttcgcagcatcgatcatatttgtgccgcttatgccgcgaccgtagtaatacacatatccgcggcattccttgaaggaatggtagctgttggcgaatgccgaaactacgaagcactcgtagccgtcctgagatcggccaagacgatcgcgggtcatggcgttgaatgcttccttaagtacggaagtcttgtataaacgctgggttacgcgccaatcgaccttgtagcctcgcgtttcatcgaaaatgtcgcggacgatatcttctccagtggaatcgggcgtgggagtgttgttgaaggtttcgaaggcttggcgttcgttttccaaaaggtcattggctgcgacaacggtaagaccgaaatgcagtacgtccacgggatgcttgtcgatctccgcggcgagctgttcgcacatatcaggcttgagggcatcatcgccatcaaggaagaacgtgtattcgccggaagcgttttctacgcccgccatgcgagtgcggtgtgtgcccatattcgggttgttggtgactactcggatgcgtgcgtcctgtgcagccgcctgtactgcgacctctccgacattatctgggctcgcatcgtttatgacaatcgcttctatatcggagaaggtctgattccgtactgagtcaagacattcctgcaaataatcgccgacattgtatgcgggaatgacgattgagattttgggcattgctcttccttatttggccgcattgatgtattacttgctgagcaacagtgtactgttcgacttcgaaaagcacactttggactactatatacccagtgctcattgagaaataaggagggcatgtgctgtttgcagattggttgcgcgtgaagaaaaataagttgcgtcgtgcgggcacgcatgttctgcgtgcgatgaagaggcgtcatcctcagattatcgtttccatgacttcatatcctgcacgcatcaataccgtgcacctggcgattcgttcgttgcttgcgcaaaaagtgttgccggacaaaatcgtgttgtggctctgcaaatcggattttccgaatcgtgaaaccgatttgccccaaacgttgcgcgacgtgttgtggcatgatgtggaaatccgttgggtggatgaggacctgaagccccacaaaaaatatttctgggctttgcaggaatttcctgatgattacgtcatcaccaccgatgatgatttgctgtaccgcaatacgatgattggcgatttgctcgcagcacacgaagcccatcctcatgcgattgccgctgtacgtacgcatttgattatgttcaacgaggacggatcccgtaccaattatgaggattggatctacgaggcacctcattaccatcccgcgcttgtaggtgtgccgtccatgcggatcttctccacgaatggggcaggcacgctgtatccgccgcatacgatgcctccagagacgtttaatgccgaggaaatcaaggaaacttgcctgaccgctgatgatttgtggctgaaggtaatgcaagtgaaagccggtatccccgtggttgcggcaacagacgatcagttgctgaattatgtgcctggcacgcagggggaggaagcgctatgccaccagaacaccgaaagcggtgtaaacaatattgtgctggaggcgattctggaagagctgcaagccaaaggtgtgttgactgacgatttcgacaagcgcgttgccgatcctagcttggatgctttgattcactaagtgcataggcagaaactgccgcgatatttgctgtgacttgtttgacatgaataattgcgaggtgacctcaaacagccacggcttggtctgcgcattttccggttttattaagccactgtgattgattcttcctgtgcgttttgcagtcgccgtgagcataatatggttttgttgttactgcaacacgttaaggagaaaagatgagaaggaatcatggattttctcgtgtgttaggggtgatcgtcgcaagttgccttctagtctctggattcatagcgtcaccggcaaatgctgcggaggacattgaaaagtcagtgcaatcgcggaaaattatggatgaacggccggcagtgcttgacgaaaacactccatcaacgttttccgaacgttcgaatgagccggtttcatcggtgacgggcgtcactttgggagatggatacaaggcacgtaccgattacataagcattgaccaacgtaataccaaacgggatgcattgaatgccgttatcaagtggcgcaaagatgcactcaatgatgcgcgtattaaattcaaatacgacggttcttggaaaacggtgccggaatatttgaaagcggttggtatcagccaacaggaatacctttctccaaagtggtcgaatgctttggagcgtatcgctattcagcgtgcgcttgaggcatatacatgggctgatgggcacacgcgtcctgatgatgattggtgttttggggctagttacaaaggtttgacatccaatgctgaagtacttgcttggggtacatggaacatatcggatgcagttgatttatgggcgagcgagaaatccgattacattaatgaggtgaatggtcatggctccggtgtgactggtcactatacgacgttgacagatcccgattacggttcatatggctttgctggcggattcagcgatagcagtgcatattctggcgaagcagtttccagagggtatgcgtcggaatattcggatgaaacgccaaccaatttaaatggctacggacgatttgagatttcagtcagccaaaggcatatcaacgagggcatgacgtggaagggattgcactggaacagctcatccgctctcgagcccggcaaaagcgatgaagcagtggtgcggctttcctatggtgctaatcggtacaacctgcttggtggtacatggtcatcgtcgaacacggccgtggcaacggtgaccgaaggaaatattaaaacgctcaagcgtggcaataccgtcattaaagtaaatgctggcgggcggctggcgcaaggtaatgtacgtgtggctccggcaatgcaaaggattttcggtgccacacggtacgacactatgtctcaagttgtgcaaaaagaaggacttaagcaggggcagacggtaatagttgcttctggcacgaactaccctgatgccttggcctcatctagtctggctggtgctttggatgcgacaattgtgctgactgatccgcagtcgttgtcagctcaggcctcggaacggatcgccgccattaaaccgagtcgaatcatcattgctggaggccctgccgctgtttcgcagaatgtcgagcaacagctgaagcaatatagctccaatgtgaggcgatattacggtgagacccgttatgacacttcgctggcgttgtacaaagcaggcgaacggctgggagcgaagtggggtgcgattgctctgctgatgacaggtgataattatgctgacgctttgtcgatatcgtcgtatgcgtatatgtcgcatatgcctattttcttgtgtagctcgacgaagggattcaccgatggtgagattaaggaaatcaaaaagataaaaaagatgtgggtcattggcggcgaacaggccgttccacaacgttttatcgaacggcaaattgctggaggcatggagcgcatagctggctcgacacggtatgagaccagcatcaatgtggcagatcgatttgccggagattatgatggtttccttcgcatgaataatgtggtattcaccacgggaatgaatttcccggatgcgcttgcggctggtccttttgccgggcgcaataaggcggttttgctacttgcggatccgaacgggagcactgccaattttgtgaagcagtatgtgaagcagcatggcaatgttgacaatgcctatattgttggcggtgagaatgccgtctctcgcaatactgcgaacggtcttgctgacgctttggatatgctgcggccataaggcggaaattgtagcaacattaagaggggctgaccatggttcacatggtcagcccctcttaacacgttttatgtcgtcattgcgcgtgtctgaggctgaggttgtcggcgatggcgttcgcggtgccttggtccacggcgttcacgccgtcgactacgagcactcttgagaatgattttaatgcggtcttttggtcagaccgttggcggaatcgcacaagaatacttcgactcgtacgagcggttcaagcacgagctggacgcgtacatcgtgcactggaacaccagacggcgccagatacgactcgagggacgcaccccggaggagttccggagcatgtccctcgcggtctagggctgtatcctaattaacaacgtccaacaaacggggcgcaattcaagtccacttcgtccccttttgaatgtttcgtattggaaatcagaatcagtcgcaggcactcataccaatttcatcaatgcgcatggccgaatcgttgagcaaaccggcaaaattcaccgttcctggattgcgcactgagaagtagcatgaattctcatcgctggtgaacgcgagttgctcgaaattcttcagattgctggtatcaggaataatgcgcatggtggcgatgattttgaagtcaccgtcattgaagagatgcaaaggcaatgcgaaatgcaccttgttatggcctgtcttgttgaccttgaatgagacgccacaatcatacggaacgccgccgcgcttgacatccaataccgacatggggatgtagaactcgatgtccttgctgtcgcgcagatcatattcgacgtcgaattcgaatgtatccttgcaagtgagcatctgttcggaaaccggcagaatgcggaatgtgggaacgcgctcgctgagaccaagcgggtattcgccttccttttccttgtctttctccttttcctcgttcttgcgctctaccttgaggttttcgagagtgtagcgatccgcgacatcgttcttgtcgccacttgcgatgatctcgccatccttgatgaggatggccttgttgcagtatttcttcaccgcgtccatggaatgggtgacaaggatgacggtcttggtcggatctttcttgatttccgcgaagaaattgtcgcatttacgctggaacgcctcgtctccgacggcaagcacctcatcgagcaccagaatgtctccctgggccttgatggctacggagaaagcaagacgaacctgcataccggaggaatagttcttgagcttctggtccatgaagtcctcaagctcagcgaactccacgatgtcatcgtacatcgcgtcaatctgcgtacgagtgaatccaagcagagcgccgttcaagtacacattctcacggccggtcagttccgggttgaagccaacgccaagttcgatgaatggcaccagtttgcctttgacggtgaccgagccttgctccggggtatagatctgggagatgattttcagtaatgtggacttgccggaaccgttacggccaacaataccgaaaaaatcgccttggcgtacttcgaaattgatgtcacggagcacatgctgcttggtgtagcctttgatgcctttcgtccagtttaagaacgccatcttcaggccggtcgcctgctcggtgggcagacggaacatcttggctacatggtcgaccttgagcaccaccgggcgctcgtccttggcttcttcctgtgtcttttcagtcaatgcaatttcagccatgatcagagcacctccgcgaacttggagctgtatttacggaatacatgaatgcccagccatagaatgaacgcggacagcacgtacggcagcaggcatagcagtttgttatcgaccatgctccacgcggtcggcacatattctggggaaagcaggttatggcgaatatccatgattacctgagtggaaggattcagcataagcaatttagccgcccaagagaaatctgggttgttagccaccatcgaaatcggatagatgataggtgtggcatagaacatggcttgcagcactacctcccaaatatgtgccacatcacggaagtacacaaacagcgaggcgagcagcaatgccacgcccagccctagacagtacaactggattatgctgaacggcacgagcagcacgcgccaagtgtagtgtgcatgggcgaagaaaccgaacaaaatcaccacgcataagttaatacctaatgaaatcatggaacccatcgtggtggaggccacgatgatgtaatttgggaaatgcactttgcgtagcaaatcaccgcgtcccacgatggattgcatacccatgctggtggactcggagaagaagctccacaaacaggtgccgcacagcagcgaaatcgggaaggtcggggtgccgtcggagaacttcaggaatttcacgaacaccacatacatcaccgcgaacagcatcaacggcttcaatacggaccataccatacctaggaacgaaccttggtagcgcagctggaaatcggtcttcaccagttccttgaacaccaccatcgcgtagtggtacctcttcttgaggctctcaaaaaaatctttcacaaacattccatcctactagtgcgaagcgtttggacgcaaaatcatgtggcaatgcggttggtgcgctctccttcgacagtactctcatatattctagtgaggaaaggacgtttgtcttagtaaggcggaatatctcacatggttctcacagcggaacagcatcatccgaacatcaaggttttcgtgtcggcgcataagcgggccacgttccccaaaggggagagcattctcccggtgcaggtaggcgccgctcacgccacgacccgtttcccgaacaccttgcatgacgatgaaggcgaaaacatctctgccgaaaacccacgatattgcgagctgaccgcgcaatactgggcttggaagaacgaagatgccgattattacggtttctgccactatcgtaggtatttcgatttcacggataccccacataaggaaaacgattacggcgaaatcattgactcatatattgatagtcgcacgattgccgaatatggcatcaatgacaaggcgattgcacatgcagtggacggatgggacatcatcaccacgcctttgaacgatgttcgtcgtatcggcggattttcaaaccttaaacagcattgggacgccgacgaacatctgcggctgaatgacttacgccatatgtacgacattctgtgcgagcggcatcccgattacaagatggatgccgatgccgtactcaacggccgcaccgcagcattctgcaatatgttcatcatgaggaaagaaatcttcttcgaatacaacgagtggctattcccattgcttgacgaattcgcaatgaccaccgacttcagcaagatggacatgcagaccacgcgcaccgtcggccatctctccgaacggcttttgaacatctttatcgcacacaagcagcgcaccggcgcagactggaaaatcaaacgactgcaatgcgtgcattttctgcatccagagccgaacgcgatactggaaccggtagggcaggagcgtggacgtgtggtgccggtggtgttcgccgcggacaacaattacgtcccgatgctcaccaccaccatctattcaatgctgaagaacgcttccacgaatcgtatgtatgacgtgatcgtactagaacgaaacatcaccgacgagaacaagcgctacatgcggcagttctttgcaaggttctcgaatgccctgattcgtttcttcgacgtgaaccgctatctcgccggattcaatctcactaccagcaatgcgcacatcagcattgaaacatattatcgtttcatcattcaagaagcgttgccattctactcgaagctgctgtatctggattgtgacctggtggtcaatggcgatatcaccgaactattcgataccgaactcggaagcaacgctatcgctgcagtaccagatattgattttattggaaatctcaacatgaagaacggtgagcgtgctgaatacgttcataagcagttgcacatgcgtgacgcatatggctacttccaagccggtgtattggtaatgaatctcgaccgcatgcgcaagattcacacagtgcacgaatggttagaaatcgcttccagaccgggatacatatacaatgatcaagacattcttaacgtagagtgtgaaggtcttgtcacatatttggattattcgtggaacgtgatgcacaattgtgcaggccgcattgctggagtgttcgatttcgcacctgcctccatgtacaaggcgtatatgcaatcacgtaatacaccaaaaattgtgcactacgcgggctttgataaaccatgggaaaatccatggtgcgatttcgcaccgctgtactggagctatgcgtgtgaaacgccattcgcggcacaaatggttgccacaatgagcggcgtggaacgccccgccccaccagaacaccacgaacgcgcaattgccgaagacagccctatgcgcaagtatgtggacgtgctagctccggtcggctccaaacaacgagaactgctgaaagtgatagcgcgcaaggcgcagggcaaacggtgagacaggcagacaagtcaccggttgttgacgggggcttcgtgtcctcgtcaacaaccgaccatggtttcacagggaagaattagtccctgcgaaacagatcgcgggtgtagaccttgtcgctcacgtccagcaaatcgtcattccaacggttggctacgatggcagacgagcgggtcttgaaatcagcgagatcatgggtaacctcactgccatggaaattggattcgcgcaatgtgggctcgtagatgagtacagggatgccgttcgctttgaactgcttcataacgtcttggatggcggactgacggaaattatcggaatcggacttcatggtcaatcggtagataccgatgatagggttctgaacattcctgacaagttccatcacctcagaggctacgaattccttgcgggtacgatttgcgtccacgatggcctcgatgaggttctgcggaacctgactgtaattggctaacagctgtttggtatccttcggtaggcaatatccaccatagccgaagctggggttattatagccgtcaccgatgcggggatcgaggcaaacaccatcgatgattgcacgcgtgttgagtccacggctttccgcataagtatccagttcattgaaatacgccacacgtaacgctagatatgtgttggcaaatagtttgatggcctcagcctcggtgacgcccaccaccaatgtgggaattccggtgctgccatcatgattaacgcgagacgtctcagcgggatcagcgccttcaacgagcagggacgcgaatcgacgtgccgcttcgacagaatcagtatcattctgcggggcgccgacgacgatgcggcttggatgcagattgtcgtacaacgcgtgtccttcacgtaaaaattcgggggaaaagagaatacgatcatcctgaaggttcttacgtaactgttgcgtatatccaaccggtatggtggatttgatgacaatccaagcattcggcgcatatcgtctgaccgatgtaatcgccgcttcgacactggacgtatcgaagtaatttttcttttcgtcatagtttgtcggcgtggcgatcaccgcgaaatcagcatctctatatgcctcctgcggatctagcgtggcatgaaagtcaagtattctttcgccaagagtgcttctttccaagaaatcagtaattgcagaatcgacaataggacttttcccattgtttaactgctcgactttctcgggaatgatgtcgagtgcatgaacttcattgtgctgagcgagcagcaaagcgacagacaatccaacgtagccagtccctgcaaccgcaatcttcataatgtcagcctttccttacgcaatcctaagatattgtagacgcaggtcactgcaacgaatcaacgtagctagcatcttccaaatcgcacatgccgacgttcatcctgtatgggcgaaccggtaaccaatgcacatttcttgatgggtcttgcagaacgacgagcgaatacggctaaggagcatcccgaaaacgtaattatcgcgtcattcatgaaaatcaaaacacgtcagcttccaaggacagaagaggcacgaaaagctcgcatggcgcaagatggcgtccgcatccgggctcttgcgccccagccgttggcatgcgacggtatgctggaatggtgaacagcatggcgtgcggcggcgtattcgagccgcgtaatattctggtgaccggcggatgcggcttcattggcgcgaacttcgtgcgatacgtggcgcggagccatccgcacgtgcacatcaccgtgctcgacaagctgacgtacgccggcaatccggagaacatcgccggcctgccgccgtcgcaggtcgatcttgtcgtcggggacatctgcgacgtcgcgctgttggagcgtatcgtgcccggtcacgacgccatcgtccacttcgccgcggaatcgcacaacgataattccatcgccaatccggaaccgttcatccgcacgaatgtggaaggcacgatgcggctgctggaggccgcccggaaacacgacgtgcgcttccaccacatcagcaccggcgagaacgtgcacgacaggcccgggcacgacagacggtacgcgatcgacgcatccaaactgcgcgccgaactgggctggtcgccgatgcacaccgacttcgccagcggattgcgtaacgtcatcgactggtatgcggaacaccgcgactggtgggtgccggccaaggaagccaccgaggcccgctaccgcgcgcaggggcagtgaagcgagcctgctactacaggcggcctttccgtggcaggccaacgttgcgcagcagacgctgcacgggcttgagtaccacggtgtcggcgaccaccgcgaacgccaacgccgcgagcaacgtggctgcgaacatcagcacgctgatgcccgcgtacgaccatccgtccgtgggcgcgggaatccgcgggccgatcagcaccttggacagcggcgaatgcaccagatagatcgtgtaggagtatcccgccagccaggtgatcgccctgcgcagccgcgccgacgccggatgcacgtcgtaccggaagaacaggaacaccgcggccaccaccatcgcgaacgcaaccgtgaccgtgcggccgacctgcatctgctggccggcgaacagatatggcgtggcaacggtccaggtcagggcgaacggcgccaacgcatacaagccgcgccgcgcccgcgtggacggcggatagtattccaacacgaatcccaacagatagtagaccagcagtccccgccaggggaacgactgcaggaacgtcaacgggtatccggcaagattgcagatctgctcggcggcggccacggcggcggccagaccgatcagcagccaggcacccgaccggcctatcgcgcgcatcatcgcggccagaaacggcgtcgccagcacgaaaccggcgagcatgaatacgaaccaatagacggaatcgtcatacccggagaacagatcgaacaacgttccagacacagcgccgccaaccgaacgatgatcgatcaccaggtaggcgacgaatcccatgccgcccgcgtacagcagatacggcacaatcagcgagataaaacgtttgtagtagtagcgcacgtacggcgcgaggctgctgggatcggcttggccggcaccgccgactgcccgggcatcagagccagagcccggcagacggcccgctgagtgggtgctcaccggccggtcggcatcgaatgtcaggttgaaccggcccgacaccataatgaacagcggattgcagaccatgaacaacgcgaacagcacggatcgcaccgtttccgcgctgccggcgagggtcatcttgacgggcatgtagttgttgatcacgtggacgccgatgaccaggcacatcgccaccacgcgcagcagatcgtagttcacgtcgcgcggcctgccggcgacgccggaaacggtggcgtcggaaacggcgacgccggaaacggaatcgggcatggtcatcacatggatcccgtcagggacttcagatcgaccgggcagctgatctggctcttcagcttgtccaaggtgtccaggccggccgagggatcggaggacgcgcccttatgcgcgtcgttcttgccgccgttcgcaccatcggcgccgttcgcaccatcggcgccgttcgtatcggccgggcactcatccgtcaccttaccgttggagcccgtctcgacgccatccgcattcaccaccggcgtggttaccacgttcagtggatgtgtggcatcgctgctgacccgaacggtataggcaatcgtcaattcttttccgggctcgatccactgctggttgaacataatgtactgacggtcatacaggctcgcggtgttggtaccccatgaatctatatcagcctgcacagcggtgatttcgccaccgtacggggcggtaagcaccacgcggtacagcatgccaccgagcactggattctccgagccgccattaacgaaatcaggcaacgattcggccttagccttagtcagcgtgttcttcatggtgaaggtgaccgtgtattcgtcaccgagctgatcttccgtaaactgacccagctgcgtgttacgcacggctgtcgtgatgcgcttatccagcacgccagaatacagggcgttctggctggccgaggcgtcgccgcaggtttttgtgaccgtggtggaggtcttcagataccaatcctgcttgccttgctgcagctccgaaagatagatgccggtttcaggtacctgactgtcagcagacaactcgccactggccttatcgtcgataagtccggtggcaatcagcgcctcctgctcatccggatcagccatccatagcttgaaatgaccgctagcgctggtatctctgattgccttcaacagcggggatgcggtggaagcattcgcgttgccaagcacatggttcataattgcttgagccgcttcggaaacgaagttgttctgctgctcgaagtccgggtaatccgtgtacaggtctgaagcgaagaacggcaccgtggtggtgccatccagcactcggccgtccgaaagcttgaccttgcctgtggctcccagcaatgcctggaggaatacgggatcgaatgacaatacacccgctacgttctcgtcttcgttgcctttctgatacagccacatgtatttgttcatctgtgccacacgctggaattcggggtcgatggtcgtggtggccgggtactggtcaaaagtgtcgccaaatacctggcgctccttcagcaccgtagcatccattggcttctcaggaatgtcccaaccagaagtggtggcgaaatcaccgatggtaatcgtgcccttatctgccgtgattgcggcgatggtgcccaccatgccgcccgccgaacgcagctcggccgggttctgcaccatcaccagatacgtgcgcttgccgtcctcgccaagcagttgcggtagcaagttaatgaggccatcgtattcgctgagcatcgaatccacggtcttgagcgcagccttttcggattcgagcacggtggccaccttggcgacgctcggagtcggcaccttgttgagcttggtgagctgctgcgagatatccttatgcgcctgcttgacgatatccggcatatccatcagggcgctgacgtccaccgagccattcttcagggagaagccctgcaatcgtttggacaggttcagcagatcagtgaacggaccgttgaccagcgtatccacggaagccagcatttcgcgggcagcggtgatgtcgctgccaaatcgcgaatggtcgcggaagaagtcccactgcgggccgttcagctcctcgttgagatcattggtggcattgaccaactcttgggagatgtccgacagactcttatcgctgccgcagccaagtgccgaattggccagactttcggcggatgtcagcacacgctgcgcatccgtggccattctcgagacggatgccgcgtagagcgtgcccacacaggtgacgctggccagcaacgtcagcagcagtacaaccaccgctcgcgcccatatcggtgtacggctgatcagcgaacggccgtcgccacccacgtgctggggagtcttcaggtttacgggacccgtctgctgatttgcagcgctattcgtagatgcggagcgattggatttcccgttaccggcatggcggcttctcctacgccccacagccttatggctcgaatgccctgaagtgaatcgcatacttatcctacccgaaaatctgctcagctcatactcttatccagcggcgcgaggccacgcttccggatgccggactccgggcgaatccggaatcgcagacatgccggagcacacgtgacgccacgcatatctcatgccagtgtaccgatgccaccgaaatagaccgagggtttatcccataccgggtgcaaatcccctcatgaccaccacatcgctgtcagaatgttctcagacttcattgaggggtataacagtattgcgcaagaaaacggtcactaaacgcaacaatagttaaagccgtattgatctgttcggcttaggagaacgggagaggtaattacatgttcgtcctcagcaacgcctggcgggccctgacacgttctaaaggacgtacggccctgaccgcgttcatcaccttggcggtcaccttcggcacagtcgccggactggccatcattcaagaagataccaacgcacacaccaccgcatacgatcagcagaaggccacgttggccattcgcccgactgcggctacgtggaagaaggtctccgctacggactcggcttccaccaagcattacatgacgtggacctcatataccgaatacgccacgctcgtccagtcggccaccaactcgttgaactttacggttaccgaaaccgtgccggcccgcgtgagcggtgatttgaaggccctggacggcggatcgctgggctcgacctccgatgatgagaccggcggccagctcatttggcgagccttctggaccgaggatgccgccaaggccagcgacctcggtaccttcgaaatcgtggacggcaaggacctgagctacgacaacaagtcctccaacccgaacaccaccggcgcactggtctctgaagcgtttgcctccgccaacaacctgaaggtgggcgatacgctcaaggtggcggccgcctcggacgcccagaccacggccgagctcaaggtgcgcggcatctacaagtacacatccgaatccgccgtcgccaatccggtgacggccgcccgcaaccgcgagaacgcgatcttcaccaactatcagaccttcgccaaggccggactcgacccacagtccaacgacaagaccgcctccggctgggcggtgccggatctggacgtggtgttcgacaccggtgatcccgctacatacaagtccttggtatccaccctcaagaagtccaagctgcccgccaagggatacgaggtgtcttccccttcgctggaatcctacaacgcttctctggagccgctggatacgctatcctcgcgcgcgaagaccggcaccattgcgttggttgccgtgggcggcgtgctgttgctcatcctcgtgctgtcaggcgtgtgggcgcccaagcgtgacgacgagatcggcatggcactggtgtccggcgtcactcgcgggcgtttgggatggcaattcatgctggaagtgttcatcgtcaccctgcccttctacgtgattggtctggtcggaggcgcgttcgccgccaagccgatcggacctgctctggcatccggccataccatcccggtgacatcggacctgatttggaccatggtctggtatggcctgggttcaatcctgatcctggcgattcttgccgccctgcgccttgcgttcttcagcgcgaacaagctgttcgccgccgatggcgactggggcaccgtgagcgagactgaggcgattgaaacggccgaaaccactggcgctgctgagaccgatgaagctgctgaggccaccgctcatgatgccggcgaggccaataagacgaccaccacaaccgacgatgcggaggcacaggcatgagcgacaagaacaacgatcaggaactcgagaagaccactgacgcaacggctgacgaagtgacttctgagactgagacgaacgacgccatcgaatccgttccagctgactccgtgcagttcagcgtgaccttcgatgacgttgatgacgaaggcactgttgacgatggtatttacagcgcactggcatctgccgaaaccggagaaaccgatgagaccagtgaggccgaagcagacgccatcgcttcggtcaacgcatccgccgaagtgaccgagcgcaatgccgcccgcgtcaacgaaacactccgactggccaaaaccgatcacaaagacgcattggccgagcatgcggagcctcagggcaaagcggccgaacccaccatgacgctggcctcgcgtatcgatcgcgtgttggtgggcggcggttccgacgacattctgctcaagacctacccgacctttgccctgaacaaggtgacggtcgccggtcccaagggcaaggtcaacatcctcgatggcgcgaatttcttctgctactccggacacgcatacgcgctgctgatcagcgacgaccccgattcgggcatcaccgccgacgccaaacgtcgcgcgctgatgggcgtgatgagcggtttggccacgccggtgtctggcacggtgatgaacaagagcgccaacattgttgagctcgagcccgtggaactgcgcggccaccgtctgggcatcgtaccgcagctgcacgccgtgcagccgaatctcgacgccgaacaaaacgtgctgtacgccatggatgcgtccaaccgcaacttcctgaagcccaagccggtgatcacccgcgaactgctggccaaggtcggcttctccgaggccaccagcggcgtggccgtcggcacgttgcctttggtgcagcagcgtttggtggccatcgcccgtgcaatcagcaccgaggccgaagtgctgatcctcgacgagccgacacgagggctgaacgcggatgacgaggtgaccgtgttcgccgcgctggccaagctggcgcacaccggtgacccgaagcattgcgttatcgtgctcactgcgtcgcgcgagctcgctgaagcagccgacacactcttcaagatctgatctgtccgacagcaatacacaccagacacaccagcacaggctcttgaagctcacgatgttcggatacataccaaacatcgtgagctttttcgatttcgaggggctgatttgcgtgttccgggaggtctacttccgtttcaaggggctggtcatccgccaaaccccgagtataaacggcttcatgccaacgtcattccgccgtttttacgccgcgtatacttgggcactagccccttgaaacggaagtagacctcaggaggatgccgaatcagccccttgaaacggagataggcatgtcgagatgtccgaatcagctcctgacaatcctgatgcggctcattgccgcgctaatctgaggataaatctgaccgtacgaggcgaaacctgataatcatgaccggatatattcccacactggagcagatcgacgagttgcaccgcaaaatcgcgccgtccaaggcggcgtacgagctggtgcacacgcattgcgtgattgtggcgaccatcggctgccagatcgtgcgccggcagaacgcgctgttcacgcgccgctgcacattaccgaaggacgcggaggtaccgcccaccgcaggcgtcaccggcggccatgtgccgccgcgtctgctcgacgagcatttagtactcatcggcggactgctgcatgacatcggcacctaccgcgtgttcaagcatgacggctctgacgacgaaccgctcaaattcagcaagaaacgctacattctgcacggtcttaagggctacgagtatctgctcgacgagggcgtggacgagtccatcgcccagttctgccgcaaccataccggcgtgggacttacgcgcgaggatgtggtgcgccaggagctgccattgccaccagccgactatgtgccgatgaatctcgagcaggaagtggtgatgtacgccgacaagttccatagcaagtcagtgccgccgaagttcctgcaggtcgaggcgtatacggcccgagccgagcgatttggcggagagaacaaacaacgatggctggatctggtggccaagtatggcgtgccggatattccggcgttggcggagaagtatgggatgcggatgatttgaggctctaggggcctcctcgtcagagggagcttatgaagctatttcagatggaacggagacggtaggtgccgttgcggttggaggcgatgatcatctggtcgttctccagcacgttccagccttcctgctcatagccggaagaggagaccaccacaccggcggagtcgccgttgtcgtcgcgcagctcacggtagcgcatcacacggtagtcggcggcctgctcgccacggccgtactcatcgtagatttccacgatgcgcgggctggtcttctcacgaccggcggcgcacagggcgatgagctggtcctcggactgaatcatgcagttgtagctggacttcgggtaggtttggcgcagttcgcgcacggcctgggccacagcctcgtcgagcgggaagccgaagccgatgtattccagaatcaccgcgaagaagatagcggagtcggaacggccgccggtggagaggagcacgctgtggttcaccgggtatgaacggttggtgacgatgttgcggccattggcgtccgagatatcgccgttgtggatgaagctcaggccgttcgcatagaacgggtgctggttctccatgatgagcggcagattggagcttgccaagcgcaggtgccagatggcaccgcgagacggttcgtcggccagcgcctcaaacgtgctgtcatgacgggccgcgatggtcgacttgtagattcgggtgccggtttccggagtgggtgcgccgccgtcgcgcacgtgcggtgcttcggcgggatcggaaagctgggctacaccccagccatcattgtggatttcagacagttcacggaaatcctcgacattgtcttgccccaacacggcgttgagactcaggttgaagcctgccgtcgcgtatcccagtaatctgcacatggtatttcaacttaccgaaaccatgtggcgacgtgcggcgactgttataggcattctttatagagcgcatcagcgccgctgcaaactggtatgttatcgcttctgtttggcggagcgctgaggcttggcggcgggtttgccgttcttggccttgcccttatcgccctgctcagcggcggcagcggtctcagcgatcttccgctcctcggccgatacggcggcatcgagctcctgtaccaatcgcccgagcccggacgtggtgtccatcgggtcggggacggcggccgggtcggccactgcacgagtcggcgtgggcgtcgtgatggtcttggccgtatcggtgcgcttcagacgcggtgggcggcgggtggagacgaacagcggctgcacctcgaccagcgggttgtaaggtgccagaccgaaccacttaaccggcgagccggccatgcggcggattgcgtacttggcttgcaacgacagggcaccgcgtgcggaaaccttggattccggcatcagggccttgtgaatcagcacgtaacggatggtgccgatgtccggatcggcgtcgaccttggggtaaatcgacttctgcttaggcagttcgccggttttggacaggtcgtgcatgatctggtggatgtacgccgggatggactgcgaaaccttgaagcccaaacggaagcgcacgcggtagatgtagttcgtgccgaagtcctccaccgagtattcacgggtgaacggctcgtcggtggtttccacgctgactgcccaccaagcacgggcacgcttggggtggtcggcgaagatggagaagaagatgtccgtgtcgagtcgcttggtttccgagtcggaggtcaggtacacgatgttgtccgcaaaatacgggatgcggaaatcaccgtgcagcttgtcgagcgcgggtaggaagtcgttgggccgcatgtgacggcgttgcgcacgttcgagcttggtgccctcattccacgtgtacatgacgaacagaatcgcggcggtcagcaacatggtgaaccaaccaccgtgcaggaatttggccatagacgcgatgaagaacatagcctgaatcgccaagaacagcacggtgaacacgatggcaccgacccgcttgccggaatgccataagtagacgccgagcaacacggtggtggtgatcatcgtaatggtcaacgccaggccgtacgcggcggagatgtgttcggaatccttgaagatggcgagcacggcgagcgtggccacgcacaacacgccgttgaccaccggaatgtacagctggccgcgcgtacgggccgggtaacgcacctgcagatggggcatccagttgaggcgggtggcctcggaaaccatggtgaacgcgcccgtgatcagggcctgggaggcgatcacgccggccgaaacagacagaatcacggccaggtaccgcacgttcggggtcatcatctggaagaacgggttgagcgacttcatcgcggtgtattgcgggttatcgctattggccaacatccacgcgccttggccgaagtagttgagcaccagcgcaaccttgatgaatggccaggtgaagtagatgttgccgcgccccacgtggcccatgtcggagtacagcgcctcggcaccggtggtcgagaggaacacggtgcccatcagggcgatgccggcagcattgtccgggctgaacaggaatttgatgccgtacaccgggttcagggccgcgaacacagaccagtcgttagagagattcgtgacgcctacgatggcgaggaagctgaaccagaccagcaccatcgagccgaatactttgccgatgctttcggtgccgcgcgactgcacggagaagagaatcacgatgatcacgacggtaatcatcagggtcaggcttgggttttcgtcgaacaacccttccaatggcggcagggtctgcaagccttcgactgcggaactgatggaaaccgccggggtaagtaccgaatccgcaaggaatgccgcgccgccgagcatggcgggaatcgcgagccatgcgccgtacttgcgaatcaacgagtacagtgcgaagatgccgccttcgccattgttgtcgatgcgcatggcgatgagcacatatttgacggtggtgatcagcgtaatcgaccagaagaccagcgacagcatgccgagcacggcctctcggtttacgctgccaagccctccctgaccggcaaggaaggtctgcgcggtgtagaggggcgaggtgccgatgtcgccgtacaccacgccgagcgccacgatcgccatgccccaggtaaccttgtctgggctggattgcaagcgggcccaccatcggccgaggccgcctttcgaccatgcgctggcgattttctcggcttccttggtttcggcttccctctgcttggcgagtgcctcgcgctcctccttggtgagagtgcggcgggacaccttgggagcattggtaaaggtgtcggccctcagcagtgcttcttcttcctgtcgggccttggctttggcggcgccagcctgggctgtctgggcctttgaggctttttgggcgcgtgcggtcctttggttcgactcagccatacgttcagtcctccattgaggtggagatcatccccctcgcttatgtcaggtacatcatggtagacctcgttcacaattctgacaaattttacaagtcaacacatcgccgcgacggccgcacacccggccctcacagtccgtatacggcgcgggcggtatcgcgggtgccgcgcgccacatccgcgatggacaggtcgagcgtatcggccatggcccgcaaggtgtaggggatcatgtacggcgcgttggtgcggccacggtacggcatgggcgtcagatacggcgcgtcggtttcgaccatcgcatggcccagacccacaatccgtagcgattcgcggataccgtcattgcctttgtagctcacggtgccggagaagctcagataccagccatgttcgcgcgcaatctcggccatctcacggtcgccggaatacgagtggaatacggtgcgttcgggcgcgccgtcggccagcagggtttcgatgacctcgcgatgggagtcgcggtcgtgaatctgcatgggcaggcccagttccttggccagggcaatatgcgcgcggaaagcctcgcgttgcagttccttggcaccttcgccggtgcggaagaggtccatgccggtctcgccgatagccaccacttgctcggggtatgtggtggcgaggcgatgtacttcggcgagcgcgtcctcgaaagacgtgtcatggtaaggcttgtatttgaggggcagaccatccggccccggcacaccgcgatgcccgtggagcacggactcattggggtgtattgcgagcgccgcgtgcacgttacctggatgatcgagggccatctggacggcggtcatcaggtgcggcagctcgcaaccgcagtcgatgatacccccaatgccgacagattgcgcctgcgccagcaattggtcgacgtcgtacaccgggacttcgggctgccccttctcctgcgcctcatggctcatagcgcgcgcgaaagggattacggaggccacgtgagtgtggttgtcgatggtctgggcgtcgtccggcaatgcttcaggtgccggggcccagctacggtcgcgatggtggtgcttgctcatggtttctcagtgtaggctgtttctcagtgtaggctaccgtcagcaggcgaacacggcgagcgcaaaaaagcacgatggtgacgatgggattggtgatgagactgaacgcctgacgcgtggtgccgtgggtcatgctttctgttggagtgatgttgaggatgccgccgcagtcatcgtcttttcgcgattgcggcggcaatgtcatctacacactcgccgtaagcgatgtgcgcggtgatagatgctcgcggaagaacgccatcattgcgtcattgagttctccgctgccggaatcccacgtcatcaagggatagtcatgaggaatacgcttgccgttgacagaccgcagatcatgcagttcatgatcgcagttcatcgagcgcagtagcatcgttgcgtacagcgcatcgttttccagaaaatcatcggtactggtggaaagccataccggcggatatgcgattgctcgcatcaacgattcagtacgctcatatggtgttccctccaatcgtgatatcaatgttcggaacgctggccgcagcttctcgaacagctcgccggaatccgggtagaacgcatcgaacagatggtcatacaccagcatgccggaggtgaaaccgactaattggaaccgcacatgattactatcaatccccagaagagaggacagctcctcattggtctcacacgccaacaggaacgttcccagcaatgcgccggcagaatcgctgaccaggaacagttgctcagccgacagctgccacccatcaccattgcttactagccatcgcaaggccgtcgacacatcagtcaacatatcgaggaaatcgcccccgggtgccaacgtatagttggggcacaccacggcaaatcctcggctggcaagctgagcggcatacgcattctgaatttccttgaatgaatagaagaacgcgccaccgtgaatgttgaaaataaccggaatatcaccgtcgccgcgcaagtatgcgtccttcggcaggaaaatatccaacttatgagcacgcccgccatcggtcatatagtcgatatccggaaatttcatcacggtatcaggcaacgcactgcggaagtccagtcggcgtacgtcactgaacgcgtagcttgcccgatgctgccgcacataatcgataaagactcgatactcatcatcatcgggtatgtctgcggtatcgggaagatcctcgtcaaggtaagtccatgttcgggccaaccgttcctgtagcggcgtcaaaacacaagttccattcgtagcgtaaatatcattcaacgtgaaaggaattccgttgacagagaacgtcattgcatcgtcgtcttgataacgcatcattccccacctcacttcagctcagccttcatatcctcaagctccacaccgttggtttccggcaggaacttgacgacaaagaagaagcccagcaatgccatcagcgtgtagaagccgtacgtccatccaagaccgataccatcacgcataggaggataaatcgtagtgataaggaagttgaacatccagttcgcggcagtcgccacggcctcccccttggcacggatacgattcgggaaaatttcgctgatgatgacccagacggtgacgttcgtagtggcacagcaaaccaggaagaacgcgtaggtgcatacgatggaaatccacgtccatgtaatcgacaggctcagagtaccgtcagcactcaactgtccttggccgaagccaatggccgtgatgcccaggaataccgtcatcagcaaagttccgtatttcataagattacggcgaccgactcgatcgataagcaccatacctaccaccgtggcaacggcggcgagcgtcgcacgtacaacagcgatggtcagcgacgcctgctcgctgaagcccagcatgttccaaaggctggaatcgtacagcatgatgatattctgcccgttggcctgagccagcagaacgaagatgatggaaatccagaccacgcccttgagaccgaacgtcttaccgcgcagttccctgaaggaaaccttcttctcgttctcctcgctctggaacgacttctggattttggcgatggtcacatcggcattgttgtcaccgatgacgtcaatcagaatggtcttggcctttgcaatctcgcccttcataaccagataacgaggagtctctggcaaagcgaagcataggaagaacatgataacgccaggcagggctgttgtcactagcatccaacgccatgcgtctatccccatccagaatggcatttcagcgccaccggatgccacgacatagatatcgttgacgaccagcgatgcgatgatgcccaatgcgatggccatctgctggaagctggtgaagaagccacgtcttgctgctggagaaatctccgaaatgtaagcggggccgattgccgaggtgaatccgacaccaaggcctccgacgatacggaagatgataaatatggtgaaattcgtcgtcagacctgtcaccaaagaagctgccacaaacaatatggcggcaagttccagtacacgaattcgtcccatacgatcggcgaccacaccggcgaaccatgcgccgaacacacatcccagcaatgcgctggagaccgagaatccgctcatggtactgctgagtgcaaaaccggaatccggactggcgattgcggtcacagcgccgttgatgaccgacgtatcgtatccgaacaggaagccacccacggctccaatcgtacagacggcaattaacttgcctttaagcttgccatcgatttgagactgagtctgttggctcatgatattctcctttgcccgatgatggacctcgtcgcccaccagtaagcccctatcgtattgagtgagcatttgccggtcattggcaacagggctatgagcgtgatacaaatgaatgattttgtgaccgatggttcaaggcgtcgttgtcgtactcggaggaagcctgataacaataaaagcggaggcgaactgacgcagtgcagtcgcccataccgcttaatcacaccaacggagatgcctatgagttttgcaagcataatccatcagcatacggtgatatccgtggacatcggcggcaccaaaatcgccgctggtctcatgtgcgtagacctcgacgaacaaggaagaccgcgggacatgccagcgttgattcgacggtacgtcataccgacgaaagcacgtctcggcggcacctccgtattgcaacgcgtcgttcaagccattcgccagtgtctagacgatggtgagattcctttcccactattggggatcggtgtagcgagcgcaggagtcattgacggcaacggttcggtggtatcagccacttcgttgattcccggttgggccggtattcaactgcaaaccgaattatcggcaacgttcaacgtgcctgccatcgtcatcggagatgttcaggcacacgcccttggtgaagcgcactggggatgcggacgacaataccaatcactactggtcgccgccatcggcaccggtatcggaggcgcgataatcatcgacgggaaactggtacgcggcgcccacggagcctgtggccatatcggccatctgccgcatcccgacgccattggtatatcctgctcatgtggatgtaagggccatgtggagtcaatcgcctcaggtaccggcattgccgataattatcgacgtgctctgcaacagaacggacacaatactctccccaccgacatcaatggacgcactatcgccgaactggccagtcaaggtagtacggaagccgtaaccagtatcactctggccggcacgagtctcggcgatgttcttggcggactaatcaatgcccttgatcccgatgccgtgatcctttctggctccgtagtccattctggagaactatggatgaaatctgtgaaacaaggcatccaaagacagaccttgggcattctttcccgaacaccggttttgacaggaacactcggcggcagagcccctctcatcggagcaacatcagctctgtgcgccgacctcagatcgaataaggagcagaaatatgaatactaacgatacttattcgaaacgtcttattgattcgctccacggcaaactgatagtcagctgtcaagcatatcccggcgagccaatgcggcatcccgaaaccatggcccaagtcgctcaatcagtagaaatcggcggcgctgccgccattcgatgccaaggtcttgccgatatcagcgccatcaaaggccaagtaaaagttccagtcatcggcatatggaaggaaggcgataacggcgtatacatcacgccaacgttacgccacgccagagcctgcattatggcgggagccgacatcgtggcactcgatgctacagatcggccccggccagacggtctaaccctgcagcagaccgcgcggcaactcaaaagcgagggcgcaatactgatggccgactgcggctgcatcgaagactccgatgcagccgtggatgcaggattcgacatcatctccaccacgctggctggatacaccgattcccgcgccaaaacagaaggaccggattacgagctcctcgctcaaatgctggagcggcacccccacgtaccggtgatatgcgagggtaggatacatactccgtccgatgcggccaaagccatagaaatgggtgcctgggcagccgtagtcggtaccgccatcacccaccccatgacgataacgtcatggttcgccgatgcagtaaggtcctgatgacgcacaaaccaacagcgacctaggtaggaggcgatatgcagtacgttaagggcaccaatcaggaactattgaccacatcaccgcagttccctgccctggtcatcgcacatcagggattcgacaaagccaggttgcattggcatgaaggcttcgaggtggtatacgtccgacgctgtcgggccacagtaatgaaaggcacccaacgttcgatgcatcatgccggtgatgtagtactgattcctccacgctgcctgcatagcatcgaacttattcaggatcttcggcaaccatcagctgtaccgcaggcgctttccgtaacgatctcgcccacggagttgctaccgtcatatccgtatattacccaaatccaacaacagctggattacgactacattggcgaaaaagatcatcaacaattgctgaaatgctgcgaacaaatgtttgcggcactgatcagcggcaagcagacacggttccttgaagcgaattcctggttctacaccatgcttaccaatgtttttgactacgccaaaccattggctgcagcgaaccaagaagacaccgcggatgaaaccatactccaggatggacgagccattagacgaatacgccactacgtgcaacgtcattatcgcgagcccctatccaccgcacaggtgtcgcagaaattcggatattcacgagagcatttttcaaggatattcagcaaatattctggagtgacatttaaagactacgtaacgcgtgtacgtctgctggcggcctgcgatttgctcaccaacacggatatgccaatcaatcaaatcgtccgggaatccggattccccagttctcaaaccatgcgaggattgtttgaccgcgaattcgcatgcacgcccagcgaatatcgctctcgttcgatggaagaataatcgaggcctttcgctgtttgtggtgggtggtttgggtgcggggtgatgccggtcgggtaggttggaggcatggatacctctcacctgttcaccgccgcgcttcagttgcagtcaccttggaaggtggggtccgtggacttccgtgacgccgacggcggccggcaggagctgcacatcatgatcggcttcgagcccggcgcccgcttccattgtcccgagacaggctgccgggaagacgcctgcccggtgcatgacaggcgggagcgtgtgtggcggcatccggacttcttccggtacaaggcgttcatccacgccgccatgccccgcgtcacgtgccccgagcacggggtgaggacggtgcccgccccgtgggccaggcccggcagcgggttcacgctcctgttcgaggcgtgggccgtggagatggcccgccacctgcccgccggcacgctcgccgagcaatcggacgagaccgacacccgtttgtggcggtccgtcgcccattgcgtcgacgaggcgaggaggctggaggactacatgggtgtggaggccgtcggcatcgacgggaccggccgcaggggccgcaattacatcaccgtggtcgccgatctcgtggagcacgatgtcatcaacgtgacgccgggcaaggacccggccacggtcgaacggttctcgcgtgatttcatggacc

SEQ ID NO: 1125 - DNA, 2739 bp, Unknown
  R81_24m  MAG No. k141_3150
atccagaaccgttcggcctggacatgatcggcgtgggcaacgaaaacttcggggctgactacgtggccaagtttgacatgatcagcgaggccattcacgaacgatacccggatatgctgtgtgtgatgagcgccggactgttccccttccagccgacgatgaaacgcagctgggaccatgcgcgagcgttggccgcaaccgattccggggcacatgattccgccaccggtgacgcgattatcgtcgacgaacattcttaccactcccccgaatggtttgcataccaagcgtcacgattcgacgcttacccgcgttgcggcgccggcgtctatttcggcgaatattcagccaacggctattttgccggccaaccgcagactgaacagggcgcgaacacgtggaagtcggcactcggcgaggccgcgttcctgaccggttgcgagcgcaattccgacgtggtgcgcatgacctcctatgcaccgctgctcgcgcatatcccggctaaggggtgggcgcagaatcttatcgaactcaatccggcgcatgtgaaccccacggtgaattatgaggtggagcggctgttttccacgcatctgggcgacacgacatatgccgtgtccatcgagcagaccgcgtcacgccccgccaaacatctgtatgtcagtgccaccgggcatgacggggatgacgcctgccgttacatcaaaatcgtcaatacctccgattccccggtggatgtgacgttggaaatcgcgcgcggactggccgggctgggcgcctcgccatcgcgaccggtgcgtttggaggtgacgacgttaagcgccagtccgacggcgaaaaccactatcggataccgcggcgaggcttcgggggcgattgtgccggaacgtcgggcttacacattgccgtcgccgtcttcattgctggcgatgaagatcaagccgtacagcgtcacgctggtggcttcgcgctgattgacatcggccattaggccgattcctttgccgttagaatcaccctcaaggatgagggggaatcgtgcagattcagggaataataggggctatcccccatagcgaatacaagcacgggagggcaggatggaaaccacggcggccagaagaccgccggccaacgatgaaggagtatgcggtatgtttatcaatctgttccgcaggcagcgccctgcgctcgcccggctggcccgcaactccaacgcctatcgtcagccgatggttgcggccgtatcatcgtccgcagtcggcgtatccagcatcacctctgcatccaccacagccaacacagacggcgtatccggcgtatccacgctggatgccaccatcggccgcattcatgacatcccgcagtcggccatgagccgactgaccggctcccccaccgtatacgcgcggtagaccggcccaacccacaacggcggctcagagactcggctcgatgatccagctcaaggtcagcaatacggccaaaaacagaacgttgacggcggagtagacggccagataccggcctttcttgtgcgggtattggcgcacgacgttcttgtaagaaataagcgaggccatcgaggcgatgagcgtacccatgccgcccaaattggtgccaatgatcagatcgcgccattggtcgcagaagccggaaagcagaatcgtggtgggcacattgctgatgacctggctggagccgaccgccacctccagcggatggccgccgaccagcgagcgcgccagttcgtagaattcgggcacgcgcttcatgttgccgatgaagatgaagaacatgcagaaggtgagcggcagtccccaatccacgtatttgaatacgcgccgatcggtgaacaggaacacgacgaccacgatcacgcacatcacccacaggggaatcacgtcggagacggccagtaggcagacgatgaacagcagcgagtagacgatggtgcgccagccgccataaccggcgccgtagccggtgatacgaatctcgtcgggctggtgtttgttgcgctcgggagccagcacgccggtttcgaggtcgcccaggtcgccgaccggtttgccgccaaacaccacggaaatcacgatgaccagcaacacggccgccgtgccggaatacggtgccatgatgccgaggaattccatggtcggcatgccggtcagggctttgagatacaggttgtgcgcgttgccgatcggggtgagcatactgcccacgttcgcgccaatggtcatcagcgtgaccacgaggatggtcttatcctcttgcccagccatgatgagcacggccaccgcgaacggcacaaacgtgaccagcgcaacgtcattggtgatgaacatcgcggaaaagaacgtcaaagcgacaagcgtaatgaccagtccgcgcatggtgctgaccttctccagcaatcgcgaaccgacgatgcggaacacgccgatacgctggaatccgcacaccacaatcatcaggcagatgagctggctgatggtgctggcgtgaatgtagcttttgtaatcggcgtccggcggcacaatgaaacacgaaatcagggcgagtattgcggcgacgatgagaatcgtctcatttttggctacattgatcagccagcgtcgcatccattcctccgtgaataacccaatatcgcagccgttctattctacgcgcagaccggcataaggtacgtagtcgcgttgcgctggcggacatgagtttttggaccggtgccgc

SEQ ID NO: 1126 - DNA, 33323 bp, Unknown
  R81_24m  MAG No. k141_3251
gtgccatatccggatcgcagatgactggcgattccggaagaactacgaaaacgtcatctttagatgacgattcaacgtttcatattgcaggtctccttacggggcgttacgtccgatcgcattctttgaaaaatgggccacctagatttccgaggagattgaagggcaacacgtgacttcggtagaccaaagctgccggaatatctccgtcaaaccgcctgtagctcgatggtgttgtcgcattgtgcggcgatgccaagatcgtgggtgacgatgatgagggtcttgccgtattcgtgctggaggcggagcatttcgtcgaagacatgttgggcgagatcgcggtcgagcgcgccggtgggctcgtcggcgaggatcaaatccccgggcttcaatatgcatcgtgcgagggcgacgcgctgctgttcaccgccggagagggtcatgatcttgtctcccgcgacatggccgagtccgagccgggagagcatggccttggccttgcgctgcctgacctgtttgctgtcacgggtgaagcgcatgccgagggtgacgttgtcaagggcgctcatgtcgtggtagggggctgcggatgcgggcaagccatttcttggaagacgtttcgtcgagattggcgggagcttgcgtcagcaggcgtcgatgaaggcgctgaggatgcgacgttggttgctatcggcgcggtgagagaactcaggatgccattggacggcccagacgaaacgcttggccggcatccagaccgcctccacgatgctgtccggcgcagtggccatcggttccagtccctggcccagcgtgcgaatcgcctgatggtgataactgttgacgcccagcgtataggcgcgcggatgatacggcctgccgaaggaatcgacctcatcggcctccgcctcactcgggccgttgtctcccagcggccacaacgcgcgggccaacggcgaatcgggcgcgatcgacacttcgtggaccaccgggtcatacggcggcttgtcgccatgatgcacgaccgggctgggatgttcgtccggcagatcctgccacaacgtgccacccaaggcgacgttgaggctctggatgccgcggcagatgcccagcaatggcttgtccgccgcgatgacggaggggatcaggcgctcctccatccggtcgcgggccttgcatagtttgaccgtcttggggccggccgcctcgccataccgttctggatccacgtcgtggccgccggtgaccaggaacccatcgcattggccgaccaactgtccgattgtggtctcgtcgtcggtcagcggcagcatcaccgggatgccgccggcttcgatgatgccgtcgaaatagccgggcagcatccacaggctattcagtgtgtcgtcccacaacgggaccacgccgataagcggacgatgggccatcgatacctccaaatacagacttactgataaagcgactcaacttgctacagtctcaaacctgaaaattgtaccagtgtgacttgcgggcggagcctactgcatagcttagggaggtagggatttcaatcgagggcggcttatcgctcgtagtgttccaattcggcgagtggatacacctgagtccaatggtgcggctgcaggtcgcgcagcggcacgaacaacggatgctctccctgattgttgtctgaaacggcgcacatcacgtcgtcgccccaatagcgcagccgttcctgacagatgccgcatggagacaacacggtgaacggggcgtgttcgtcatcgcgtacgacgcagatggtgtgggtgacacggcgatcaagcttcatcgcctcgcacatcgctccgacctcgatgcatagcgaagcggcggcattgggtgtctcaatcgccacgctcgtgacgataagtgcctccgagccgttgcttccgtcatgtttaccgttgtctttgccggcgagtcgcatcgccgccgcgcctccccatcctgtcggataccttcgctcgatcagttccacggcactgcgatacagcgcttcctcgatatgacgctccactggagccatatggtcacctcgcgtaatcgacctgccatcggtgggcagacgggattcaaaccattactagtctaggggggagatgtccttgacgcatgcttatcgtcgaagtagttgtggccgtggtcgtcggcgtgtttttggtcggggtctatcgtgatgcaaagaacggaacgttgcctttgcagaattcggtaggcatcaaaacgccggcaacaatgtcatccgaagacacatggaatcggattcacaagcagtacgctccgatattcctcgttgatgcatgtgccctgttcctcatcgcccttgaaatcatcattggcggggccatggagaagagcttcaataacatggcatcggaggcattgattgcgttggtggccacgcttgttgtcatggtgctggccaatctggtcgtcgttgttttggcagatcggtctgcacgaaaatgagatagcttggtgagaagccgctatgtcggacttgctgaaacaaccaacttcgcaacggggtaataaagtaagagagcgacgaatcgggattctcggaggtgttatatgttggatattcaagatgatatcagtagctaccttgccttttcgcactatatcgattggaatgaaccgagtgtgcaaagacaagccaaggaactaaaagactccactgaaggcgaaatcgaactggcaaaagccgcctactattttgttagagatgaaatcaagcattcatgggatgtccaagacaaaagagtcacggcaacagcctcagacgcattaagggagggcgtcggtatttgttgggcaaaatctaatttattggccgccctattaagagcaaatggcattcctgccggaatatgctatcaaaggcttacgttaggcagtacgcctgaaagcggatactgcatccatgccttgaatgccacttatctgagatccattgaccgatggattcgtgtagatgcaagagggaataaagagggtgtacaagcagacttttctgttgacgatgaacgtttggctttccccattcggaaagagtacgatgaggtggattataaaactgtgtatgccgaaccgttgccgcagacaatgagcattcttgaaaatagtacagatgctctatacatgtatctgcattcgctgcccgaaagaatttgacgaattcatttttatcgggaggcaggaggcagcggctggttcggactgcattagcggttatcggggaacgattcgcccgcgacaacagcccatcacgccaaacttgacaagagtgacgtcggtgacccgtgctgcggcaagcacctcgacagggatggtgacggtatcggttgctctcaggctagtaggcccggatagagttcgttgatcgcccaggcgacgcggccggcatcatatgccgaaagtcttcctgtcgggccgtcgtcgaggaaaagattgcttggcagccgcagcagttgcgagcatcgcacggcgctgggcttgctcagtcccgcgtcctgccagtcacgcagcaccacatagcccggttcgtcgcgccaggtgttgccggtgaccttggtcaccaaggcgatgcgggtgccgtcgtcccattggaggatcacgctgggacggttcttcgctttgcctggcttgtcgggaaaagcgaacggcacccaccatatctcgaactggcgcggatcagtcttcatcatcgtcccaaccctccggcaggatcacggcaccatcacgtatctggggcgtcacgatgcggggatcatccatgttcgctttgaacaggggatatccctcgttgtctttttcgaatgaagggcggacgcttggcgtgaatggcagacgcccgtcgcgtaccaattgtctgagagacatttcggcaaacgtgctcaggttcaaccccatggcgtccagtatggcgatgccgtcacgcttggtctgcgcatccagactgatcgtggccttctccttgatagccatcattactccttataacagtggtatgacatacgtatatcatacctcaaatcagtcatgtcagctggggcccccgttatctatttgtaagtgcaacatccttgttcgcggctgattctggcagttcgtcggcgaatgcctcggcgggggtgcggtagccgagcactcgcatgggcctgttgtcggtttcgtcgacggtctcctgcggttcgcgtgccatggagggggcgacgggcctgcgttttagcggactgcggtagcatgggaaccatgattctgcatttgcatctggttcgtcatgggcaaaccacgttcaataaatacaaccgtcttcagggatggtgcaatgcgccgcttaccgcatccggacttgccgatgccgacagggccgggcacaaacttgagggctatgattttgcggcggcatattgttccgatacttctcgcgccgaaatcacagcgaagcgaattctcgatatcaatgaggctgccggacatgcacggccagaactcacggccgatatgcatttccgcgaacaatgctacggatacttcgagggtcaggacatgtcgctggcttggaccgctgcgggtggacctcacggcgcgaaggactacaacgacatcgtagccaaatttggtctggccgcctcccgtgatttcctgaaagaggccgaccccttccatgacgcggaatccgatgaagaatactggacgcgcgtcgaaggagcattccagctcatcgccagcaaccccaatctcaaggatggcgatgatgtgcttcagatttcgcacggtaacacgctgctcagcctcggccaccgtttcggaggccccgatcttgaccttagcgaacgaccggccaacggctcggtaaccgtactcgacttcgacacgaccaaaccgttttcgcaggccgtgaccatcgtctcatacggcaaatagcgtatttcatcgtcagttgcacgggtaaataggggaggagtgctacccttatccgagtaagtgtgacctcaaggaggcaacaatggaagtcggagagatcgctggcctgatcgcggccatcgcgttcgcagtattggccggtttcatgatctatccgctgatcaggctgggcaagatgtttgatcagatatcgcagacggtccgggagtccggtgaacacgccatccccgcgctggacgaaggcgtgaccaccgtcaagcaggtcaacaagtcgcttgaagacgtgaacaagatttccgccgcggcttccaccaccgccaacaacgttggtgcgttgaccgatttgtatggctccttcctcggtaagcccatcatcaagattgcttccaccttctacgcgctgaaaactacggggcagtccttccttgcgaagaacgccgcgaaaaccaccgtcaacgacaccgccgagaagggggagtgatgttcaaacgcatcttctgggtcggcgtcggcgtggccatcggaatcgttgccgtcaccaaggcacaggcctatgtcaaggccaatacgcctgatgcggcacgccagttcctgcttggccccgatcaggacaatgtgccgatgaaaacactcgaagggttggtcaacgagttcaatgccacccgtcgagcccgcgaggctgagctcaaccgtcagtacatcgagcgcgccaactgacacgcgcatgccgccttgccatctagtcactgaaccagctagaacaaactagtcctcataatccagtctttttccaccaataccaggcgcgactgcgcccattacccaaacaaggagttcatccgctcatgcgcactgcggacatcgcaaagcgatacctcgattactttgccaaacatgatcatctcgtcatgccttcggcatccctgatttccccgaaccccaccacgctgttcaccatcgccggcatggtgccgttcattccctaccttcttggtgagcagaccccgccgaagcgccgcatgacatcgaaccagaagtgcgtgcgtacgctggatatcgatgaggtcggcaagaccacccgccatggcaccttcttccagatgcttggcaacttctccatcggcgactacttcaaggaagaggccatccactacgcctgggagctgctgaccaccccgcagagcgagggcggttacggctttgacccggaaaagctgtgggtcaccacctttaccgacgatgaagaggcccgttccatctggaagaacgagggcttcgatcccgagcacatgcagattttcggcatggaagacaacttctggaccaccggtggccctggccctggcggcccctgctccgagatctacgtggaccgcggccccgaatacggtcgtgatggcggtcccgcggccgatgagacgcgcttcatcgagatctgggacctcgtgttcgagaactacgaggtcgacaatgtcaagtccaagaccgacctgcatatcgtcggcgagctggcccagaagaacatcgataccggcgccggtctggaacgtctggcctacctgatgcagggcaaacagaacatctatgagaccgacgaggtcttcccggtcatcgaggccgccgagcgcatgtccggccgcaagtacggcgaggacgaggccgcggatgtcaagttccgtgtcgtggccgaccacgtgcgttccgcgctgatgattatgtccgatggcgtgcgcccgtccaacgtcggccgcggctacgtgctgcgtcgcctgctgcgtcgcaccgtgcaggccatgcgtgtactcggtgtgaccgatccggtgattcccgagctgctgcctgtctccaaggaggccatggtcgccagctacccggagcttaacgacaccttccacgatgtctccgaagcggcctacggcgaggaagatgcgttccgtcgtacgctggagaacggcatcgagattctcgacgtggctgtcaagaaggccaagaagaccgccgacccggtggtctccggctctgatgcgttcactctgcacgacacttacggcttcccgattgagctgaccctcgaaatggccgccgatcagggcgtgaaggtggacgaggccaagttccgcgagcttatggccgagcagaagtcccgtgcccgcgccgacgccctcaagaagcgtcacaacgtggacctgtcggtctatgacgacttcaagaagacgctcgccaagccgatcgacttcctcggctacacggacatgtccgcccgtgccaaggtgatcggcatcatgcaggaaggcaagggctccgtgcccgccgtcaccggcccggccaacgtcgaagtcattctcgaccgtaccccgttctatgcggaggccggcggccagcttgccgatcagggcgagatcctgtccgacgacggtgcagtgctcgaagtcgacgacgtgcagaagcccatcaaggacctcatcgtccaccagtgccgtctgaccgaaggcacgctggtcgtcggcgccgaagtcaacgccaacatcgacctggcccgccgtggcgccatcgcccgctcgcacaccgccacgcacatggtgcacaaggcgctgcgtgaggagctcggcccgcaggccacccagcgcggctccgaggacgccccgaaccgtctgcgcttcgacttccagtggtccaaggccccggccaagtccgtgatctccgcagtcgaggagcgcgtcaacgacaagctgcgcgacaacctcgccgtgaccaccaaggaaatgaagttcgacgacgccatcgccctcggtgccatgcacctgttcggcgagaagtacggcgacatcgtacgcgtggtctccatcggcgaagacggctggagccgcgagctgtgtggtggtacccacgtggaccacgtcggcaagatcggcatggtcaacatcctgtccgaagcctccatcggctccggcgtgcgtcgtgtcgacgccgtcgtgggccagggtgcctatgacttcaacgctcgtgagcacgcgttggtctcccagctgtccgacaagctcaacgctcgcccggacgagctcgccgagcgtgtgaacgccctgctcgccaagctcaaggaatccgatcgtcgcttggcctccatgtacgagtcccagctggccgcctcggttccggcgctggttgctgacaccaagaactccgcggccccggtcaaggtggctgtcaagaacgtgggccacttcggcgcggtcgacgccctgcgcaagaccgtgctcgacgtgcgcgcacaactcggtgaagatgcccccgtggtggtggccctcgccggcgtgaacgaggatgacaagccgatggtcgccgtggccaccaacgaggccgcccgcaaggtcggcatcaaggccggtgatctggtgcgtggcgcagccaaggtcctcggcggcggtggcggcggcaagccggacttcgcccagggtggcggtgtcgatgcctccaagatcgacgaggccctcgaagcgctcgagcacgaggcgcagaaagcctgattccgccagtggtgtggttaggcgttgatttgggtaatgcccgggtcggactggcactgtccgacccggagcttacctttgcacaccctgctggcaacattcatgttgccggcgactatttctttgctattgacgaggtcctgaacgtcatcgaagacgaacatgtggaccatgtaatcgtcggactgcccctgcagatggacggtacagaaggcaaaagcgccaaaaaagcgcgcaggtgggcggccaatctggagaagaggctgcaagcagagagtgaagacagtgattctacggagtatcagattccgcaggtgtcattgatagatgagagattgacaacagtcagtgcgcatcgtcaactgttcgaggcccataaagcttcgaacaagcacaggccggtggttgaccagcagtcggcagtggtgattttgcagacggcactcgaccgtacccgggagcagtgaggtatcggttatgaccgatgattttaacgagttctttgatgacaacacgcattgggtcgaacaggggtcagaaccaatgcgcgggactgagccgccagaaccgccgaaatcccgcaaggagatgcgcaagcgacgtgcacagcgcaagcgcaagcgcgtcagtggcattatcatcgctatcgccatcgtcgccctgcttatcggcggcggctatttcggcgtaaccaagctcatcgcatggcgcgacagccggagcaaccagtcgacggccatcgcggactatcggggaccgggctatggcgaggtcgaattcaccgtgagcgagggccaaggcgcggcggagatcgccgataatctgctcaaggccgaagtcatcaagtctactgccgcgttcaccagcgtggtcaacgccaatagctcgacactctatcctggaacgttcacattgaagaagcatatggccgcatccgatgtgatcgccgttctctccgacaccaaccaggcggcgggcttccttgaggttcatcccggtgaacgtgctaccgatgtgttcgccgacgccgcgaagctttccggcgttgcccaaagcgaattcgacacgattatcaagaacaagggtaaggatattctgcccaatgaagcgggcggtagctttgagggatggctggagccgggaacctacaacgtcaagagcatgaagagcgcttcggaaatcctcaaggccatggtcgataagcgtatcgccaagttggatgaattgggcgtgccgaccggcagtgaccgcgaacgggtgatgatcatcgcctctatcgccgaggccgaggtcaacaaagccgattactacggcaaagtgacgcgagtcatcgagaaccgtttggagcagggcatgtcgttgggcatggattccaccgtggcctatggcaataacgtcaagcccgcgcaggtgaccaccgagatgacccaagacgagtccaacccgtacaacacgtacaagatctccggcctgccgcctacgccgatcagcaatcccggcgatagcgccattcaagcggcactgcaccccgaaagcggcaattggctgtacttctgcacggtcaatctggacaccggcgaaaccaagttcgccgtaaccgccgatgaacatgaccagaatgtggccgaactacgcaagtggcaagccgaaaaccagtagtcgcctcattggctcccctcgccgaggggagctgtccgcaaagcggactgaggggagtaatacgggattaagccccaacaaccaccgccacaatcgcgcccgccaatatcaccggcacatacggcaccttgcccgcatgtgccggtgatgtgcgttgtgggtcgaatcgcgtccacagggcaatccatgtgatgccggcaacgcccatcgccagccaccagaccaccacaggcaacaggccaaacagtccgacagacaatcccataggtatcaaggcggtcacatcgccgaatcccaatgaccgcggcaccagcaacgccaacgcgaactggatcaggcaacatagcacggtgaacaacagcgcctgcaacagcacgaacaggtcgttcgccaccactccatgcgcgaaatcggcggccaactggattaacgcgcccacggccacccatgcgatcggcacccgccgatgacgaacatcctcaatggacagtgcaagcccacatagcagaccgggtagcgtgaacaggtatggcatggcttaacattaacccctagttagacgtacacatagacgtacacacatgaaacgagggaagttatgctgcgttggcagacggcaggggagtctcacggagaagcattggtggccatgattgaagggttgccggccggcgtgcgcattagcacggacgatatcgtttccgcactggcacgccgtcgacttggatatggccgtggggcccgcatgaagttcgagcaagacaaggtccgtctgctgaccggtgtacgccacggtctgaccctcggctcgccggtggccatcgaaatcgccaacaccgaatggccgaagtggaccgaggtcatgagcgccgatgcactcgaccatgacctgccgcgcgaaggccgcaatgcgccgctgagccgcccgcgcccgggccacgccgatctgaccggcatgcgcaagtatggttttgacgacgcccgcccggtactggagcgctccagcgcccgtgagaccgcctcccgtgtggccttgggcgaggtggccaagcagttcctggatcaggcgttcggcatccgcaccgtagcccacgtggtggcgctcggtggcgtgcagaccaaccctgatttgccgttgcccacacctgacgatctggaagcgttggatgcctctcccgtgcgtacgttggataaagaggccgaggcccgcatcatcgaacgcatcaacgaggccaagaaggccgccgacacgttgggcggcgtgattgaagtgctggcttacggcgtgcctgccggcatcggcacgtatgtggaatccgaccgtcgtctggacgcggctctggcctccgcgattatgggcattcaggcgttcaagggtgtggagatcggcgacggcttcctggaagcctcccgccccggttcgcaggcgcacgatgagatcgtggtcaacgccgacggccgcatcgaccgtctgtccaaccgcgcaggcggcattgaaggcggtatgtccaatggccaggtgattcgcgtacgcggtgccatgaagccgattccgtccatccccaaggccctgcgtacggtcgacgtgctgaccggcgaatccgcacaagccatcaaccagcgttccgacagcaccgccgtgcctgcggcatccgtggtggccgaggccatggtgcgtctgactttggcgaagtacgcgctggataagttcggtggagacagtgttgccgaaacacggcgcaaccttgagtcgtatctcgcctcgtggccggagcacatgcgctgaacgaagtggagtatggttccgagacgactgccgcggaaccatcagcaactgtacccaccaatcgtcgagaggattcgtagattatgaccgcacgcccccgcgccgtcatcatcggcatgatgggagccggcaaaacacgtgtcggtaaggaagtggcgcatatgttgcgtctgccgttcgccgatgccgatgtggagatcgaacgtgaagtgggcatgaagattcccgcctacttcgatgaatacggtgagccggcattccgcgaggtcgaggccgatctcatcgccgatatgcttgaggatttcgacggtatcttttcgctgggcggtggcgctcccatgacgccatccacccagcatgccctcgcctcatacatcgaccatggcggtcgtgtggtctaccttgacgccgatccggcggaggccatggaacgcgcgaaccgcgggggaggccggcccatgctcaatggcaatgccaactcccgttggaagaaactgttcaagcagcgtgacccggtattccgcgaggtcgccaacgttcatgtccatacccgggggcttacgcctcagggcgcagcgaagaaagtgattgatatggtatctgagcgagcagtgcatgttaccggatcggcaattgagccgtatgatgtggtcattggcgaaggtgccatgaatcatctggtcgacgtgctgggacccaagcccgccaaaatcgcgcttatccatacccagccggtgcagcgacactccgatcgtgcccgcgccctgttgcgtcagggcggctatgaggtttccgacatcgtgattccggatgccgaacccggcaagaccattaccgtggccaacggcatttgggaacgccttggcgacgaaggtttcacccggtccgatgccgtggtggggcttggcggcggtgccgcaaccgatttggccggtttcgtggctgccacgtggatgcgcggcgtgcgctatgtaaactgcccgacctcgctgctggccatggtcgatgcctccaccggtggcaaaaccggcatcaacaccccgcagggcaagaacctcgtcggctcgttctacacgcctgccggtgtgctggccgacaccaagacgctggctacgctacccaatgacatcttcatcgagggtctcggcgaagtcgccaaatccggtttcatccgcgaccccgaaatcctgcatatcctcgaagaccacgcagctgaactgcgcgctttcgacggctctacattcctcggctcgccgctcgaagacgtggttgccgagctcattgagcgcacggtaaaggtcaaggcctaccacgtctcctccgatttgaaggagaagggtctgcgtgaattcctcaactacgggcacacgatgggccatgccatcgaaaagctcgagcacttccgctggaggcatggcaatgcggtggccgtcggtatggtgtatgccgccgagctggcccatctgatcggttacatcgatcaggatctggttgactatcaccgttcgttgctcgcttcgctgggtctgccgacgtcgtggaatggcagctcgttcgacgacgtgctcgcattgatgcatcgcgacaagaaagcccgtggcaacgaactgcgtttcgtggtcctcgacgagattggtcacgtcgtacacctcgacaacccgcccgccgaagccgtagaagaagcattccgtcgtatccagcagtaattgaacggccgtaggccgtgccgttcgccatcccctcagaaaaagtacttggctcccctctaacgaaggtgccccggagtcggatttaccttctacctccctctgatgagggaggtgccccgaaggggcggagggagagaagcacaaacaaaaggagtcccaatgaccaaagtcattgttgtcaatggccctaacctcggacgtctcggcgtccgccagcccgacgtctacggtcgtcaagacctcgacaccctgcgcaagctctgcgccgaatggggcaaggacctcggcctcgaagtcgaggtgcgccagaccgacgacgaagccgaaatggtgcactggatgcaccaagccgccgacgagaaaaccccggtggtcatgaatcccgccgccttcacgcactattcgtatgctctcgccgacgccgcgcacatggtcattgatgagaacctgccgcttatggaagtccatatttccaacccgtccgcccgcgacgagttccgcaagcgttccgtaatcagccctgtggccaccggcaccatcaccggcatgggtttctacggctacaagctcgcgctcgatgctgtggcgcacttgctgagcgaatagaaccaagccctccagccaatcccgggtatcagtcgacgttgagcccgggattcctgttccgacgaatcggaccagaatcctcgtcctggtgcgccctatgggcctgaagtgcgccgtgtattcgaccatatgctggccaaggcaggacgagacgggccgcctacgcgcgactacaccggccacgtcatgaacacgccgggtcatacacggatgatagagtgaaattccatggttagaagaacacatggtaattctcaagagcacgtcaccaagcatattttcgtcactggcggcgttgtctcctctctcggcaagggcctgaccgcatcttcgctcggtcgtttgctgcgcagccgcggcatccatgttctgcagcaaaagctcgatccgtacatcaacgtcgacccgggcaccatgaacccgttccagcatggtgaggtctacgtgaccgaagacggtgccgaaaccgatctcgacatcggccactacgagcgtttcctcgacgtcttcctgagccagaaggccaacgtcaccaccggtcagatctatcaggaagtgctgcgcaaggagcgcgccggcgaatacctcggccagtgcgtgcaggtcatccctcacatcaccaacgaaatcaagtctcgtatgcgcgcccaggcttccgatgacgtggatgtgatcatcaccgaaatcggtggtaccgtcggcgacatcgagtcccagcccttccttgaggccgcccgcgaagtgcgccgcgatctcggcccggacaactgcatgttcgtgcacgtttccctggtgccgtacatttccgccgcccacgagctcaagaccaagcccacccagcactccgtgatgatgctgcgtcaactcggcatctccccggacgccctcgtgttgcgttccgaccgcccgctcaaccagtccatcaaagacaagatctccctgatgtgcgacgtcgatgccgaaggcgtggtcaactgcgtggatgcgccgagcatctacgatgtgccgaagatcctgttcgaagagggccttgatgcttacgtggtgcgtgagctcggcctgccgttccacgatgtcgattgggatgaatgggcagacctgcttgagcgcgtccaccaccccaagcacgaggtcaacatcgccatcgtcggcaagtacatcgatctgccggacgcctacctgtctgtcaccgaggccatcaaggccggcggctttgccaactgggccaaggtcaacgtcaagtgggttgcggccgaccgttgcgaaaccaccgaaggtgcggccgccgctctcgacaacgtcgacggcatcgtgatccccggcggctttggcattcgcggcatcgacggcaagatcggcgccctgaagttcgcccgtgaaaccaagctgcccgcccttggcctgtgccttggtctgcagtccatggtcatcgaatactcccgccacgtgctgggcattgaagacgcgaactcttccgagttcgagcccgattgcgccaacccggtgatcgccaccatggaagagcagaaggacatcgtggccggcaagggcgacatgggccacaccatgcgtcttggctcctacccggccgagctggaggaaggctcgctggtcgccgaactgtacggcaccacgcatgtcaccgagcgtcaccgccaccgttacgaagtcaacgtggcctacaaggatcgtctgcgcgaaggcggcctgcgcatctccggccagagcccggacggcgagctcaccgagttcgtggaactgccgcaggacgtgcacccgttctatgtggccacccaggctcacccggagttcaagtcccgcccgaccaagccgcacccgctgttcgccggtctggtcaaggccgcgctcggccatcaggcggcccgctgaccgtggatcccgcgcggtcggtccgcgcacgatgaaggcgtgacggcacggcatctcaggatgcttcgccgccacgccttcgccgtttggcgccatccgtgatgccgcatggcccgatggcgcccgcatgtaatcaagcccacagccaatatgcgtcagggcagctagtgtttgcacttgggttctgctaggttttcatagggttaagtgtgatacaaggaaggcaggatggtgaccgaaaacacagcaccaaacgccgccgctgacgtggagatgagccagtatgtggctgatcgtacccgcgtcaacgaggacaagatcaagaaggatgacgagatcatcagccagttcggcgactacaactatggttggcatgattctgatgccgccggcgaagccgcaaaacgaggcattgatgagaacgtcgtacgcgcgatcagcgccgacaaaggcgagccgcagtggatgctcgacatgcgtctgcgtggattcaaggcgttcctcgaaaagcccatgcccgattggggtgtggatctctccggcttcaacgccgacgacttcaagtactacgtcaagccgatcgagaagcaggcgaagtcgtgggaggagctgccggacgacatccgcaacacctacgatcgccttggcatcccggaggcggagaagaaccgcctcgtctccggcgtggctgcccagtacgagtccgaggtaatctacaactccattcgtgaggacctgaagaagcagggtgtgatcttcgtcgacacggacaccgctgtgcgcgaataccctgaactcgtcaagaagtacttcggcaccgtcgtgcccccggaggacaacaagttcggcgccctcaacaccgcggcgtggtccggcggctcgttcgtatacgtgccgaagggcgtgcacgtggacatcccgttgcaggcatacttccgcatcaacaccccggccatgggtcagttcgaacgtacgctgatcatcgcggacgaaggctcctacgtgcactacgtggaaggctgcaccgccccgatctggtccgaggactcgctgcacgccgccatcgtcgagatcatcgtcgaaaagcacgcccgcgtgcgctacaccaccgtgcagaactggtcgaacaacgtctacaacctcgtcacccagcgtgcctacgtgcgtgagggtggcaccatggaatgggtcgacggcaacatcggttccaaggccaccatgaagtacccggcctgcatcctcgccgaaccgtacgccaaggcatccaccatgtccctcggcttcgccggcaagggccagtaccaggacacgggcgcgaagatgattcacttggcaccgcacaccagctccaccatcgtcgccaagtccatctcgcgcggcggcggccgctccgcctaccgcggtctggtcaaaatcgtcaagggtgcgtacggttcgtccaactcgaccgtgtgtgatgccctgctggtcgacgacttctcccgctccgatacctacccgcacgtcgatgttcgcgaagacgacgtttcgatggcccacgaagccaccgtttccaagatctccgaagaccagctcttctacctgatgagccgaggactcacggaggaagaggcgcgaggcatgatcgtgcgcggcttcgtcgaaccgatcagccgcgagctgccgatggaatacgcgcttgaactcaacagacttgtggaacttcagatggaaggatcggtgggctgattccgatgaccgacaacacaacacccgtcaaggaaatcaagattccggtcgccgaccccaacgacccgtacgcgattccggccgccatgccgtcctccgtggaccatgccgtgcgttcgttcaacgcaggcgactacccggagcccagccgcaagcaggacgaatggcgctacacgcctatcgagcgcatcaacgagttcttcaccgtgttcaagccttccggcgaaacgcagatcgaagtctccatgattgacggctcgccgttggccgaaggcgtgaagctcagccagatcaagctcggtgagggcctgtccggcactgtgtccaagcccaacgaccgcgtctccgcagtcgaatgggaatccggccacaccgcaaccattctggaactgtcaggtgagatcgcccagcccgtgctcgtcaaggtgcacggcgcgggggaggacctcgacgccttccatctggtgatcgccgccgccgacaaggctcatgcggacgtcgtcgtggaacacgacggtgacgcacgactggccgaaggcgtggaaatcaccaccggcaaggactcgcacgtctccaccacgttcgttcaggaatgggccaaaaccgccaagcatgtggccaaccaccgcatccacgtcggcgaaggcgcatccctgcgccactccgtcgtgaccttgggcggcgacatcgtccgcatccgcatggatcaggacttcggcggcgaacagggcgacctcaacatgctcggcatctacttcgtggaccccggcgagcacatcgagcaccgcacgatggtggtacacaaccaccccgactgcaagtcccgcgtggtctacaagggcgcgcttgacggcaagggcgcgcactccacttgggtgggcaacgcgctcatccagcccaccgcccccggcaccgactcctacgagctcaaccgcaatctggtcctgaccccgggtgccatcgccgattccgagccgaacctcgaaatcgaaaacggcaacatcatcggtgccggtcacgcctcttcggtgggccgcttcgacgacgaggaactgttctacctcgaatcccgcggcatccccgaaaccgacgcccgcaagctcgtggtgcgcggcttcttcggcgaactcgtcgaggagatcggcattcccgccatctccgaacatctgatgaccgtgattgaccgccgactggcccgtggcgaaaacgacgccatggcacaggtcctcgaagacaagtaagaacagcatttttaggagcacaacaatgtcaacactcgaaatcaaggacctgcacgtccacgtcgaaaccaaggaaggcatcaagccgatcctgaagggtgccaccctgaccgtccactccggcgaaacccacgccatcatgggccccaacggttccggcaagtccactctcgcctacacgttggccggccaccccaagtacgtggtcgactccggcgaggccctcctcgacggcaaggacatcctcaagatgactccggacgagcgcgccaaggccggcctgttcctggccatgcaatacccggtcgaagtaccgggcgtgtccatgaccaacttcttgcgcaccgccaagaccgaaatcgacggcgaggctcccggtattcgccagtgggccaaggacctgtccgcagccatgaagcgcctcaagatggacccgaagttcgcctcccgttccgtgaacgaaggcttctccggcggtgaaaagaagcgcgccgaagtgctgcagctcgaactgctgaagccgaagttcgccatccttgacgaaaccgactccggcttggacgtggacgccctgcgcatcgtgtccgaaggcgtgaaccgtgccaaggaagccaaccagttcggcatcctcatggtcacgcactacacccgtatcttgaagtacatcaagccggacatcgtgcacgtgttcgccgacggccacttcgtcaagaccggcggccctgagctggccgacgaactcgaagagaacggttacgaccagtacctgcccgagggtgctgattccgagtccgcgctggcctgagtccgtgaccgtgggagtctgacatgccctattctcgacacgctccgggccgctcaggccaagtctttacggtcgcgaacaggccatgtcagactcccactcgtttcgtacaattgttacgtaagtaggggaacataatggttgattttaaggagattcagggcgagttcccgattctgaatcaggagattcacgggcacccgctcgtgtacctggattctgcggccacctcgcagaagccgaatgcggtgatcgacgccgaggcgaacttctaccgtacgatcaacgccggcgtgcaccgcggtgcccacgagctggcggcccgtagtaccatggctttcgaagaggcccgtgccaaggtcgccaagctggtcggcgcgaatgcagcggaaggcgaagaagagatcgtcgtcaccggtggtgccacggccggactgaacctgctcgccaccgcattcggcaatgcatcgctgggtcgtgggggagaagccgccaagcgttttgccctgaagccgggcgatgagatcgtcgtctcgcgtgcggaacatcattcggtgctgctgccgttccaggagctggcctaccgtaccggtgccaccttcaagtggatcgacctgaccgaggacggccgtgtgcgtacggacaacctcgacgaagtcatcaccgaacgcaccaaggtcgtggccgtcacccacgtgggcaacaccacgggtgccatcaccaacatcgcccctatcatcaagcgtgcgcatgaagtaggttcgatcttcatcttggacgcttgccagtccgtaccgcacctcaaagtcgatttccatgcgcttgatgtggacttcgctgcctggagcgcgcacaagatgtacggtcctaccggcgtcggtttcctgtacggtaagcgcgaactgctcgaagccctgccgccggccaacttcggcggctccatggtcgaactcgcctacatggaccacgaggcccaatacatggcccctccggcccgcttcgaggccggcacccagccggtcgcccaagtggtggccgcaggcgtcgccgccgaatggatgatgaacatcgggctcgagaacatcgaggcccatgagaagaccatcgccgccgaactgctgaagctcggcgacatcgatggcattcgcatcctcggaccgcgcgaaaacgtggaccgcatcggtaccgtggcgttcgacgtggccggcgtgcacccgcacgatgtgggccagttcatcgacgcccagggcatcgcgattcgcgtggggcaccactgcgcccagccggtgcaccgccacttcggcctatacgcatccaaccgtgcctcctccggtgtctacaattcggtcgaagatgcccaagcattggtcgaagcggccaagggcatccgtaagttctttggagtggagtaaaacagaacaccatgaacgaattcggtatgagcggggatgacctcgaacagatgtaccaagaggtcatcctcgaggcgtcgaaacatccgcatggcaaggaatcctttgcgcccaacgcggcggtcgaacagtccgcggacgcggcggccaatgtcaccgtgcaagccagccacgaatactgcacgcccggtgaatcgcaccagttcaacccgacctgcggcgacgaggcgaccatccatgtcgaagtctccgatgacgaaccgcacaccatcaagcgattggtgtgggacggccacggctgctccatttcgcaggccagcctgtcggtgatggtcgatctggtggacggcaaaaccgtggacgaggccatggatctggaacagacattccacaagctgatggaatcgcgcggtgccggtctggacgacgagaacctggaagaaaagctcggcgacgccgtggtattccaaggcgtgtcgaaataccctatgcgcatcaaatgcgctctgctaggctgggaagggctgaaggattccatcgccaaagccctcgctgcaaagaactgaggaaatatgtccaacgataatttggttcccgaaccacagccgtccgttttcgatgccgtcaacggcgtcctgcaggacgaggaggccgctcgccgcgtgatggccaacccggccttggccaagggcttcccgaacggacgcccgatcgagcactctgctgcgtccggcgatgacacctgtgcgtgtggcggtcaccatggcaaatgcggttgccgggatgacgaacagtccgatggcagcgagattccgatcaaggcgattgacgatatcggccgcgccactgccgaagacgtgcgcgaggcactgcatcaggtgattgatccggagcttggcatcgacgtgatcgatttgggtctggtctacggcattgagatcgatgagctaggccgcgccattattacgatgacgctgaccacgccggcctgcccgctgaccgaccttatcgaggacgaatgcgcatccacgctggccggtctggtcgaggagttccgcatcgactggacgtgggacccgcgctggaccatggagcgcatcacgcccgaaggccgcgaccagctcgccgcccttggcttcaacttcgacaacatgccaaagtactgatagcgcttagtaagctccctctgatgagggagctctatacgcgagaaaagccccgcatgatgcggggcttttccaagtctggactggtcaatcagtcatcgacgatggtgttcttcgggacaaccgtaatgccgtccggcgtgacggtgaagccacgggccagatcgtgctcggtatcgatgccgacagtggagttttcggtcaggaccacgttcttgtcgagaatcgccttgtacacgcgggcgcggcggttgatgatcacaccgtcgaacagcacggaatcgacgatctgtgcccacgagtggatacgcacattgggggagagcacggagtggtgcacttcaccgccggagacgatcacaccgggggagacgatcgaatcggtggcgtggcccagacggtcgcggccggcgtgcacgaacttggccggcggcaggttgccggacatcgtgtaaatcggccaatcctggttgtacaggttgaactcgggcacataggcgatcagatccatgtgcgcatcgtagaactgcttaatcgtaccgacgtcgcgccagtaggcgtgatcagtgaccgtggaacccggaatctcgttcgagttgaagtcgtagacgccggcctcgttgcgggaagcgaagtacggggcgatgtcgccgcccatgtcatgcttggtgtcggcagccttctcatcgagagccagagcctcgaacagggccttggtgttggcaacgtagttacccatggaagccagaatctggttcggattgtccggcagaccggtggtggtggccggcttctcctggaagttcctgatcatgttcgggtgatcgggatcgacctcaattacaccgaactggttcgattcctcgatgggctggcggataccggccacggtgaactcggcgccggactcgatgtgctgctgtaccatctgctcgaagtccatgcggtagacgtgatcggcgcccacgatcaccacgatgtccggctggacgtcctcgatgatgttgatggtctggtagatggcgtcggcggagccgaggtaccagtgcttgccgagacgctgttgcgcgggcacaggggagacgtacgagccaagcagcggggagaaacgccagacctgggagatgtggcggtcaagcgagtgagacttgtactgggtgagcaccacgacctgacggtacccggagttcaccagattgctcaacgggaaatcgatcagacgatacacaccaccgaagggaacggcgggcttcgcgcgatcgcgggttaacggcatcaggcgggtcccctcaccacctgcaagcacaatcgacagaatcttgggattcttggccatcgtaactgtcctctctgttactgagcgtctttcgacaccgcactgctgggccggatgcttccttgcattcggtttacatagttaataattgcagaaaaattcgaacatgcaaggctttcgccccccgcgtgccgtgaacttgcgatgaacagtttcgtagatttgtttaaggatccggccttttcggagcgcgtgcgattccttagcgtgtcgcgtagaacgccactgcgctggatgccgccacgttcagactatccacgccgtggctcatcggaatcttcacggtcaaatcggcgcgggcaatcgtatggtgggacaggccgtcgccctcggtgccgaagatcagcgcgagcttgtcgatatgcgtcggatcttcggcaggcgcgtgcagacggcgtgtcagctcgtccaacgaaatcgaacgatcctccaatgccatggccacggtggtgaagcccagcgacttcaactcgtcgatgccctggaacggccagtaatgcttgttttcggtaccgtcgtcgttgaacccggtgatacgggtccacggaatctggaatacggtgcccatcgacacacgagcggctcgtcggtacagcggatcaccgcaggagggtgtgaccagcacggcatccacatcgagcgcggctgccgaacgcatcagtgcgcccacattggtgtggtccacgatgttttccattactgccacgcggcgggcgctcctgcagacctcggctacggagggcagcggccagcgtcgcatcgcgcatagggcgccgcgatgcagacgatagccggtcagtcgcttgagctgctcaggtgaggccacgtagacgggaatgtccgtgccccagcgcccgtcgatgaagtcgaaggtgtctttcatgccctccagccaaggttcctcgaccagcagtgacagcggttcgcggtcagcggccagcgcgcggtcgataaccttgggggactcggcgatgaacacgcccttggctggttccaagcgattgcgcaactgcatttcggtgaggctcacatacgcttcgacgcgcgggtcgtcaacggtgtccagcgtgatgaactgcattggtggcctttcgtgtgtgcagataacgaaaaaccccttgcaatgcaaggggtttatctgtgcccgagacgggacttgaacccgtacgcccgtataaaataggcactagcacctcaagctagcgcgtctaccattccgccacccgggcaggtgtcgtttgaacaacgagtaaatagcttagcatgaaattacagggatgcaattcgcgcgtgtgcccggcgtgtcgcgtgtagccttgaagtcatgactgatgccctttttcttttcgacccgcaggtcgacgatgtcccggtgaacagcgacgaacttcacgccggctggaagctaaccctgcccgcgcacatcaagcgccatgctgtgcaggctatgcgactcaaggcgggggacagcctgcaactttccgacggcaacggcttgagaatccaggcagtgatggccgatcctgaagccggacttgctgaagttgtggaagtggggcgcgaacccgagccgctcacccgtttggcgctgattcaggcattggcgaaaaccggccatgatgagcaggccatcgatatggctacgcagatcggcgtcgaccaagtggtgccatggcaggcggaccgatccattgccaagtggaaggtcggccgtacggacaagaagtggaattcggtactggatgccgccaccgagcagtcgcggcgcgcttttaagccgcaactggaggcgtgcgcgtccagcaaggaggtcgtggccatctgccgcagggcctgcgtgcatggcgatgtggtgattgtgctgcatcaggatgctaccgatacgtggtccggcgtggaggagaaggttacgcagttggtggaacgcacgctccaggacggccggccgcggactgtcagtgtggtggtcgggcctgagggcggcatcagtgagcaggaggtagctgatttcgtcaaggccggagcggtgagctgcgtactggggcacaatattctgagagccgcgacggccggtcctgtagcgttgtcgctgttgtctcgggtgttgggacgttacgagtaacgcccacgcgctaagctggtgcgtagcaacatcaaaccaaggagcatgatgagcgaatccgacgattgcctgttctgcaagatcatcgcagggcagattcccagcagcaaggtctacgaggacgagacgacctacgcattcaacgacatcaaccccaaggccaaggtccacgtgctcgtggtgcccaagaagcactacgccaacgtcgccgaacttgccgccgacgacccgaccgagctggcccacatcgtctccatcgcgcagaacatcgccgacaaggaatttcacggcgcctaccgactggtgttcaacaccggtctcgacgccggccagaccgtcttccacgtgcacgcgcacgtgatgaccggcgaaaagctcgacgagtagtaggggaatatccgcttcgtggcaacgactacacgtaccatcaccatcccgccccaacttgaccccgtcgccgtgctcggcccggttgacgaggtcattcgcgaggtggagcgcgcctttccggacctgacgattatcgtgcgcggcaaccgcgtggcgatcgtctcccgctccaagcagaccgaagcccaggccgcacaggccgaggatttggtcaacaccatcatccaagccgcctacaccgcgcctatggacgccgacaccgtgcgtcgcatgctcgaccagaacgtgctcaagaaccacgtgcgcctcgaacatccaggtcacggcccggtgcatgacaaactggcgcaatcgacctcaaacgaacgcgcccatgcacgttctgccggctcccacgacccgacgtaccgaaagcccacggttcccggcgtcatcacctttgccgccggcgtgccggtccgtgcgaaaaccgccggacaagtggcctacgtgaacgccatcgaatcgcacaccatcaccttcggcattggtcccgcaggcaccggcaagacgtatctggccgtggccaaggctgtgcgtgccttccaggacaagcagattcgccgcatcatccttacgcgcccggccgtggaggccggcgaaagcctcggctttctgcccggcacgctgaacgacaaggttgacccgtatctgcgcccgctgtacgacgcgcttggcgacatgctcggcgccgaccagctcaagcggtacatggacgacggctccatcgaagtggcgccgctcgcttacatgcgcggtcgtacgctgaacgacgcgttcgtgatcctcgacgaggctcagaacaccaccgaacagcagatgaagatgttcctgacccgtctgggcttcaactccacgatggtcatcaccggcgatatctcgcaggtggacctgaccgtgccgcgctcgggactggccaccatcgaacgcatcttgggcggcatcgacgacatcgcattcgtgcatctcaaaaccgaggacgtggtacgtcaccagctggtcggccagatcgtggccgcctacgaccgtcactccgccatcgccggcgaccaccgcgacatcgaacgcaagggccgccgcaaccataccgacttcgatgcccgccagcaaacggattcaaccaaccaaagtgagacagacgatgagcgttgacgtcaccaatgaaacccagtgggtcatcgaccccaaggtcttctccgatttgggtatttgggtactcgaccagatgcgcgtgagcacccagtccgacctgaccatcatgttcgtggatcccgatcccatcgccgaattgcacatgcgttggatgaacctcgaaggtccgaccgacgtgatgagcttcccgatggacgagctgcgcccaggcgacggcaaaaccgtgatggaaggagtgctcggcgacatcgtcatctgcccgtgggtcgctgcccaacaggctgccgcagccgggcacagcaccatgcaggagatgctattgctcaccatccacggcatcctgcacctgctcggctacgaccacgtgacccccgagcaggagcgccagatgttcggcctgcagcgacagctgctgctcaccttcttcgccctgcgccacgatgccaacgtgcaggccacgctgcccgccggcacacccgacgcgctggccctgtacgacgccgcgcacggtgctggccgcgacctcgattccaaataaacttccaaatcaatcacaccaaattcggattattctataccgttcaaggacattcaaggacaccgaaaaaacattatggagtattccagtaccacgctgatcgccgtcaccgtcattctcgtacttgtggcgaccctgttcgtctggctttcgctgaccatggccgccgctgaaggcgccgtggcccgcgtaacgcgagccagcctcaacaatctcatcctcgaggtgcagaccgactccgaagcaagccagttcctcaagatgaagaagatcgacaagattcatcgcgtgcaacggctcatcgccgaccgttacgccaccgccggcagctgtgcgttcttccgcatcgcctgcaatgtgctcgacggcgtactggtgtcttccatcgcatccctgtggggtgcggaactgtgggttgaactgctcgccggattcctgttcgcgattatcgtagccgtggtctccgtactggtccgcccgcgcaccgccggcatgaccaagccggtcgacatcatgatttccaactcgcgcatcgtgtcgttggccaccaagctcacgccgttcgcacgcatcggtggcgacaagtccggttccaaggggtcgggccgtcgctccaaggactccgatctgtccgacgacgaggagcttgagaagattcagctcgagcagggcaaggccgccatcgaccggctggtggagtccaacgacttcgatccggaagtctccgaaatgttgcgcaacgtgctcaccctgtctgatacgttgactcgcgagatcatggtgccgcgcaccgatatgatctgcatggagcgcgactccacactgtcttccgcgctgaaactgttctcccgctccggtttctcccgcgtgccggtgatcggtgaggatgtggatgacctgatcggcgtggcctatttgaaggacgccgtgcgcgccaccgccttcaacccggcggccatggaacgcacggtcgaatccatcgtccggcagccgctgcttgttcccgaatccaagccggtggacgacctgttccatgagatgcagcgttcccgccaacatgtggccgtggtggtcgatgagtatggcggcatcgccggcatggtgactatcgaggatgccatcgaacagatcgtcggcgagctggaagacgagcacgaccgcacccagcgtactgagccggagaaaatcggagacaacaagtggaagatgcctgcccgtacgccgattgccgatctggaggagatcttcgagatcgacattgatgaggacgatgtcgataccgtgtacggcctgctgaccaagattctgggccgcgtgccgattgtcggtgcttcggccgtgacgcgcggtctgcgactgaccgccgtggactccgccggacgccgcaagaaggtgtccaccatcgtcgtcgaaccggcgcacgtcgagggcggcgaggaaaatagcaggacccatgaggaaactgacggcgagcccgtcgaaggcgatgataccgccagcaaggagtgatatgaccgaccagaacaacagcacgaacgacgtcgatgacattgacgtcaccgatgcttccgatgttgccggcgttgccgaagtcgacgcgaccggtgaaacggagaatgtgaccaagcaggacgtgccgtatcgctccggattcgtggccgtggtgggccgcccgaacgtcggcaaatccacgttgatcaacgcgttgatcggcaagcagatcgccatcgcatcctctcgcccggaaaccacccgtaaggcgattcgcggcatcctgaccgccgaccacgcgcagctcgtgctcgtggacacgcccggtatccaccgcccgcgtacgttgcttggccagcgtctgaacgacgtggtcgacgaatccttggccgatgtggacgtggtggccttcctgctgcccgccgaccaggaaatcggccccggcgacaagcgtattctttcccgactgcgtaccgacttcgccaccaagcgtgaggacggtacgttcaagtggcgcatcccgctgattgccatcgtcaccaagatcgacgagcttggccgtcagcaactcatcaacaagctcatcgaaatcaacgatttcgccgatttctcggacatcgtgccggtgagcgccctgaagcacgacaatctggctgaagtgaagaacgtgctcattgagcacacgcccgagggcccgcagatgtacccggacgatcagatcagcgaggagcgtccggaagacaccatcgccgaactcgtgcgcggtgcgttccttgagaccctggacgacgagctgccgcattcgctggccgtggtggtcgattccatcgactatccggaagacaacgagaccggtcagggctatgacggcaaggcgcaggtcaacgtgtccatttacgtggagcgtgactcacagaagccgatcatcatcggcaagggcgcctcgaacctcacctacgtcaagaagaagctacgcaccccggtcaaccgcatcgtcggccaaaaagccaagctcgacctccacgtcaaggtagccaaaggctggcagtccgaccccaagcaactagaacgcctcggcttctaggaatcggccttcggccggttataacaaagggagattccaatggaatctcccttttgctgtactcaagctctgcttacttcttcttggtgtacatctgggtgttgaggagggtggagtagcgcttgatgaccttggggcgaatcaccttcatggaggcggtcatcagaccgttctcctgagtgaactcctcgggcaggatgatgaacttgcgtacggattcggcgcgggagactccctcgttggcccgatcgacccactgctgcacttcggcgcgcacggcggcgttccttgccgcgtcctcgagggacatgttctcgtcaagccccttggcggcgagccacgggcgcaacgacttctcgtccaacgtcaccagggcggagataaacgggcgtttgtcgcccagcaccaacgcctgggagacgatctcgcaacgctggatgacctcctcgatcgggccgggggagacgttcttgccgccggcggtgatgatcaggtccttcttgcgcccggtgatgtacaggaacccgtcgttgtcgatgcggcccagatcgccggtggcataccagccatcttcggtgaacgacagctcagtggcctcgtcgttcttgtgatagcgcgggaacacagcacgacccttgacctgaatttcgccgtcctcggcgatgcgcagggagaatccggggaatgcgatgcccacggaaccagcgtggaacggcgtacccagcgggttgaacgcgcacggtgcggtggtctcggttagaccatagccctcgtatacaggcacacccgcgccacggaagaaagccagcagttccgggtcaagcggggcaccgccggccacaatccacttggcgcgaccgccgagcacttcgcgcagcgaagagtagacaatcggatcgaaggcagcgcggcgagtgcgggtcagtgcacctgccttgccgttggcggagacttccttcatatagttctgcgcagccaccacggcggaggcgaacaccacgcccttggggccgtggccggccttctgggacgcggcgttgtacaccttctccagcacgcgcggcaccacgatcatgagagtgggcttggccacctgcagatcgctgatcagcgtcttgatgccggtggcgatgtagatgcggacgttcgaggagacgacgatgtagttgatggcgcgggcgaaggaatgggcctgcggcaggaacagcaggatggtgtttttcttgtcgtgcagcagatcgggcatgtaggccggcagattcagcgcggtctggcagtagtgctcatgggtcatttccacgcccttcggcgcggccgtggaaccggaggtgtacacgatggagcacaggtcggtcttcttgaccgaatcgatgcgcttgtccagctcctcgtccgagaccgtggtgccgtaggccttgatttcgtccaagccaccggtctcgatggtgatgatgtgctccagggacgggcactcttcgacggacccatccgccttcttacgcatgtccgtgtcctgcacgatcagcagtcgggcatcggagttgttgacgatattgcgaatctgctcggcggaatcggtgtcgtagatggtggcgagcacgccgccgcacgccatgatcgccgcgtcggtcaggtcccagtcgtaggaagttcggcacatgaatgccacggcatcgcccttcttcaggccataatgaatcaggcccttggccacggcacgcacgtcagccaggaactcgttggcggtgacggtcacccaatcgttgccggacttgtaggtgtacagcggctcatcgcccatacgttcggcgcggtccgcatacaggtcgtagatggacgtaccttcgtccagcggcggattgccttcggtggaggtggtgagcaggccggtggcggggtcgatgtcggtgacggtcaggtggccgtcgtcccaatcgtcgctgtgaggcaaagcgatattggtctcgaccggcacatcggcgttagacaggtaatcgggctcgtccggggtgtcgtcgtggaccgggtggacgaagtcggatcccaacctgagcgccttacgggtgagattgatagtgtgctgcgtgaaggaattgataaccgacaagtcttgctcctgtaaacctttcagtgtcgtccagccatgaggcgaacgcttctcaaagttcaaattgtaatcgcccaaaccgaactcgtcaccttacgcaaccgtaggattctggcgggttaggggagtgcgtggcaaaatattgcacaggtcccgatattgttgagtaaccgtgagctacgaaacggtgattgtcgataattactgagcggttggttgctgatcgatgccgggtgattgttggacgacttccgagcaattcatccgcaatgcacatggacacattcgtatttctcactaatttcgggttcgtttctgtttcgattggcggaatctcaagtcatggcctttaccttccgactacactttctatgcggataaccatgtccattttgaagtagaacaagaaagggctctcatggcgcaaaacccagaagccaccgtggtgttcggcgttttgaatgaaacgtccgaaacggaatcccgcgtcgcgttgacgccggatatcgtcacccggctgaagaggagcggtgtctcttcactgattgaagcaggtgccggcattgctgccgactacac

SEQ ID NO: 1127 - DNA, 26016 bp, Unknown
  R81_24m  MAG No. k141_3306
atggtcacgcttaaagatgtggcaaacaaggcaggcgtttccatgtcaacagcgtcggcagcaatacgcgggaaagacatcgtcaagccggaaaccacgcagcgcgtgctcgaagccgcgaatcggctcagctaccgcaccaatctttccgcgcgggccttgcgatccggcaagtccgacatcttcaccatgatcgttcccgatctggaaacccagtactatgccaaactggcgaactccatggctaaagctctggcgtccgaacaaaagcgccttatcgtgcagatatcacaatacgacaaagacaaggaacgcgagctcgtccgccagatcacgccatcgacctgcgatggcgtgttcatttgctccacgcaaagcagcggcgcggacattcatgccgtggcaggcagcattcccgtgctcatgttcgatgatatgagcaacgacatcgaagcgtattatgattccatcgagacacccagccagaccggcatgtatgcaatcatcaaacacctggtggaatgcggacgacgcaaaatcggcatcgtcggcaccacaacgtcgaatatccgtaaaatatcattgtcgactacgctacgacaaaatcgttgcatctatgcgtatcaagcgatgcaatcatatggactcgatacttcgaaggcatacatccaatcggattggggcgtgggagccggcatccaaatcgcacacgacctcgtcaggcaaggcatgtgctatgacgcgctctgctgcatgaatgacgaacttgccttaggcgtgcttcgcggattggccgaatgcggcgtgcatgttcccgatgacgtcgcggtgacgggattcgatggagtgcccaccggatcgtataccatgccgacattgtcaacggtagcagtggatttcaatagcatggcacgcaccgcggtcgccatgatgcaggatcagatagaacgggacgatgccgatcacgttgagtccatgccacgccacgtgattgtcggattccaattgctcaaacgtgaatccacactgggacgaaacatttcgacggcatccatcaataagaatccttccgcaaaaacttccgctgatagaacatccaccaccaaggaagcatgatttcatgaaacgcgttgctgtgacctatgaatatttctgccgcatcatcctcatgattctcgtggcacacgtggccttcatagcacacacgctgctcgggctcgtcatcggcggattcttcccatccgtcgcggcgacctacgccacataccgcacatggctcatcgatgtgaaagaccggtcctggaccatcaaacagacatggacgaccttccataaggcgtggaaggcggagctcaagagtgcgaacgccttcggctggccgcaattcgcggtctgggcactgctgatctgggagtactggctcgtgcagaataacgacatgggcgtcgccggccttgtggtctccggagttctgcttctactgaatctcttctacggccttttcgttttcatcagctgggcggtacacgccaacttcgacgaatcgccgtattggacgctacgcacgtcaatcgccatggtcatcgccagaccgatgtgcagtctcatggtcttcctgctattcctcgtcaccgtatgggcatacgccgcatggccgggactgcttatggcattcggcgtggccgttccgatttacgccactatgatggccgtgtattcatggggacgtttgcccggcatggatgtgcatgtgcttgagccgaacgaaaaggacgcggcagccgccatacacaaacagtgaaattcaatctgaatgaaattgggcttggatcgatgaattcgatccaagcccaatttcattcaacaccaaatcggcactcacaccttgattatcgcgtactgcgattcgtagagccgatagtaggcaccatggcgggcgagcagtgcggcatgactgccctgctccacgatctgtccgtgatcgatgtagcagatctcgtccgcgttctcgatcgtcgacaggcggtgcgcgatgatgaagctcgtgcgccccttgagcagatgctgcaggccggcctgcagcgcctcctcggtgcgcgtgtcgatgttgctcgtcgcctcgtccaggattaggatacgcgggtcggcgagcagcacgcgcgcgaaggcgatgagctggcgctggccggccgacagggtcgatccgcgctcctccaccaccgtgtcgtacccgtcgggcagttccatgatgaactcgtgcgcgtgcacggccttcgccgccgcctcgatttcctcgtcggtggcgtcgagcttgccgtagcggatgttctcgcgcacgttgccggagaagatgaaggtgtcctgtagcatcacgcccatctgccggcgcagcgatgcgagcgtcacgtcgcgcacgtcgtggccgtcgatcgtcaccgagccctcggacacgtcgtagaagcgcgacagcaggttgatgatcgtcgtcttgccggcgcccgtcgggccgaccagcgcgatcgtgcgccccggttcgacgtggaagtccacgaggttgaggatgttacggccgtccttctcgtagcggaacaccacgtcgttgaagtcgacgcgcccgcggatctgcggcaggtccgccgcgtcgggcttgttgcggatctccggcgtgacgtcgagcgtctcgaagatgcgctcgaggtacgccgagcaggtgatgagctggttgtagaagttaccgatgttgatcaccggattccagaagttgttcgcgtagccgacgaacgcgatgagcacgccggtggtcacgttcacgcccccgaaacccatcacgccgacgaagtatatgaacgagatggtcatcacggagatggtctgtacgcccggccacatgaggaactggatgtgcacggcgtgcatccacgcggaacgcacctcgccctgctgctcctggaaggtcctgaactgggcctgctcctgcgcgaaggtctgcgtggtcttcactccggcgatcgactcgtggatgtaggcattcaggttgctctgcttgttggagagcttctggtaggcgcgccgctggaagatctgcagcacgcgcacccagatgatgagcaccgggaacaggatcaggctccacagggccagctgccagtcgatcacgaacatcacgatcagcgtgatcacgaaggtgaacacgtcggagatcacgttgatcagaccggagctcagcgtgtccgaaagcgtgttcacgtagttgaccacgcggatcaggatcttgccgtgcgggcgcgaatcgaagtagctgaagggcagcgtctggatatgcgtgaagatatcgcggcgcatatccttgagcatgagctggccgacgcgcgtgatcgccaccgtgcggtagcgcagcccgaactcgtacagcacgatcagcgcggcgaggatcacggcgaggatgccgagcttgccgaggtccttgttcgggatcgcctcgtcgatcatgatcttggtcaggtacggcacggcgacgacgatgcagctcatcgagatgacgacgacgagaatgcgcgccacctgtgccatatacggtttgagatatttgccgacgcgagcgatgtcgtggaggttgatggactcctccagctcctcatcctcgcggaatgtattgcgttgtgccataagtcctcttctaaaacccctgtgcggcgccggactggagtccgagctgcttgtggtagatgccccagtagcggccgtgtgcggccacgagttcggcgtgggtgccgcgttcgacgatgcgtccgtgttcgagcaccagaatcaggtcggaatccttgaccgacgagatgcggtgggcgatggcgacgatggtcttgccgccgtccatctccttgaggtgcttctggatctccgcctcggtctccatatcgacggccgaggtcgtatcgtccataatcaggatcgacggattgtccgcgagcgcgcgggccagcgacaggcgctgcttctgcccgccggacaggcccacgccgcgttcgcccacgacggtgtcataaccctgcggcatcgacctgatgaaattgtccgcgccggcgatctgggccattttccggatatatcggtcgtcgctatcatcgctggcaccaaaaccgatgttgccgccgatggtgtcggagaacaggaacgtatcctgcgccacgatgcacacctgcgagcgcaaggtggtcagcggccagtcgcgtgcgtcgatgccgtcgatgagcacatggcccacggtcgggtcgtagaagcgggagataaggctgacgagcgtggacttgcccgcgccggtttcgccgaggatgccgagcttggagccggcgggcacggtgaagtcgaggtccttgaggatcggggtctccgggtcgtccgggaaggcgaagctgacgtggtcgaagcggatgtcgcccttgatgtgcagcgggcaggacttgcgttcggcggactgctgggcaccggatgttccggaagccccgggcgctccggtagcctcatcatcgtgcttgacttgctcgacgatcgtgaccgcctgcttgacggcttcgaccgcgtcaggcttctccacgatgcgcggctgttcgttgagcagcttgcggatcttgatgcagctggcgttgaatcgctgccagtcgttgatgagccagccggactggcgcaccgggccgtcgatcatccacaggaaggagttgaaactcaccagattgccgagggtcatgtagcccttgatgaccagaaagccgccgaggccgagcgtgatgagctgcagcgagaagccgaggccgtccagccagggcatgtacctgcgcgagttgtaggccagggccatgttgcgctgcatgtaatcgtcgttgtgctcgtcgaacttttcggtctcgtacggttcgcgcacgaatgccttgaccacacggttgccctcgatgttctcttcgaccatggagttgagggaggccagcgagttgcggatggagaagaacagcgggtgggcgtgcgtggacaggccgcgcgtgagcacaaaaatgaacggcgtgacgcaggccaggacgagcgcgagtcgccaatcgatggcgaacatcacgcacagggcgcccacgaacatgaccacgcagtcggcaatctgatagctcacccagctcaggcagtggcggatcgcgtcggtgtcggaggtcaggcggctcatgatgtcgccggtgcgcgtgtggttgaagtacgtgaagtcgagctcgtgcagcttctcgtattcgtcggagacgaggcggtagaccgagttctggccgaaacgctccatccacatctggtagccgtatcgcgcgcccacgcggatgatggtcatgaggatcatcagtccacacagacgtggcagttcgtcggtatgtccgccgacgatgacgcggtccacgatgataccggacagaatcgggatggtcagggccatcgtgttgttggcgatgaacagtagaagcgcgcctgccacgcggggcaggtctggtttgcagtatggcagcacccatttgaggttgcttgcgctggtattgattcccggatcgacgtacatgtgaggggatcaccgtttcttggggattgtttgcttatggtatggtgcggcatgctcctgcgccgcacgcggcaatcgctgccgccacgattcacgatcagccgtgcttcgcactgcgcctgtcattggccgcacgaccggagctctccttcatcggtcgaagcacgttcgactttcgcaaacgcgtactagtctagacggcctgcgtccaatcgcaacagcccacaactctgcgtgttccccgcattagcaacgcggcacggcccgctaagcgcaacattccccggaatgcgtcgcggcacacctccgaacaggtccaattcgcaacgcattcccgggaaagtggcgcatgtcatatcacgctcaaacaacccagcatatatatgggcaggtattcggttcggccaacagtctccacgttgccatcatggaacacgtaggcatgggcaaaccgataattgtcggtatccagcaggttgttcatggcccgatgccgcgtatagtccttgcctgatttgatttcaaccagtgaaatatcatccagaccttgctgcactacaaaatcaacttcaccaatacggttctggttgaagtaatgcagttccaatccccgtgcaaacagttcctgagccgctgcattctcgaaaatcgacccgtaattcatactggatcggtgattcacaatctctaagtccacactgcgcatcaaacgggaggtcagcaaaccgacatcgttcatgtacagtttaaacgtgttctcgtcggcatgctccgtcagcgggtattcagggtcctgcacgcgcgaagtaggcaaggcgatacctgcgttcgccaaccaatcgaacgccgtctgcatatgagcgaacctgatattcttgcccaacttggagaacttgaatcgcttgttttccgcattgagctgacttggaatcgcctcgtaaatgctcttgatatggcgacgttccaccaaatcggagacgtatttggtgatgtcgtattcataggtatcgaatatggcctgctgagtattgcggaccttgacaatatcggcaaaatccacgaatgactgcactgcgtcgggcatgccgccaatcagcagatacttgtaccacaggtcggtgagccgttcatgtagataatcgggaacctcccgtcgatccgcataacattcacgcagcgtatcgagagcggactgaggcagccggcatgcagcgcagaactcatagaaattgagcggatacatacgcatcgtctgcaggaatcccaccgggatcgagcgcacattgaacacatcaatgcccagcagggagccagaaacgatgacatccaatcctttggcgccagacaggaatttggtccacgtgagcatgtcctcacacgcttgtatctcgtcaagaaacagcagagtcttgcccggcgtaatttccgtgccggaaagtaccgataaccgcagtatcaggtcttcggtgtccttggccttgcttaccgtttcgaccgcctgaggcatttcgatgaaattcaccttagccacatgctcataatggtctgcaccgaactgctcaatcagcgtggtcttgcccacctgccgggcacccgtgaccaacaagccctgcttggttttacggttcttccaattcagcaactggtcatatgcatggcgcttgagcatatttccctcctcttttgtggagaatgactgaaaacacgcaggtcatcacacaatcacatactgatatcatcttagcattcacgattttacatatgcaaaacgcactttgaatcacaaaaaacacaagaatagtgagtggttcattcacgttttacgtattgtgagacggaatcggcatctcccgcaacacgtgagataggcggattgtaggcgaaccggcgatacgcgataacccattcgtcggtgccgggaacgttcacgatgttgtggtgaccggtggcatacagcttgtgcgccgggtcctgttcgagcagcacgcgcggtccgcatgacggcgccaccaccaccgatttccgcaccttctccgacccggtcaagtggattgaccgcaagaacagcgtcatcgattcgaccatgctgcgagacgatgacggctggtggtaccgcgcttccaaggacgccgaaatcaccatcgaacgcacgcgcaatccgtacacctccgcctacgaggtgctgcgtaccgacgacgaccagcagtggtcgtacgtggggtcgctgaccgacattctcggcaatggccgttactcctggatgtacctggaaggaccgggattgttccgctacaacgataccgatgtcaagaccatcaacggccgcaagatgcgcttcggtctgatgtgcgatcagtacgccgaggccgccttcaagctgtaacccttaaggcttcaccactacaggccggtcgcggaccatatcccaagtcagcaaccggccgaaccatatctcgcggcttcagtcatccttcatcatcagtattcggtagcggtcctaaatcagctccgccatccggctcataatcactcgccaaccacgggcggaagcagctcccgactatccacagtgggacattggtcagccaatcctgctccttgtaattccgcatcgacgtacggtaaccgcaaatcccgtatttgtcgcacagccacttcaagctacgcttatgacgctcggtaccagctttggcctccaacggaatgattgcgccattacctgcaaagacaaaatcaacttctcccgtactgttcgcattcgaccagtacatcggtgtgatgccggcggccactaattgctggcaaacatactgttccgttaacgcaccacggaattcggtcagcccgtcatcaccaaggaccacgcttgcgggagtcagatccagggccgctgccagcagcccaacatcatggagatacagtttgaacgcggaatcatcacggtatgacggcaatggtgccgcaggtttttcgacgcgatacacccgcaacgcaagaccagaatcgacaatctgctgaatcgcggattcatattgcgccgcccgagcgccacgagcgatgtggccaaaaataaatttataccgcaatacacacttttcctagggttgcaattcgcgtattctacatttttcctagggttgcaattgtccaaaattgcatttttcctagggttagtaatgcagaatactgcacttttcccagggttagtaccctgaccttccctaatcacacggtgttgtaaaggcgggcggggaaggcgtcgcggtattggccgggggtgagtccggtgcggcgcttgaagacgaacataatagaatatctcaagcatcgatgaatacggagatgatcacaatggctgattacatcggaacagtcaacaaccaatcttcaacacagcccaacggtcacaattcacatagcaacaccaccgagtcgctatggcgcggcacggattatggcaaatggttcgtagcggattcatgcacgtcgctgtcatcaagtatccaaggtttcgcaatgccactcatcgcgcagaccgtcacgggctcaccggcacaggcgacgctgctggattcaatcatgaccatgatatcgtcggtattgcggctgccaggtggcgtggtacaagataagtacgaccgcaaaaaacttatgattgcgtttggcctgattggtttcgcactgttcggcatatgcgcggccctaggatgggcgggattactcatatacccggtgctgatggtacttgcgatatgcctcggcatacgctcaggcctcctaggaaccacgagcaacacgatgctacgaggcatcgttcccgatcaattgctgcccaaggcgtcaagcctcaatgatggccgcgatgccgccctcgaactcgccggcgcaccagtaggtggcgtattgatcggcggcggtctatggctgccattcgcagtcagcgcgctgctgaatctattggaaaccgcggcggcgatgcggatcacaaaatactggcatcgtggcgggcggaccaatacggagggccgcgcccttgccgacgatgaggccgatgagaatggcgatgcggccaacatcactcaggccgctgacgagcaggcaacgaccacgacatcatccgcgtcacagtattggcgtgagatgttttccggattccgctggcttcttagcgagcgattcgaacgtcgcctgattttgtcgagcgcgctggcgttcgcgtgcttcaactcgttcctgctgattacggtgctctcgatcggctccgacccatcacatgtggtgtcagccagtttcatgaacgtttctgtgtctgtgggcgtcatcgttggctcgctcatctcttccgtgctggttcagcatgtgcgcggcggcatagtcgccgtatcgttctacgtgctgatgagcatcggcgcgctcggcgcggcgctggctccgtggattcttgcgcgtatggcgtttctggcaatttcgctgctggccctaccggccggcaatgcggtaatcaacggattccaatcattgctcatcaacaaggagcatatgggccgcgtattcgccggcatgggcatgattgagacgattgctgccccggtgatcacatttctgtccggcatcgccatgcaacactggggttactcagtcacgtccgtggctttgggcttgtgcatcgtggcggccgcgatccctgccgtgacaatgagggaactggtcacactgcctaagccggatggctgggaggaccatatccgcaaatccgggctcaccaagttctgacaacaagtaagggcgactatctcccggatttgtgacgttcggcaaccgtcagcgtcacaaatccgggaagaggaaggtagatacggtttcagccgcgcgggcagcaaggtggacaaatcgttgccggggtggaatcgcggcaagtatgcaaaagcctcccgttcgcgcgcgacgcataagcgcgcaaatgggaggcttcccaaccgcagcatcatatgcagaaataaggagagtaaggcatatgctgccgcggtcacaccccgccgggaacctgccgcaggccgcgtccggcatcgaaagccctgcagtcgatgcgtgcggccgaccgttcccggcgcggtggccatgtcagacgtcagtcagacgtcatcacttctgccagccgatgtcctgcggcaggttgccggcgaagccggacgggccgtagttggccaggcccttcttcgcaccgaggtacgaagccgggttggagaccgggatggtgccgtacagcttgagggcttccttctcggcggcgttgacggccttggtctgctcgtcgtagtcggagaggctgccagccttcttgacgagctcgtcgatcttcttgctgcccacgtaggtgaagttggacggaccgtcggaggtgtacagctgcggagcggacaccacgaaggtcatggcgctcggagcctgccaagccatcggcagcacctggtagttgccggaagacacggtgtcggagaacttggactcggccacgttcacgaccttgaccttgatgccggccttcttcatcatcgcctggtaggcgttggcgagggcctgctgggtggcgttgtcaccgaagaaagtgaaggagatctcaagggtcttgccgcccttggcgtagtagccgtccttgcccatcttgtagccgtcggcctcaagggttttcttggcgttgtccacgttgtacttggcctcggcgggcaggttgttctcgtagcccttctggaacggcagcagcagctcggagcccggctgctcggccttccagttcaggccctggaactgcacgttgttgtaggtgttcacgtcgaaggcctgagtgatggccttacgcacctgcaggtcgtcaagcggcttggacttgctgttgtactccagcacgcgggtcttggtgctgtagccgatgcgcagctgggcgtccttgacggaacggatggccttgatgtcgtccttggtgttggcctccacggcgtcgatctcgccgttctggaaggcgttgagggaggcggtgtcggccatctgcttgtagacgatcttgtccagcttcggcttgttgccccaccacttctcgttcggcacgaaggtgacctgggagtcggagaaggagtcgaccttgtacggaccggcggcccactcgttgtgcgggttcttcacccagccctgggtgaaggtcttcgggtcggcggccttcgggttcaccagagcgccgaagacttcctgccacgggtagtacggggtcttgtaggtcaccttgacctgcttcgggctgtcgccctgctcaacgctagcgatacggtcgaagccgtcggtgctcggcgggttgtagtccgggttggagccgttgttggcttcccacgtggccttgaaggcggtccagtcgatgtcggagccgtcgttccacttggccttcgggttgatgtcgtactgcacgaccatcgggtccttgctcacgagcttcatgtcggtcaggaagtccgggttcaccttaatcggggagccattgacctggtcggtcatgagcaggctgggctggtaccagctccacagctcggacatgtagccggtgttgccgtcggaagacaggtagttccagttcgggccgatttcgacgatggacagggtcagcgtgccgccgtccttgacgttgtcacggctctggtggttgtcgtaacgctcggtgaccttcggcatgggcaggtcgccggtgtacgacgaatcgatgccggccggcggttcggtggcgctcgaggcattgctggaaccgttgccattgcccgcgccgcagccggcaagcagcatggcaagcgccgcagtggccgcggcgagcgcggtcagcttacgtgtcttgttcattgttatttcctcctctatatggttccgaccgtcatgcgaaatggcatgcaacctgatggccgctcggtcgggaagtgtcatacggccgcagcgccgggcgttcgccgcggcagcgggcctgttgttcggcgctcagcttgggcatgagcgggcagcggcccatgaacgggcagccttcgaacgtctcggtggggctgggcacctcgccctgcagcacgatgcgctggcgggtgcgttccgccttcgggtccggcaccggcacggcgctgatgagcgcctgggtgtacgggtgcaacgggtgctcgaacacgtcttcggtgtcgccggattccacgatgcggcccaggtacatcaccgccacgcggctggagatatggcgcaccaccgacaggttatgggccacgaacaggtaggccacgcccagcttgttctgcaggtcctcaagcaggttgatcacgccggcctggatggacacgtccagtgcggagaccggctcgtcgagcagcacgagcttcgggttgaccgacagcgcacgcgcgatggcgatgcgctggcgctgaccgccggagaactgcgtggggaagcggtccacctggtcggggttcagctccaccagacgcatgagttcaccgatgcgttcgcggatctgctctttggagtagtgctggaccttcatcggctcggccaggatgtcgtagatcggcaggcgcgggtcgagcgaactcatcgggtcctggaagacatactgcacggccgaacgcagctcgcggcgcttctcgcgcggaatcttgtgttcgagcttggtgccgaacatctcgatctcgccgtcctgcggctgcttgaactccatgatctccatgagcgtggtggacttgcccgagccggactcgcccacgagcgccacggtctcgccttcgcgcacgtccagcgtcacgtcgtccacggccttgacctcgccaatcttacggcgcaggaatccgccggcggtcagcgggaaggtcttgcgcatgtgcttgacgtcgagcaccatcttgcgttcgtcgcgcgggatgccggcgaacttcgacttggcggcctcggccaccgtgtacacgtcgtggaaggtcaggcccttgtccacgatctcctgggtgcggtggcaggccacgaactggcccgggcggcccggcaccggctccatggccggctcggtggtgtggcatatgtcggtggccagcgggcagcgcggcgcgaacgggcagcccttgggcatgttgaccaggttcatcggggagccaggaatcggcaccaggcggctgttgcgttcgcggtcggaacgcggcacggcacccagcaggcccatggtgtacggcatggccgggtggtcgaagatggagtcgacgtccgccttctcgaccgggcggccggcgtacatgacgacgatgtcgtcggccacgccggcgatcacgcccagatcgtgggtgatgaagatgacggccgcgccggtttcacgctgggccttgcgcagcacttcgagcacctgggcctggatcgtcacgtccagtgcggtggtcggttcgtcggcgataatcacgtccgggtcgttggcaatggccatggcgatcatcacgcgctggcgcatgccgccggagaactcgtgcgggaaggacttcaggcggtcctccgggtccgggatgccgaccaggttcatgagctcgatggagcggtcgtgaatctgctgttcggtcatcttcggattgtgggtgaccagcgcttccttgatctggtcgccgatggagaacaccggggtcagagcggagagcgggtcctggaagaccatggcgatgcccttgccacggatctcgctcatctcaagatcggacttgctgagcaattcctcgccgtggtaggtgatggagcccttgacgctggcgttcttgtccagcaggcccatgatggccatggaggtcacggacttgccggagccggactcgcccacgatgccgagggtcttgccggggtacaggtcgaagttcatgccgcgcaccgcgtgcacggtgccggcttcggaggcgaagctgacggtgaggtcgcgtactgaaatcaccggttcggatgccatgccttgcgctcctgtggtgttggggttggtgttggttgttacgttgcttgcgttgcgttcgtcgctcatgatgcccgtctcccctctcactcggccttgccgccagaacgggagtacgggtcgatggcgtcacgcagtccgtcgccgatcagctgcacggagaaggtcaggacgaccagcaccacggacgggaagatcagcacccacggggaggtctgcaccacggactggccggcgttgagcagcgtaccgagcgaggtgtcgggcgccttgatgcccaggcccaggaagctcagcgaggtttcgctgttgaccgcaccgatcacgccgagcacggtgttgatgaccagcaccgaacccaggttcggcaccagatgacgcacgatgatggtgaaggacggcacacccatgaacttcgccgcgcggatgtattcgcgatcgcgcaggctcagggtcagcgtgcgcagcgtacgcgcatagccaacccagccgaacgcggtcaggccgatggccagccacagccagtcgctgccgccggccgccatgccgacgatcagggcgatgagcaggaaggacggcacgacgagcagcatatccagcagccacatgcccacgcgctcgaaccagccttcgaagaacgccacggccgtgcccaccagggcggcgatgatcgtggtgccgaacgagctgaagataccgatggtcaacgaacggccgaggccgcggatgatcatcgcgtacatatccgagccaccgaccgtggtgcccagccagtgctgggcggacggcggcgaggcgagggcggcgaaatcgggctcatcgtagctccactgggagaatttcgagccgaaaatcgccaaaagaatcagcagaatcagcaccaccagacccaccacggccgaggggcggcgcatgaagcggcgcacgtacagctgcatgcggccggtgcggtggaagtcgtcggcgctggaagcctcctgggcgttcctggcgtcggcggactgcggttcgctgccctgcggatcggtgagttccatatcctgggcggcggcgtcggagaccatgttttcgttgtcgttcatcatgttagatcgtcctttgcgcggggctcagctcagtcggatacgcgggtcaagccaggcggagaagatatccgccagcagcgcgccggacagcgtgcacacgccaccgaacgcggccacggccacggcaccgttgatgtcgttgttggcgatggtctgggtgaagtacatgcccaggccgttgatggcgaacacgttttcggtgatcaccgcgccggtgaacacgccggcgatggagaaggccacatccacggcggtcggaatcagcgaggtgcgcagtgcgtggcgtcgaatggccgcgttgagcgtcaggcccttggcgcgggcggtgcgtacgtagtcggcgttcatggtgtcgagcagatacgtacgctgggtgaggtggtagcccaccatgcccggaatcgtcatcacgatggtgggcaggatcaggtgctgcagatagtcaaacacccaaagcaccgggttggagccttggtaggagtgcaggccggtcacgtagaacgcgcggctgcccacgatgttgttgaagttgatggccagcagcaccaccatcaggcccatgacggcggccgggaccaccaggaagaacgttgcggtggtgttgagcacgcggtcctgccacttgtactggcgaatggccgtgtacacgccgatgctcacgccgaagaggatggagagcacggtggcgagcgtcaccagctgcagcgaagcggagatacgggaggcgatggccggcgccaccggcgactggtccgggctcaggccccagttccactgggtgaggatgcccttgagccagcggaaatagcggatgacgaccggcgtctggtcgttgatgttggccagatcgagcgaccggttaatcgacgcgatcggcggatgcggattgcgcgacatgtagttcgaacgcggatccatgaatgcgctggccaggaaatacgtcatcgatactgccacgaacagcatgatcacgtagttcacaatgcgcttgatgatgtacttgaacacccaaccacctcccagataactgaagaagtgataccccccccgctcaaaaccacaaattgagttcaatatatggaatatgggtattgacttttccgactttttcctgtacggaaaaccgcgaaaacacttactgtatattgggcaaacatccgtttgttaattttgtatttcctgagcctttgctggacatgccttatactttcgtgtcagcagtccgccggcccggatggtgacagtccccgccgccggcaacggattatccatcagcatcatcagcatcagacaggggcatcatgacgacagacgccagcgcacgggccatcaaacccgaacttctacgcacgtacaccgaagacttcaacaaggaccgcgccaacctgatcgcggcggacgcggcggtttcggccggcgtactcaaggcggccaccgactatcgcggcgtgcgtgcgctgccgcgcgacttctccatcgaactcaagcagggttcgatcaccaatcaggagcgttccggccgctgctggatgttcgcctccctgaacacgctgcgctacgagcttatgcatcgctggaaccttgaggacttcgagttctccgagacctacctcttcttctgggatgcgatggagaagtcgaacacctacctggagaatgtgctgcgcacgctcgacgagcccaccgactcacgcctgttcgaggccatcaactggggcccgtccgatgacggcggctggtggcagatgttcgccgcgctggtgaacaagtacggtctggtgcccaagagcgcctacccggagtccgagaactcccgtaattccgatgatttcaagcagtacctcaactccaagctgcgcgagttcgcggctgagctgcgccgccgttcggctgcgggcgctggcgaggacgagctgcgcgcgctgaaggacgagtacatgggcaccgtgtaccgcatctgcgccgtgtcgcttggcgagccgccggagaagttcgacttcttcgcgcgcaccaaggatgacgccgaggataagaagggcgaggcctgcaagtgcaaggccgaggccgacgcagacggcaaggccgaatcctgcaagtgcggcgactcctgcaaatgcgagggcaaatccgacgccaaggcctgcaagtgcgataaggacaagtccgacaagccgaaaaccggcaaggacgagcgcccgcagattcgcgagatcggcatcaccccgcttgagttctacaagaagtacgtgccggtggacgtcaacgatttcgctacgctggccaacgccccgctcaagaaccgtccgttcaaccggcgctaccgcatccgcttcagcgcgaacgtggccgaggctggcgatatggaattcgtcaacgtgccgctggacgtgttcaagaaggccgcgcttgaccagctcaccgccggtcacccgatctggttcgcctgcgactgcacgcagttcgcgctgcgcaaggatggcttcttcgaccagtccgtggtgcgcgtcgaccagctgttcggcactgaattcactggcgacaaggcccacggcctcgaatacggcgacagcccgagcaaccacgccatgaccttcaccggcgtgaacctcggcgaggacggcaagccgaaccgctggaaggtggagaacagctggggcaaggacgccggcaaggacggctactacgtcatgtccgacgcctggttcgaccgctacgttaccgagctcatcatccgcaaggaatacctcgacgacgccacccgcgccctgctcgccgccgaaccggtcgaaatcgacccctggcagcctctcacccgccgctgccgctgacgttccgctggcgggagcatatattcgaatgccccttctctctgttcagagagaaggggcattacgttatgcgagtacgcccggccgcacctattcgagactatcgcggctgagctgagcaaaagtgccgtcatcatcggccaattgccggtaggttccggcctcgctaattgttccgaactagttatccacagagttatccacatctcccgcaagctagagccacataccccggttttcatggcgagcatgtgaccgctgcgctacggtggcgtcatgaacgacatattgcccactccaccgcccggcgtattcgacgacgaaccgtccggctggccccggccccacacaccgggcgttgcgtctgcgcgcaccatcaatcctgagctacgttcatcaccacgtatggcgagttccgcgccaactgtgattgcaggccctgtgtcgccagcaatgagcgaaaccctcacccaacgtaagcgggaaatgcttaaacgatgcacggacgccgcgcaacagctcgggcaaccggtgctcttcggcatggccacatcgctgatactgcaatccgtgccgcttcccaaggattgcgatatcgaccccgccgagctccataccgtctccgactcacaccgcacacgaatacgtgccatcgtgccgccaacgacaccacacatctggaagccgctgagcgatgcgcacaatgtgcgtatcaacaaacatgtgtacgcactggatctgatacacacttgggcacaactcgccgctcatatatcgctcgaatcgctggtcatacttggcgacgcaatccttacggcaatcgcccgcaagccgggtctggcgaacggccgcactgctgacggcatttatcaggacttcgtgcggcaagtcactggactcccgaaattcaacgcaaaatccaagtgcatgatcgctcttgcattcattacgccccgcgtggactctccgatggaatcaaagacccgcatcgctacgacgaaatacgggcttccgccagccgtgacaaattacacggtgcccggcgcgacattcagcaacggcgcgccgataacgctcgatctcgcttggcccgaatttcgcgtcgccatcgaatatgacggcgatcatcatcgcaccgacaaaaaccagtggcggcgggacaacgacaagcgcgaactgctgcgacatcatcattggatcatcatcatcgccactgccgcgaacatggccgatgagccatcccaagccgaactcgcctaccgggtcgggcgacagttggcattgcgaggtgccgtattcgatttcactttgacggcaacgccactcgatgagctcgcccggcggaggcgacgaagaatataacgtttatcgcgaaagtcgtacagtatccatgttgcgccgacgctgcgcgactcggtgtccgtgtccgatgtcccggtagcgatgtcaatcgatttatgtgtggaccgggccagatttcgctgtcccggttctccatttcgcccctttttgagcaaccaagacaaaatttcattcacctatcaccccaccgtgcaatattcgccatcgtacatcggcggaattccggggttttgggattacggataatgggcgtttacaaggggggctgtcccggttcccaaaaagaagccgaaatcacgaaccgggacagcgaaatctgtcccggtaatcgcgtcaatcggttgccgtcatcaccggaacatcaactgcgcataggtcgaacgcttcaatgcgcaacaggcatgcgaccatatcgcgatagcgatattccgacggaagtatgggactcaccacgcgaccaatattatttgccgagctttggagcctcgtgcttggcgtggcggatcacggcatcggggaaaccggcgtggatgtagtcggacagcatccgcaatagcctctcgtcaaaggtgtgccgctcatcgctgctggcatcgaccaggatgaaatcccatgagtattcggtgtcaccgtcgttgatgatgagtccgcggccagtgatttttgcggccagcaacgcggcgatctgtatggcgcctcgcttgaccaaggccgattccgcttgagtcaggttgcccgaaaatgtgacggtatacatcatcagtccccccttctttgttattttctagaacagcaatgccttattgtaaacagacagcactctgccataatccttttttcaatatgcggcccatggcattcccagcattaaaaaaaaagaaacccggcggagggggccgccgggtgagagagaagagagaagaagggttcagttatggggttcgaagaacctcgccaccggtatgaacttcattccgttgacatcttctatataaccgctccatgcttggcgaattgatgtgcttgtctgggaaaagtcttggcggagtgtgacgaatttgtgacgcccgccgacaaccggcctcgcattgtcggggcttgaccgcacatacggcaacgggccacctcgcaacacttcatgtgcgaggtggcccgtcagctacgagctagcaatgccgaatcactcggcggcgagcttggccttctcggcggccagacgctcggcttcggcggcacggcgagcagccagcgcttcatcgaagcgagccagctcctcttccacggcctcggtcggaatcttggcgaagatcggtgcgggcttgggcaccacggcgccgacctcgattgcctcgctcttccacgggtgcacgttcacaccgagctcgtaatcgccggtgataatcggatacgtgaagccgggcttgtcgagatcctcgacttccttgagctcaggcagcggcgagaaggtaccggtgccgccgagcgcctcccacaccttctgtgcggagtgcggcaggaacggcgcgagcaggtggttcgcgtcagacacggcctgggcggccacgtgcagcacggtgccgagacgagcctggtcgtccttaatcttccacggttcggtggcggaaatgtacttgttgatgtcgccgaccacacgcatcgcctcggacagggcgtgcttctggtggtgggtttcgatggaggagccgaccacgtcgaacgcggcggaagcctcttccagaaggccacggtcttcgttggtcatcgaatcctcgtccagcggcggaatctcgccgaagttcttgttgatgaggttggccacgcggttcaccaggttgccccacgaggaggcgagctcctcgttgttgtggcgcacgaactcggcccaggtgaagtcggaatcagaggattcggggccggccacggaaatgtagtagcgcacggcgtccacggggtagcgggcgaggatgtccttgacgtagatcacgatgccgcgggaggagctgaacttcttgccttccatggtcatgaactcgctggccaccacctgctcaggcaggttgagcggacccatcgggccggtttcgccgcccttggagcccttgccgttgtacgccagcatttcggacggccagatctgggagtggaaggtgatgttgtccttgcccatgaagtagtaggccgggcacgccggatcgttccaccattcacgccacttctccgggtcgccctggcggcgggcccattcgatggaggccgacaggtagccgatcacggcgtcgaaccacacgtacagcttcttgttcgggttgtcgatccagcccttcaccggcaccgggataccccagtcgatgtcacgggtgatggcgcgcggcttgacctccttgaacaggcccagcgagaagttgatgacgttggtgcgccagcccttgcgggtctccagccatgccttgttggcttcggcgagcgccggcaggtcgaggaagtagtgctcggtctgctcgaagcgcggggtttcgccgttaatcttagagacggggttgatgagctcgtccgggtcgagctcgttgccgcaggcgtcgcactggtcgccacgcgcaccttcggcgtggcaaatcgggcactcgccctcgatgtagcggtcgggcagggtacggccggtggacgggctaatcgccacctgctgggtgcccttgtagatgtagccgttctccaagcactgcttgaacatctcctgcaccacgtgctcgtggttaccggtggtggtgcgggtgaacaggtcgtagctcaggccgaggtcgcacagatccttggcgatcacgcggttgtaacggttggccagttcctgggcagtgaggccttccttctccgcctcgacgagaatcggggtgccgtgctcgtcggtgccggacaccatgagcacgtcattgcccttcatgcgctcgtagcgcgcgtagacgtcggagggcacaccaaatcctgcaacgtgaccgatatgacgggggccgtttgcatacggccaagcaacattcaccaaaacatgactcataaggcttgattatccggcgcggcggggacacgcccggatagctgccgcgccgccatcctcatcccactcacctatccacccgtaacttcccccacatacttatccgtacaccgcttgcgcgcttatccgcatacgcattcgcacacgtatccgtacatgcatccgtacacacgtccacgcacccatccgtacgcacgtccacgcacatccgcacacacttccgcctgtcgatatccaccgagttatccacatcattcgcgcacctagtgaagttatgcacttatccaccgttttcgcttatccggtggcgcgcaagccgcatttctgcatattgttcggtcatggatatcacagcaggtccgatgacggacatcacaacagtcacctcgccggcaaccgcgcagcccgcggtgccgccgatactgtttaccaaggatctgccgggaccgctcagccttaaccgtctggccgccttcggcgcgttacgtaagctcgacgattccgccggctactggatcgagcattcgggcacactgtatggtcgcgcaaaaatcgtcgcggaggtcgccccgtttggcactgtggtgtgttcgatgaccgccgcttgggtatggctgggaggccccgactttccgagcaccatagacgtgatctccacatcgcacttccgctcggcatccgtcagccgccgcatccgcgtattcaaaagattgacgttgccggagcaaatcatcaagctcggcgggctgcctgtcaccacgccagcccgtacggcttgcgacctggtgatgagtcctgaagacatccccgatccttccaccgtcaacgcactggtgtgtcagctgatgtccgcgtaccagtttcggccaaacgactgtctgcaaatcgtcaaggagcatcggcatcacaagtatgccggacgcgcacgcatgttttttgaatcggtgcagaaggagattgacgaaccggctttggagcaatgcgcatgacgaggggattcatcgccaaaggacatcgcagaggccgccatgccgctcaccgtttacggcatttgcggcaggcgcaacggttgcctcgccacgcggcggcggcacactcatccgaatccgcatcgcgcgcaatctcggatatgaccgcgccgcctgaaccacccatcagacttacgcccgcggtggcatgttcgcccgatacggatgttgccgtgctctggcacatcgcatatcacgtgcccgaactgcgtaaatggctggttgccaatcccaaagccgacgcgcctttgctggaattggtctcgcagcgtggtgggcccggggtccggcaggcgttggaaatattgttcgagtcgatggaagcgtaacggggagataatcgccggctgctgcgctatcccttgattttcagcacagccgcatacacctgcttgcgattggccaacgatccgtcagccagtggatgctcctgcaccacttgcgcgatggcgtccttgatacgcaggccgtcctccaaagcacggtcgatggagagcacggccatgtcatccacgctcaacgtactgggcgcggccgcttcggcctcctcgttggacgcgccgccgatgaccagcaccatctcgccacggggcggatcatcaatcacactttggcgaatctcgccaatcgggccgcgacgaatctgctcataatccttggtgagttcgcggcacagggccatcgggcgattcgggccgaacgcgtccagcagatcgtccatcgaatcggcaatgcgatgaggcgtctcgtagaacacgatggtgcggcgttcgggcaacagcgtgcgcagatactgcacgcgctcggaatgctttcgcggtaggaagccctcgtagcagaagcggtcggtgggcaggccggagagggcgagcgcgtcgagcacagcggaggggccgggcgcgcaggtgacgggcaggccgcgttcgatggcacggcgcacgatggccaagccggggtcgttgatggtgggcatgccggcatcggacacgacgagcacggtggcgccggtttcgacctggtcgagcaggccgtcggccttgtcgcgctcgttgtggtcgtgataggcgatgacgcgaccgttcacatagacgccgaggcgacgggcgagatcgtagaggcggcgcgtgtcttcggcggccacgatatcggcccgctccaagagggccaccagacgggcggaggcgtcgccaacgttgccgatcggggttgcggcgagcaccacggtgccggcggggacggtcacggccgattcgcgggattgggtggcggcggattcgccggcatgaacttcatcattgcgttcaggcacttgcgtcacgctaccgtcagcgtcatactgctcattcaactcatctgcgcttgtcatactcccagtattgcccataccacagagcaatccacgacaatccatggcggaatcgaggcattctccctttgcaggggctgatttcacatgttccggaagtctacttccgtttcaaggggctcctcatccggtgaagcaccagtacaaacggctttgacgcaacgctattccgccattttggcggcatatctacttgaccatcagcccctcgaaacgcaagtagacctccggtaaaccccaaatcagccccttgaaacgcgagatggcacaataccaacgaagacaaatgaaaagaccctctgcggtggaatgaatgcagagggtctcgtggagctgacggtagtcgaaaccgcgacctcttcgatgcgaacgaagcgctctaccaactgagctacagccccttggatgttactttgctccgcaaagcaactcgcaacaatatagtacggagtgcggtcaaacgcaattcgtcatttgccgtgtcggcgtcgcaccgcattgccgcgaatggtgactgtgccgacgcagtactgtcaccccgccccccaccagctccgcctattctcctgcggagaggtatccagcgctatttcaatttgcggcccgcgcaccacacctgttcgaccgtccaatcggtcggatcggcaaggttgaaatcggcggcgaagccgggggcgatgaggccgataggcaccccggtgaccgggttcggccggtcgaagccgaacgccttggccggcgtcaat

SEQ ID NO: 1128 - DNA, 5527 bp, Unknown
  R81_24m  MAG No. k141_3560
acctctccgcaaacgagaaggctcctactcccctatcgccttgcgttccatatccacgaacttgtggaccgaggcttccacggaataatgcgccttggtgtattcggcgtatttctcgccccattcggcgcgctcggcctgatgtgcgatccaccaatcgatgcgtcgggccagcagggccgcgtcccgcacggggaacaacgacgcgtcgatcagcgcgaactggccggccgccgacaattcggacgcggcgatcaccggcaccaatccgcacgccatcgcctcgatcacgctcaccgattcgatgtcggcaatcgaacaatgcacgaacaaatcgcccgaacgcaacaaatcgggcatatcggcgtgcttgtggaatccgatatcggccttgcgcgccagcaaacgtccggcgcggaacttgagatactgcttgagcggcccagtaccggcgatcaccagctgaatatcgccggcgtggcgggacatcgacaccgccttgatcagcgtaatctgatctttctcgctggccagtcggccggaagcgacgacacggaacggcacgggagccgaggcatccggatcggccggcttcttcggagaatacaccggtgaataaccattggaaatcacgtgcaacttggctttatacccgtgcgcgcgcaacaggctcgcggtcatttcggtgggcacatggatgtggtcaatgcgcttgtacagccagtgcttgaacagccagtacaggaagctggaaataccgggaatgcgacgtagcgggccggccgaatacagcacgttctccggctgcaggtggaatccagcagtcacgggaatgcccatttggtgggcgactttagcggcacgacggccgaatttgaacggcatatagatatgcaccacatccacgccttggaaagcggtgcggaacaacgtgtcgctgggttcggcgaattgcatgagctgcttggcggccacccacgagacgagcggcaccttattcacgcgcgccggatattcgggcgcccctataccgacaagcctcacatgatggccttgccgctccaattccgcagcccattgcaaagccgaattggaggtgccgttgccctgattgcccaccgtatcgaccacaagagcgatagtcagcggacgatcaatgctctcttcaatcccgttttcgcgcattgcctcatcctaaaccaccgcgaggcaatggcgtcggccgcgctgcttggataggccggaaatggtatgggctgccgcattttgcctaatattgaatcacgcgcttcgcagcgcacgatcgacgcgggccacgacctggaacaactcggcggtgtgcttgagcagactgatgcgcacccagccttcgcccgcctgaccgaagcaggcccccggcatcagcgccacgccggccgtgttgagcagccaatccacgaatgcggcggaatcgccatgccaccgcaccggcacgcgcgcccacgcgaacaggccgccttgggcctcagccaccggcagaccagcctgggtaaacccgtcacgcaccacttcaaaacgatgctgatattgcacagccagcagcttcaccgtgctctgatcggattccagcgccaccgcaccggcctgctgaataacgctggaagccaacaccgcagtctgccggtgtacggctttgacggcagagaggacttcggcgttgcccgccacgaatccaccgcgccagccggccaccatatacatcttggacagcgagccaagttccagcgccacgtccagcgcgcccggagtctccagcaggctcagcgagcgcacgtcgccgaattcgagccccgcataggcgaaatcgttaagtacgatgaatccgtattgcttggccaggcgcatggccgtctcatacagttcgggtgttgcggccgcgccggtcggattgttgggatagttcagaatcagcagtttggcgcgagtccatagcgctggttccaccgcatccaagtcgggcaggaatccgcggctcgggtcagcgggaatcgtctcgaactggccaccggccactactgttgagccctcgtactgcgggtaatatgggtcgaccgccaccaccgtatctcccggatcgaccagcgcctggatgacggtggtgatgccgacggacgagccggaagtcgccagcagctgggtggcggggtccacggtgacgttgtgctggcgcgaataccagccggcaatcgcattcagatattccggaagcccatcaaatggcgggtaccggaacagggaaggattgtgggaagcgtgagaaagcgcgtcctgtacaaaggatgtcggccagccatcgggattccctttgctcaagtcgatgatatccttgccagcggcgacggctgctgcagcgcgtgcgtccgcctcagcaaaaggattgccgggcagactagccgcccgtcgagaaatcagagccgcgttcgacgtcggcatgtcgccctcccccttcgactattgccagcgtgccggcttgtagcctgaaacgccggaaccggcacgccgctattcgctatatgtcgcatccaaaaatgttggcccgaccgccccatacttcatcggccggtaattgctaaggtacgacggctctgttacgcacgcaatggcatgtctatacgcagtatttatggcgggttacgggcatctgaatcttcatggggcggcaacctgcccatggggcggtatttaccccatggggcggtgaaattcccatggggcggtaaggcaaaacggcttaattccgcggtttcacaaaaccaacaaaccgccccatgaagccggatattccgcccgtaattttgccgcgcgaggcactccgctcacgcgacataccgaaatcatcgcgtcatggcagaatgtgggtatgactgagaacgccgtgaatactgccgtgacttccgcctcctctcccgcaattcccgccgagacttccgccgtcccccccgcaactcgcgcagccaaccacccgctgggcacaccgctgggcaagcaccccacccgtgtgctgtttttgggcgctggcgagctgggcaaggaggtcacacttgaactcatgcgactgggcgcatgggtgtgtgctgctgactcctatgccggcgctccggcccagcaggtggcgcatgaataccgcgcgttggatatggcgaatgccgccgaattgcaggcattgttcgatgaaatcaagccggacatcatcgtgcccgaggtagaggccatcgccaccgatgtgctggccggtgctgcggccgcgggcgcccaggtggtgccgagcgccgaaatcgccgcgatctgcatggaccgcgagcgcctgcgcgtactggcccacgaagaattgggcttgccgactacaccgtatcgttttgccggctcgctggaagagctacgcgccggagcttcggaagtcggctatccgtgcgtggtcaagccggtgatgagctcgtctggtcacggccagtcggtggtgcgttccgccgacgccatcgatgccgcttggaccgaagcgcaggagggccgccgcgccgccgatgagggcgatgtgtcgcgcgtgatcgttgaggcgcttgccccgctggagcgtgagctgacggtactgaccgtttcttcgtccgccggcattgtgacgtgcgcgccgatcggccaacgtcaggagtccggcgattaccgcgagtcctggcagccggctaccgagcccgatggtgaggccgagcgggcgcgcgacatcgcacgtaccgccgttgaaggcttggtggccaaggctcaggcgaccggcgaaaccggttggggcgtattcggcgtggagctgttcgtgctcaccgacggctcgattctgttcaacgaggtctccccccgtccgcacgataccggtatggtgacgatgacctcccagcgtctgagcgagttcgcgctgcacgcccgcgcgattctcggcctgccgatcacccccgagcatgtggcgctcacgattccggccggctcggtggcggcaagccatgcgattgtggtggccggcgacggtgaggccgagttcaccgatgtggccgctgctctggccgaacccggcacggacctgcgcatttttgccaagcccgaagtgcatggccaccgtcgtatggccgtggcactggccgtcggcgagtccgaagccgacgcccgtgccaaggccggccgtgttgccgatgcgttgacgattaccgtggagtagtccacggcctgatcagctcagcatggcctcaatattgttgccgtccgggtcgtggatgaacgcggcgtaatacgtggggccatagttcgggcgcgggcccggagcgccgttgtcggtaccgccagaggtgagaccggcctcatggaacgccttgacggcgtcctcatccttggcgcggaacgccacatgggacggcaccaccgggttgccgtccttcggagactccagccaaacgctgtcgccatcctcgtcattggcaaagcacacggcggtcgggtacgccactttcttgacgtaacccagcggggccagcagcttctcgtagaaatccgcgtactgtgcggcgtcggaaacaaacaaaccaatatgatcgatcatgacgaacctccttgcaccatttcgtcactcccattatcgtgcgtgcgcggccgtacactcacgttttgtctattgacgaacatctgagtgtccgcgtgcttgcgtagatactgttactccgaacgactatgcgtccggcaatgagtcgattgtcggaccaataccgtccgcctccgccatcccaacagcgtatggccgttcgatgcagcgacgtatgatgcgctggccgcatcgtagcgtcatgccgagtgttgttgtagccctcgattggtacccttttaccgttagttcacccagaaattccactcctgaaaggtgagtcatggagaagctggaaaagctctacgagggcaaggccaagcaactgtacgcaaccgacgatcccgaggttctgtgggtcgaatacaagaacaccgccactgctggcgatggtgagaagaaggaagacttcaccggcaagggccgcctgaacaacctcatcaccaccatcatcttcgacctgctcaagaagcgcggcatcgacagccatctcatcaagcgagtgaacgacaccggccagctggtacgcaaggtgaacatgttcccgttggagatcgtgctgcgcaacgtggccgccggccacttctgctcccgtctgggcgtggaggaaggcctgccgctcaaggagccggtgcttgagtacttcctgaagaacgacgatctgcacgatccgttcgtcaacgacgatgacctggtggccctcgacgtatgcactcgcgaggatctcgccgagatcgccccgctggcccgcaagattaacgaggccctgatcgagatcttcgccaagatcgacgtcaagctggtcgacttcaaaatcgaaatgggccgcgccaccgacggcacgctgctgttggccgacgagatcaccccgga

SEQ ID NO: 1129 - DNA, 3415 bp, Unknown
  R81_24m  MAG No. k141_3650
gatgcctgccgctgacctcgttcgcacagaacatcggattggtggccatgacccaggtcgtcaaccgcaaggtgattctctccggcggactgattctggtgctggcgagcttcgtgccggccatcgccgaggtgttcaactcgctgccgcaggcggtgctcggcggctgcacgatcatgatgttcggcaacatcattctttcgggcttccagatgatcgccgaagcgggcttcacgcagcgcaacatcacgattgcggcgctttcgctgaccatcggcatcggcttcacccaggtgagcgacatcttcgcgcagttcccggcactgttccaacaaatcttcgcctcgaactgcatcgccgtgtcgttcgtggtggccgtaatcctgaacgccgtgctgcccagcgaggagcacttcctctccgcgcccaaggaggcaccggccgcggacgccgagtgataacaacgcgacatatcagctgcgcataatcacatgctgatgccctatcgtcttgcaggatgatagggcatcattgattttgggagagactacaagttgaaccatgagttcgagccggtggcgtgtcgatcaatcgacatcttcccattcgaggatgtctccgggttggcagtcgagtgccttgcagatggcgtccaatgtggtgaagcggacggctttggcacgtccgttcttcagaatggacacgttggcgggcgtgatgccaatttgttcggcgagctcgccgacgccaatcttgcgtttggccatcatgacgtcgagattgatgcgaatcgtcatctcaaatcacctgctcgagttcgctcccgatccggacaaggagaacagtttccatacggccacgaacgccgcttcgatgcagagcaggaacagcacgcccataatgagatatgaccagtacatcgacgtctggctcgggcagaggccggccagcgcgccgctcaatcccggtacggcgagtagttggccccataggcaggccagccagaccagaatcatgatggctttcaacgcgagcaacacccatcggttcatgtagtttttcatagcccggtcctttcaggtgccgacatttttggcgacaccgcgaacatcgatatgactatatcgaaaaacgatataccatgcaaggtgtattgcgtcaactggcattggtcgctcgtatacatataggcttcggcagaccgtcagcagaccgtcagctcaacggagcgaacgccatatgagccacccattcgcgtacaagcgtgatgacggcttcgggttggtcgatgtgcgtgttgtgaccggcattgtccagcgtcacgaaggtggcgttgggatagtgcggcaacagggcttgctggtcttcttccgtttcaaggggctggtcattggccaaaacccaagtacgaatggcttcacgccaatgtcatttcgccgttttggagctgttgctactcggccatcagcccctcgaaacggaagtggatgtctcggaacaagcaaatcagccccttgaaacgcaaatagacattgcgaatcgacttatcagccgcgtcgaacttgcaatagagatgtcggtgtatcattccccggtctgattgcgcggatgtcatgaagcgtgaagaattgtcacgaagtcgcgtgatggcgcagccgccgttcaggtggatatgccacgctgtcatgatgacggccgagccgggacacggcaaatcccgcatgctgcataggccagccggtcacggtcagccatgacaccgaaatattggaggcgcaatgggacaacaggtgcggtacggcagacgccgctcccatggcgcgggcgcgctgattgcagccgtcatacttgttgttgcggcgctgatcgcggcatggacgctgctgccacggctattcacgcctcgcgagaccgcgcgcacggccgaggaagcatattgcgcggcggtgtcgtccgacggagcccgccgcaccttgacgcctgatcaggcgcagaacgcggcgctgattgcgaacatcgccgtcacgcgcggactgccggatcacgcggcgacggtggccatcgccacggccatgcaggagtcgaggctgacgaatctggactacggcgacttggattcgctcggcctgttccaacagcggcccagccaaggctggggcacggcggagcaggtgtccgacatgacctatgcgacaaacatcttctacgaccatctgctgcaggtgccggattgggagacgattccggtggaggacgccgcgcaggaggtgcagcgctcaggctacccggaactatatgccacatgggatgcgatggcacgcgcttgggcctcggggctgaccggtgaacggtcggcggacgtcacgtgcgcgttggagccagcaatctcctcggacgcggacgggttggttgccgccataggtggtacactgccgaatgtcaatgtctcggttgcgcccccaaatggcaaaaccggcacgaacaacggtgctgcgaccaatacggccagcacaacgttgacgatcacgctgccggacggcctgtccgccgacaaccgcactcgactttgctggcagacgtcaggctggctggtcacgcatgcacgtcaatacggcattgatgcactgcacgcggacggcatggattggaaccgcaaagccggtacatggaccggcaccgaaaccgccgaacagaccgtcaccgtcacgcttgcgtgatgtgacctataacgccgtcgcgaccacaaatccgactgactggagcctacgccgtcgatgccgcctgaggcacgatacggatatgatttttactcgttcgaatgagcccaatccacgacggcttcgatgttattgccatccgggtccagcacgaatgcggagtaatagccgggatggtacgggcgcggaccgggagcgccgttgtctcggccgccggcggcgagcgcggctgcatggaacgcctgcacggcttgctggctgtcagccaggaacgcgatgtgtgtgaccggcgtgaccggcgaagcctccgcctccggcccgtcaatcggtgacacgtagaaatcggagtgcagggttccatcatccacgccgaatccgagcgtgggctcatgatgcgccttgacgatatagccgagcggtgcgagcgcctgtttgtagaatgtgatgccacggtcgatgtctttcacgtgcaacgtcagatggtccagcatggtcttggtcgccctcccctggttcttgtattcgattgctgcttgcagtgtaagcccgaacgtttccccacagggccgcgcatggctatgatgagagcaatcgcacgtcgagttcgagacaatattcaaaacgaatccaaggcaatagggggaatgacgatgaccaaggcactgattgtggtggatgtgcagccgacgttctgtgaa

SEQ ID NO: 1130 - DNA, 7320 bp, Unknown
  R81_24m  MAG No. k141_4518
gaacggtagggccggcccttggggtccgtgtcccgcaggttcccggacgcctcggaccgtctgtcggtcagcttgccggggttcttcaggacggtgtatctgacgccgcgcatgcgcttgacggatttctcgtccccgtcgcggcgcgcctggttccacgggtgtctcctgactttgtcgggcgcgtcgctcgtccaactgacgatgtggaacccgtcgggcgcgcgttcggcgttcgggcaccactcatgcacgcatgagtcgatccaccgggccccgtccccggcgacgaccctgatggaggcgcgctgttcgggcgtcaacgtttggaagaacaggccgaacacgtccctgccgtacccgtcgtgcgcccatatcgcccgatgccgttcgtggtcgacgaccacggtgatgcacgtgtggcctttgcggtagccggtctcgtccacgccgatcgacgtgaggtcgccgaacggagacggcatcgacgctttcaaccgttcggcgaccctatgggcggcgtcttccggcggcgcgccacgcgacgtgcggaaaaccgcttacggtcttctggttcgcgacgctcatcggccacgcgcgttccgattcgaaatcgcgtgtggaccggctgcccggctcggcccacggcacggaagcgaccacgacgccgcacgccgccgccctggtcatgcccgcggcgcctccgtccgcatcgggagcatcggagcatacccgcacgtggacgcacccggatctcgagcacgggttcggaacgcggcggcgaatccgtgatccgcgcatcctctgcaaccgtgcctttgacgttcggcaatccggtgaatgggcttttgcccagcgttcttcgtgattcatttctttggtcggaaaacagaatacgcgggaacgcccctcacgcttacgaaaccaacggctcgacgacgaaccgacatccacgaaaacagcaatagcgccatattttgcaatatggaagattcagggccttgaaatgacgaaccattacaatgagcggcgaacatacatcacacggcgtaggaaacgccaaggagggcatcatggccgagatcacatggaagtcgattctcaccaagctggtcgggggagaccaccttactgctgaggaatcggagtggttcgtggacgacctgatgcaaggtaacgccaatccggccgccgtgggtgccgcgctcgctatgcagcagcagctgggactgaccgccgacgaggtgcgtggtgccgccaaggccatggtctcccacgccgtgccgctgaacgtttccggtgggaccaccgacatcgtgggcaccggtggtgacggcttcgccaccgtgaacctgtccaccatgggctccgtggccgccgctgcagccggcgtgaagatcgtcaagcacggcaaccgcgctgcatcctcgaagtgcggtgccgccgatgtgctcgaagacctcggcctgccgctggatttgaagccggaggccgtcggcgaagtgggcgacgaggtgggcatcaccttcgcgttcgcccgcaccttccacccggccatgcgcttcgtgggcccgattcgtgccgcgctcggcattccgtgcgtcttcaacatcctgggaccgttgaccaaccccgccaacccggcacacgtggccatcggctgcgccaaccgcaaggtgagcccgatcatggctgccgtctacgccagccgtggtcagtccggcttggtctacacttcgcatgagggcatggatgagctcgcccccaccggcccggtttccgtctgggagattcgcgacggcaaggtcaccgaaaccgagttcgacccgaccgtggatctgggtctcgccaagattaccgtcgaccagctcaagggcggcgtgccggacgtcaacgccaacgcatttaaggacttcctggccggcaaggacattacgtcccgcaccaccgcgctgctcaacgctgcctccgccatcgtggctgacggcaatctggtcggcaacggcacactggccgagcgcttcgccgaggcctacaagctggccgaggatgctgtcgactccggcaaggctgaagccctgttcaacaagtggatcgaaaccgcccagtccaagcgttagacccgcgcgccgtcgtcgtaatagccaccctgatcaccggggcggtctttgcggttgaggattttggccaccaatccgcccagacccaaaatgacgcccagcccgaagagaatattgagcagcgcgcctaagagaggaatcgcgttcaagccgggaacgaatatcatcaccgtttcgcccgcgagaccgatgatgagcaacgccgtcagcagtaccgtagatgctttgaccggaccaagatcagggttcgggggagtgaagccgccatcatcataggcgtccatcacattatcggtatccagccagctagagccggtgaaatcacgggggcctgactgcttgccttttttgccgccacggctcgggcgagcatcatcggtgaacgagccgatatccaagtcatctacggaaagcagtgcttccttctcgcgtttcttggcctgcttctcgaactttttggcctgcctggaggaagccacgtcatgcaagtcggcctgatgctcggcttcgaacgcggcccacgccgcatccaaatcgttcatgtcatgcgattgcggtgtatcggcaccattcgtggccggtccggcggcaccgggagtcgacgacttggacgaagtatcggaatcctgtccgttgcccggcgtgggggttggccgctctccgtcggcattgctattctggttctcagtcataactgtcactctaatcaggcgaccggccaatggctagttcgtctgcgggaggaatgccaagtgctctactggttcttcgtcaaaggtctcggccctattgctcatcatcgtttgagccctgctgtcagcggactgaataacgtgcctcgagagggtggcgcgattatcgcagccaaccatctggcggtgattgacgatgctttgattccgattacctgcccgcgcatggtgcacttcatgggcaaagccgaatacttcgagggcaagggattgaagggcaagttcaagaagtggtggttcacgtccgtgggcgtgttcccggttgatcgttccggtggcagcaagtcgcttggcgcactcgagcatgcacgcgagattatcgaggatgggcacctgttcggtatccacattgaaggcacgcgcagcccggacggtcgactgtacaagggacacaccggtgccgcacgacttgcgctcgagaccggttgcccgattgtgccgaccgccatcatcggctcggacaagctgcagccgattggcacgtcgattcccaagaagggcaagaccaaggtgttgtatggcaagccgattgaggttgcgaagaagccggctgatgaaattacacatgatgatttgcgttcgctgaccgatcgtgtttccaccgcaatccagaaaatgagcggtcaggaattcgtgaacgaatacgcccagaaggtcaaggccgagctcaaggcccagcaggccgctgaagaagccgaaaagtaattaacaaatgaggctccctcgtctcaagacagagggagcctcattcaaatctcacacgatggtgagggtgatgacggtggggttgccgttggcatcgcgcaagcgaatcttgccgccgttggataggtccgtatcgccacttttcacggtacgtaccgtgccgaacaggccaccgagcaccttgtcggttttcacctcgaacccgagaccctcaagcgtcttggtcacggcgctttcctgtttgccgacaaggccggacggtatcgtcgccatctccggacccttggaaatcaccacgtccacgctatcgccccacttcagctgggctccggcttcctgagacgcggaaatgacttgaccggcctcgaccttgtcatcgtactgttcggtgacattggccgtgagcttcaactcgccgagcgcggcttgcatctcatcctgggtcttaccgacgatgtcaggcatggtcaccggcatcggtcccttgctcaaagtaaccgtcacctcatcgttgtgcttggccgtggtaccgggatcaggggagatcgtcaatgccacaccctgcggcgtgtccatcgaatactcatccttcgactcgtcatgcttgacattatcgaagccggccttcttgagcgcgttcaacgggtccttgccattggccgaattcgcgtcgagaatatccttcgggatggtggtcatccgcacgcccttggacaccaccaccgtaagctcctgattggctcgcttgcttatgcggctgttcacaacggccttggtcttgttcacggaagaagagatgatcttgccttccgccacgtcgtcgctgtattccttgtgcgtcttgtaggggatgccgagagccttcaacgtgctctcatacgtggcccaatccgcgccggccaacgagcattcggtgcttgcattcgcatcgcaggtcacgtcatccggcttgggcacactccaatagctgcccggtccggcaaaccaccaccggccggcggttccgccgattgcagccagtaccagcacgatcaccagtacgatgatgagcggttttttgctgcgctgcttctttggcccggtgccgttggaagcgacgtccggctcatcggaaaaggcaagcgctcgggtgaaggcatcgccggcctgaggcagcacttgtgtctcgctgccggactgtgccatgatttgcgtcttatggggagccgaagcatcggctggcgtcgacgaatcaagtgccgtggtgggggcgaccggaggagccggaggattgacgtctgcggcgccaccggtatcggcggtattgcttgcgacatcatcggccaaaaacgccggtacggacggcttgaacgttgctgcaccggcaggtacgccggtcagcggggcctgctcggcgatattgcctaccagcgctgcagcggtggcatcggtatgatcacctccgatgggttcggcatgcaaacggtattgccacgcctccagcggcaatttggcggccaactggctcaattcctcagctgctgccgcgccatcggcggggcgagcatccacctgacgcgcggtcagatgggcgatgaacgccgccacggacggatcaatgccctgacagaccgtggccacggacggcacgtcctcatgaacatgcttgaaaacaagcgtcaccggattatccgaatcgaacggcaccttgccggtcagcatctcccatgccatgatgcccaccgaatacaggtcgccttgcgcggtggcctgattgttctcgatcatttcgggagccagataagcggcggtgcccaatagcatgccggtggagctcaatgtggcctggctggcggccttggccagaccgaaatcagtgatctgcacatggccgcgatcattgatcaaaatgttctcgggcttgatgtcacggtgaaccacgccggcgcgatgtgcggaagccagaccatccagcgtctccgcgaccacgcgcagcgtctcacgtacggagaatgtgccttgggcgttcatctcatgccgcagattgacgccatgcacatattccatgaccagaaaatcaagtccattgaactcgccggtgtcatacacctgaacgatgtgcgggttggcgatggacgcggccgaattggcctcgcggcggaaccgttcgacgaactgctcccgatgcgggcctttggcgagttgtgtgtgcatgaccttaatcgccacggtgcgccccagacgctcatcgatggcctcatacacggtggccataccaccctcggcgatattgcgcacgatgcggtagcgtccctcaatcatctgcgcgggctcgttctcactcatgttgtatcgtacggttcctttaatcacgactaaacatgttcagtgtacatggccccggttacgcggccggagcatcggcgcatagttttcaccggtgttcatggtctcatgacccggcggctcgcattgtggactatcgcaaggattcggggacgaatcgcgcacaagcctcggtcagacggcgctgcgcttcggaattcagctcaagaccggcaatcgccttacgggactcaccccatagggcagcgatgcgctcgcgggatcgatcaagagcaccggtcgacgtgaacagttcaatggtgcgggctacctggtcgtcgttgcgacaatccgcttcgaagatggcaatcagatcggccttatcctccgtatctgccgcagacagagcatcagccaacagcactgtgcgtttgccttctcgaatgtctccgccaacgggtttcccggtattgcggcttgatccgacgacatccaacaggtcatcggccagttggaacgccagtccgagcggccggcctacggccaacgcgcaatgcctggcctgatccgggctctctcctgcggccagcagtgcaagcagcagtggggcgatggtggtgtaactggctgtcttccagcggaatacgttcaatgaggcgttcgccagagcttcgggatcagacaacggggtcatctcgacggccaagtccagtatctggccgatctccacctcgcgctgcatggtaagaaacgcctcgttcagggcatcggtgttgggaagacggctggcggaccggcgtgtgatttcaatgcaggcggtggccagaatatcgccaagcatcaggcccaagccacggcctatggcaccgctgtgtacggcctgttccaaggcacggtgtgcggaaggcttgccccggcgcagatcggattcgtcgatgatgtcgtcatgcaccagtgcggccgtctgaaacacttcaatggcacaggctaggtcgatcatggcgtcacgccgatcaggagtcacgtcgccggcaagaatatcgaaggcgtccaatgcgagcaacgcacgcagtcgtttgcctccttggctggaggaggaggcttggtccacaacctgttccatcaccggtttcagggcgtcggcaacctcatcggtggcgggagcggcagtcagttcccgcaccaactgaatgatgcgtggctcgatgatttcgcggttgttagcagttgtgcacatgcctaataacttatccacagggtttgaagaacacaagaacgttgggaatcaagggttttgaagctagaaccacaatggtcgttttttcctgcgtcatacggcgttttcagccatagtgggcacacaccccctcggcgcatgagctatccggctcggcgcgcaccacaacaccaatagattgcacaccattagtcaaggagga

SEQ ID NO: 1131 - DNA, 26913 bp, Unknown
  R81_24m  MAG No. k141_4575
caaggcacgtcgaacggtgattacggcaacgcctatgccgccggccagtgcacgtactgggcgtatgaacgccgtaggcagatgggcattggcacgccgtcctatctcggcaatggcggcgactggtggcgcaacgccccctcgtacggcttgcgcgtggaccacaaccctcaggtcggtgcggcgctctccttcctgcctggtcaggatggtgccgacggtacctatggccatgttgccgtagtcgaagccgtgtatggcgacggcacattccagatctccgaaatgaactggggtggtccgtggaacatgcacaaccgcactttgaccaatttgggtcagtactggttcgtccactgaccggttggttcggccgatatatgcggttgaagggttcctcttgaagaggaaccctttttcgtattcgaggccggtccgtgatatcgtcggatgttgcgttgctacccacgagttgctactcacgagttattgcccacgaaaggaggagacatgcccaaggaaaccggtgagaaactcatcgtccagaacaagaaggcccggcatgactatgccatcgaagacaagtacgaggcagggctggccctgaccggcaccgaggtcaagtcgttgcgcgaaggccgcgcatcgctgtccgaggcgttcatctccatcgaccgccgtggcgagatgtggctggagggcgcgaacatccccgaatacctgaacggcacatggaacaaccatgcgcccaagcgcaagcgcaagctgctgctgcaccgactgcagatcaccaagctcgcccgcggcatcgaggccaagggatacacgattgtgccgctgagcctgtacttcaaggacggtcgcgtcaaggcggagatcgcgctggcccgaggcaagaaggaattcgacaagcgccaggccctgcgcgaagagcaggacaagcgcgaagccctacgcgccatgcgctacgccaacatgcgccactagtcccgtcccttggctcccctccggaggggagccaagggtaggatgtccgcgttgtgggtcatttcgcccacgattaacgcttccgtagcattgcactcctacgctctggaaccatctgggaaacatacccgcccagctgactatccggagagaggaaatccaatgtctctaagcaagggaatacaatccgctgcggccgccgccctgagcgcggccatgctgatcgccgtggcggcctgtggcacgactgacagcaccgacaccgcatccaagagcggcgattcatccaaggactcgtccagcacttcgattcaaggcttcgacaccagcagcatccagaaggacgacgagattgccgcactgctgcccgattccgtggccggcgacggcacgctgaccgtcggcgccgatacttcctatgccccggccgagttcctggccgaggacggcaagaccccggtcggctttgatgtcgacctgtccaaggcgctggccgcagtgttcggactgaaggaaaacaccgtctcctccacgttcgattcgattatcccgtccgtcggctccaagtacgacatcggcatctcctccttcaccgtgaccaaggaacgcatggaggctgtggacttcgtgacctacttcaaggccggttccacgttcgtggtgcagaagggcaacccgaacaaggtcgactcctcgaacctgtgcggcgtgaaggtggctgtgcagaccggtaccacccaggaagaggaagtcaacaaggataacgagcagtgcaaggcggacggtaaggatgccatcgacatccagtcctccaagctgcagaccgatgtgactaccgccgtggcttccggtaaggctgatatcttctacgccgatacgccggttgccggctacgccatcaagcagaccggtgatacgctcgaggccctcggcgaggacgttggtgtgacccctgaggccgtggccgtcaagaagggcgattccaagaccgccgaggccgtacagaaggccatccagaagctgatggatgatggcacgtacaagaagatcctcgacacgtggggcgtctcttccggcgccgtcgacaaggccgagatcaacccgtccgtcgagtagtttcggttactatgaagactcccgttgctctgcggcgggagtctttttgtatatgtatgcactatagtgtataaatatgcttaaccgttgatcgttgccgcataagcggcgcaagagagaagaagagacgattatgcagtccaccaaactgaagtccattatggccattgcactgagctcggccatgctgctcgccaccgccgcttgcggcgcctccgacaaggccgatgccggtacggattccgccaagggctccgatgccgccaccatcaccagctacgatgtcagctccgtggagaaggatgacaccatcgccgcactgctgcctgaatccgtgaccaaggacggcaagctcaccatcggcaccaacccctcctacgccccggccgaattcctcgacgccgacggcaagacccagatcggctacgacatggatctcgcccgtgccatgggcaacatcttcggcctcgagaccgaaatcgtctcctccaacttcgatacgatcattccggccatcggctccaagtacgatctgggcatcgccgccttcaccatcaccaaggaacgtatgcagtccgtggacttcgtctcctacttcaccgccggtatgggctacgcggtggccacaggcaaccccaagaacgtcgatgagaacgacctgtgcggtctgaacgttgccgtcgagaccggcaccgtcgaggaagaggccatcaacaagaccgccaagcagtgcaaggcggacggcaagaaagacatcaccatccagtcctccaagcagcagaccgacgccaccaccgctgtggtgaccggcaaggccgacgtcttcttcgccgattccccggttgtcggctacgccatcgcccagaccgatggtcagctggaacagctcggcaaggacttcgatgaagtgccgaacgccatcgccatcaagaagggcgattcccagaccgccgaagccgtgcagaaggccatgcaaaagctcatggacgacggcacctacaccaagatcctccagcactggggcgtcgaatccggcgcactggacaaggccgaaatcaacccggccgtcgaatagtcgacaagctgtcgcgaaaattcgaatggggcgcactgtttgtaacacagtcgccccattcgtgcactaaggttcaacgctagttgcaacttgcagttcaggctgcctaacacatccaaggaaccagattatggcgaagaaagaagtcgacggtgaggggctgaacatccccaaccgcatcaaggcgttgccggtcaagcgccccggcccgattgtggccgcagtgatcgtggtactgctcgccgcgatgctcattcaaggcttgattaccaatccgcgactggattggcccaccgtctggaagtacctgttcaacgagaacgtgcttgaaggcattcgctataccttggagcttaccgtgatctccatggtcgtggcgatcatcctgtcggtgattcttgccatcatgcgcaaatccatcaatccggtgctgcgcggcgtcagctggttcttcatctggttcttccgcggcacgcctgtgtacacgcagctcattttctggggtctgttcgccgtgctgattcctaagatcagcctcggcattccgttcacctcggtggagttctggagcatcgactccaacgtggtggtcaccgcatttaacgccgcatggattggtctggccctgaacgaggccgcctacctgtccgaaatcgtgcgtgccggccttgaagccgtggaccccggccagaccgaggcggccaaggcattgggcatgaaccgcacgctcatcatgcgccgcatcgtgctgccgcaggccatgcgcatcatcatcccgcccaccggcaacgagaccatcggcatgctgaagaccacctcgctggtcaccgccgtgccgttcaccctcgaactgcagttcgccaccaacgccatcgccaaccgtatctacaagccgattccgctgcttctcgtggcctgcttctggtacctgctgatcacctccattctgatggttgtgcagtcccgcctcgaggcgcacttcggcaagggcttcgatgcccgaccggtgggcaccaagggcaagcagacgccattgccgggtaagaccgacggtgaaccgaaggatgacgtggacaagctcaaccagaccacatttgtcggattgaatgcataaggcgggagcgcgattatgactacgaatgacatcaccagtgttgccccggtcgtgcgcaaggcggctgacggttccgtgattcctgccgtcgaggccgtgcaggtgcacaaggcgtttgggccgctgcatgtgctcaagggcatcgatctaaccgttatgcccggtactgtgaccgtgattctggggccctccggttccggcaagtccacgttcctgcgtctgatcaaccagctggaaaccctgaccggcggttccatcgaggtggacggcgaactcatcggctacaagcacgtgaccaaaaacggccaggacatgctgcagaccctggacgataaggagatcgccgcacagcgctctcgcctcggcatggtgttccagcgcttcaacctgttcccacacatgaccgcgctggagaacgtgatggaagccccgatccacgtgcagcaccagtccaagaaagccgcccgtgacctggccgtggccgagcttcagcgcgtcggtctgggcgatcgcatggactattacccctcccagctgtcgggtggtcagcagcagcgcgtggccattgcccgtgctctggccatgaagccggagatcatgctcttcgatgagccgacctccgcccttgaccccgaactggtgggcgaagtgctcaacgtcatgcgttccttggccaaggaaggcatgaccatggtgtgcgtgacccacgaaatcggcttcgcccgcgaagtcgccgaccagatcgtgttcatggacggcggcgtagtcgtagaaaagggcggccccgacatcatcgaccaccccaccgagcctaggtttaaggacttcctacagcacgtgctgtaggaaggctgttatattacctcagcactgtcgtgcttcggcgtcgcctacggggagcccactgggctccccgctttacgactccgcctacagcacgtgctgtaggaaggctcgttgttgcagctccaaaagcgtacgctgatgaactcagcgtacgcttttcacgaaggggcatgttccaatcctgcaaaggcggcgggttggattcgctttgcgcaataatcgtccgctaggctggtgagccatgtgtggaatcgttggatacgcgggaaatattgaaacggcatgcggcaagcctttggaggtctgcctgcaaggcctggaacgtctggaataccgaggctatgactcggccggtgtggcgctgaccgcgcccggcatggataaggtggtcgtgcgcaagaaggccggccgtttgaagaacctggtcgaagacatcgagcgcaagccgatgccgctcgccacggtgggcatcggccacacgcgctgggccaccaatggcgagccgagtgacgtgaatgcccacccgcacaccagtatggacggcaaggtggccatcatccataacggcatcatcgaaaacgcctctcagctgcgtttcgacctgcaagccgaaggctaccgattcgcctccgccaccgacactgaggtggccgctaagctgctcggcaagatcgtggacaagattatcgcggacgaaggcaagccagacttgttcaaggctgtgcgccgtatggcccgcatgcttgaaggcgcgttcaccattctggccaccgactgccgccagccggacatcgtggtcggagcccgccatgattcgccactggtcgtgggccttggcgagggggagaacttcctcggttccgacgtcgccgcattcgtggcctacaccaagcgcgccatggaagtcgaccaggatcaggccgtatgcgtgtccgccgacaaggtcatcgtcgccgatttcaacggcaacgtggtcgaaaacccgaagacctacaccgtggattgggatgcttcggccgccgaaaagggcggctgggattcctttatggacaaggagattcacgaagaccctgccgcagtgcagcgcaccctgcttggccgcttcgacacgaatggcgacatcacccttgatgaagtgcgtatcgacgaacacgacttcaaggccatcgacaaaatcatcgtcgtggcctgtggcaccgccagctacgccggccaggtagccaaatacgccatcgaacactgggtgcgtatccccgtggaaatcgaactcgcgcacgaattccgttaccgtgacccgattctgaccccgcgtacgctcgtggtggccatttctcagtccggcgaaaccatggatacgctgatggccctgcgccacgcgcgcgaacaggggtccaaggtgctggccatctgcaacacgcagggtgcctccattccgcgcgaatccgacgccgtgctctacacacacgccggcccggaagttgccgtggcatccaccaaggcgttcgtggcgcagattaccgccgcctacctgctgggcctgtatctggcgcaggtcaagggcgcgatgttccgcgatgagattcatcagatgctcgactccctgaaagacatgccgcgcaagattcagtgggtgctcgacacccagcccaagaccatccaggcggccgccgagcgcatggtgaacgccaactccttcttgttcctcggccgccacgtgggctacccggtggcgcttgagggcgcgttgaagctcaaggaaatcgcctacacgttcaccgagggcttcgcggccggcgagctcaagcatggaccgatcgcgctggtggacgagggtgagcccgtggtgttcatcgtgccgccgcagcgcggccgcaatgtgttgcacgccaaggtgatctctggtatcgaggaggtcaaggctcgtggcgcgtacatcatcgccgtggccgagcagggcgacccggatgtggaacggtacgctgacgtggtgttctggcgccccgcctgcccaacgctgatgagcccgctggttgacgtggtgccgctgcagctgttcgccatggacatggcaaagctcaagggctacgacgtggacaagccccgcaacctagccaagtccgtgaccgttgagtaagccacatcggtatgtgattgacgagcctcatattccgtttgagatggacgtgctgtatgaggacgagcggatcatcgtggtggacaagccgcattttctggccaccatgccacgcggcatgtggtatcggcagaccgcgctgatccgattgcgtgagcggctgggggagccggacatcacgccagcgcaccgattggaccgcatgaccgccggcgtattggtgttcgtgcgggattcggcctgccgcggcgcgtatcagatgctgttccagaaccggcaggccgtcaagatctatgaatgcctggcaccctgccggccgatcagcggcccgcgattcggcacgatcatgcaggtcgaaccgccacgcccgttcccattgctgcgccgatcgcacatcaccaaggaacacggcacgatggccgcattcgaggaaccgggtttggccaacgccgaaaccctcatcgagcgcggcgacctctgtttccctcccgctggcgggaggtggcgcgaagcgccggagggtggtccccatccgggaaatcaccccatctgccgctacacactccacccgcgcaccggcaaaacccaccaattgcgcgtccacatgaattcgctcggcctgcccatcgtgggcgacgacttctacccgcgcatccagacacgcccctacgacgatttcagccagccgctgcaattagtggcgcgtgtgctacgattcaccgatccaataacaggcgagaagcgcgaattcgtttcccgtgtgccgcttaagatctgatttcttagggggggtggcgagaccaatccccgcccgtccgaatcactgtccctttcgactggccatccagctcattgcatcgtcgtacaccatcatgatgcgcttgcgatagctatcgatgaattcctgcgcaccaatgctcgcgataacgtcgtgagcgggttgcgcggtgctgtcgaatgcctccggcagcctatccaccaaggtgtggaatcgtaaaatcacggattcctcatctaatcccatccgctgtgcgaatcgttccagatgtttgcggcgtaattgaagaagatctcggcgtccgccgatgttcatcgccaaagtggcatttatgatctgcttgccatgccccaaataagggaacaccgaagcaaggtcatagagcggggcaagccgtacggacgcgccatcgagcaatagcgagtagttcttggcgtggctgtctgttgccccgacgagataactggcgaggatgccgtcggtgaaggctcggatattgctttcggcctgaccgggcagaccgtgcttgcgcaacatttccgcatatgcattggacgttgggccgttgtgttcctcgtatttcagcgatgagggaatgcccagcgcttgggtaaagtcttcttggtgcagggccgtcaccgtaccattggcggacactatacggtcataccgctcgctgatgatggctgggaccccatcaaagatgtgaaaagaggtgtgggccacgggtattcccatcgcctccacaatgcgcatggtgatgtgttcgttgaatgcttggtgtggaagggtcggtatgccgggcttgatgatatgagtcgtccgcgcgattccagtggtggagaaccatgatccattgcggttcctcagtgcgatcttgccctgctgtcccgcgaccgaccaatgctcgtctacgcttgcggactggatgcctgtgggggcggctgcgcgtagtcgattcgcgatctgcgaatcgctgattggaataagcgaatcgtcatctatgggcaagtgcgggtcggcggacagccgtaatgcgccggtggcatcgaatccgatggcttgcaacagatcaaatgcgcttgtcgatcgggcatgatgcaatcgcatggcttcatctcgggcctgaggggattccgggaccagggcctcaaggaaattacgcgggatgtcgcctgaatattcggctgcggtaatgggcatggaaagcgatattggtgtgggtgattgcgaccaacgataggaatcgtgatattggaaaataatgctgccatcgtttgttcttcgaaactggccgatgggtgtttcgccgagaaatgcattgagagtgttttcgctcatggtgtcaccattcatagagttcggcgggctgcggggttttgcggacatccagcgacaagccaagctcagtcagagcgctgagaatggtggagaatccgggattggggactcgggcgtgttcaaattcgatcagccagcgacgtgacacgcccagccgttgggccatgtcggtctgactgatgccctggcgttgcctttcatccttgataagccgcgcgtattcggcgatatccatgacaatcatgtgcaaaatatatcacagtatagtaaagtgtgcaatattctgcacatagctggaaatgtgcagaatattgcacaaccgagtcgattggtcggtgcggaattgcctatggatcactggcaggtggatcactggcaggtgaatcactgacaggtaccagtggatgccagcacatgccgctcgtcagctgatgtcgcgcacggaaccgcgttcgatcagttccggcgggattacggttttgacgccgaccggtatcttctcgccttcgcattgacggcggaccatggagaaggcggtggcgccaatgtcgtcaaagcgcagcttcatggtcgtcaggttcaagcgcggaaccatatctgccagcgaatcatcgacgcccacgatgctgacatcctcgggcacgcgcttgcccgctgactgcaacccgagcattgcgccgtatgccatttggtcgttggcggcgtagatggccgtgcagtcggggtcgtgggccaacgccacgccggcctggtagcctgaatccgcgcaccaatcgccgatgtacatgctcggtacgcgtgctcccatttgttccaacgcttctcgccaaccgcgggcgcggctttcggcggcgcgcgaggtggacggtccggcaatgtggtagacggtcttgtgccccttgctcatcaggtaatcgacgatagcggtcgagcagccatactggtcggcgtcaacggtggggcagtggtcggcggcggattcgcagatgagcacgactggaagttctcgcggaggcttgtatccgacgaaatcggagatgcgttcctccagcactacgatgacaccatccaccggctgacgctgcatgcgatcgatggcggcggaaagcgtgcgttccgcaccgtggcgcatggtctggatggtgactgaataatcgtcatcggccgcgttggccacaatagaatcaaggatgcgggcgttgccgaacgcggtggtgttgaacatcaccacgccgatatcctggaagcggccgtgctttagggctcgggccgcataattcggacgatacccaaggcgtttcattgcagcttcgacacgctggcgtgtttcgggtttcaccgcatcgctgccattcgccacgcgggacactgtctgtggcgaaacgccggcggctttcgctatgtcttgcatggacacctgtgttggcctcgacatttcaccctcgcttgactcattaatgttggtgtttcgtttgcaacgcttatcttagggccgcttacggtaacgataacatcgttgtcttcgtgaccattgtagcagagtgactgagaaacccttaattcaacacggtactcaacacgattggacaatgttacaaatggtgttatgatgataacgcaaacattttggtcaaccttcgaaggagaggggttgggaatggcttcagccgatatcgcagctgcgcccgtgcattcgggcaaggctcgtgtgaataagcacaaggccgattggcgtggatggaaattcatgtggccttttgcggtggtgttcgtgttcgtgttcatcgtgccgatcgtgtacgccgtttatatttcgttcttcaagaagcagatgatcggcggcaccaagttcgtcggcttcgagaactacgcgcgcctgttgggtgatggccagttctggagcagtgttggtcgtgtggccctgttcacgtgcgtgcaggtgccgatcatgctgtgcctgtcggctttgatggccctggcgttggattcgatgaagctgcatggcacgaggttcttccgtatctcgacgttcctgccctacgcggtgccggcggtggtgtcgacgttgatctggggtttcgtgtatggcgcgaagtacggcctggtgggttcgttgaacgatttcctgggcacggacatcgacgtgctcgcccccagcgtgttgttggccagtatcgggaacatcgtgacgtgggagttcacgggctacaacatgctcatcttctacagctcgctgtcgaccatcccgcattccctgtacgaggcggccagcatcgacggcgcgtcggagtggcagatcgtgaagagcatcaagcttcccgaattgcgcggcagcctggcgatcacggtgatcttcagcatcatcggctcgttccagctgttcaacgagccgagcattttgcagaacatggttcctggtaatgcgatcacgacgtattacacgccgaacatgtacgcgtacaacctgagcttctccggcaaccagtcgaactacgcggccgcgttgtcgatcgtgatggccgtgatcaccatggccatcgcctacatcgtccagctcaacagcctcaaggagcagatgaagtgacgacgactactgctgttcgtgttgaggaatcgatgatgatcgtgaaggagcgtatgtgatgagtgcagcaacgacttcggccgccggtcgcctgaccgacggcgagctcaaggcccgggagaaggccgccaggaaggcggagaaggcccgccagaagaggatcgccgccgacgaggccgccgaacgcaggcgcagcgcgaaggcggggttcgcgaacgtgaacaacccgaggcgttccacgttgttgaccgtcctgtgcgcggtcttcgccgtgtactgcctgttcccgttcgtctaccttttgatcaacgcgacgaagacgcaggccgacttcaccagtacgttcggcctgggcttcggcaagacgttcgccctgttcgacaacatcgcgacggtgttctcctatcaggacggtatcttcgcgcgctggctgttcaacacgatcctgtacgtggtggtcggcgccggcggcgcgaccctgctggcgatcatgggcggctacgctctggccaagttccgcttcccggggcgcaaagcggtgttcgtggtcatcatcggcgcgatcagcgtgccgggcatcgctttggcggttccccagttcctcctgttcgccaaattgggcctgacgaacaccccgtgggccatgatcatcccgtcgctgatcagcccgttcggtttgtacctgatgtggatcttcagcgagcaggccgtgccccaggagctgctggaggcggcgcgcgtggacggcgcgtccgagttccgcacgttctggcagatttccttgcccctgttggctccgggcatcgtgacgacggcgttgttcacgatcgtggcgacgtggaacaactacttcctgccgttgatcatgctcaaggacgcggactggtacccgctgaccatcggcctgaaccagtggaaggaccaggcctcgaccgcgggcggccaggcgatccagaacctggtgatcacgggctccctgatcacgatcatccccctggtgatcgcgttcctgtgcctgcagaagtactggcagtccggactcgccgcaggcgccgtcaaggagtgatggagtcggctccgccgacgcggtgtcttcaccgcctcgcggcggggtccctccctccgtcccggctccgccgagacaaccttcctcatcagagggaggtaatagtgccaagcccccctctgacgagctgagccgttaggcaaacagccctgtgggctgtttattcccgcggacgcagattatcgataaaattcaataaaggagctgaatcatcatggaacgtaaagagttcaagtggccgcagccgcttgcgggcaacaagcctcgcatctggtacggcggcgattacaaccccgaccaatggcctgaggaagtgtgggacgaagatgtagccctcatgcagcaggccggcgtcaacctcgtctccgtagccatcttctcctgggccaagcttgagcccgaagaaggcgtgtacgacttcgattggctcgaccgcgtcatcgacaagcttggtaaggccggcatcgccgtcgatctcgcctccggcaccgcatccccgccgatgtggatgacccaggcccacccggagatcctctgggtcgactaccgcggcgacgtctgccagcccggtgcccgccagcactggcgcgccaccagcccggtcttccttgactacgcgctcagcttgtgccgcaagatggccgagcactacaaggacaacccctatgtggtctcttggcatgtgagcaacgagtacggctgccacaaccgcttcgactattccgaagacgccgagcgcgccttccagaagtggtgcgagaagaagtacggcaccatcgacgccgtcaatgacgcctggggcaccgccttctgggcgcagcgcatgaacaacttctccgagatcatcccgccgcgcttcatcggcgatggcaacttcatgaacccgggcaaactgcttgactggaagcgcttcagctccgacgccctgctcgacttttacaaggccgagcgcgacgccctgctcgagatcgcccccaagccgcagaccaccaacttcatggtctccgccggcggtgccggcatcgattacgacaagtggggttacgacgtggacttcgtgtccaacgatcactacttcacgcctggcgaagctcacttcgacgagctggcttactcggcctccctatgtgacggcatcgcccgcaagaatccgtggttcctcatggagcactccagctccgccgtcaattggcgcccgatcaactatcgcgtcgagcccggcgaattggtgcgcgactccctggcccacttggccatgggctccgacgccatctgctacttccagtggcgccagtccaaggccggtgccgagaagtggcactcttcgatggttcctcacgcgggccccgactcccagatcttccgcgatgtgtgcgagctgggtgccgacctcaacaagcttgctgacgagggcctgctgagcaccaagctggtcaagtccaaggtcgccgtcgtcttcgattacgagtcccagtgggctacggaacacaccgccacgcctactcaggaggtacgccattggaccgagccgctcgcgtggttccgcgcgctggcggacaacggtctgaccgcagacgtggtgccggttcgcggcccttgggacgagtacgaagccgtcgtgctgccgagcctgaccatcctgtccgaagagaccacgcgccgcgtgcgcgagtatgtggcgaacggcggcaagctgttcgtgacctactacaccggtctggtggacgacaaggatcacgtctggctgggtggctaccccggttccatccgtgacgtggtgggtgtgcgcgttgaggaattcgccccgatgggcaacgacttccccggtgccatggaccaccttgacttggacaacggaaccgtggcgcacgatttcgccgacgtgatcacctccgtggccgataccgctcacgtggtcgcctccttcaaggcggataagtggaccggtttcgacggcgctcccgccatcaccgtcaacgacttcggcgacggcaaggccgcatacgtcggtgcccgtctcggccgtgagggtttggccaagagcctgcccgtgctgctggaggaactcggcatcgagacttcggctgaggacgatcgcggtgaagtgctgcgcgtcgagcgtgcggacgaaactggcgagaaccacttcgtgttcctgttcaaccgcacccacgatgttgcggtcgtggacgtggaaggcgaaccgctggtcgcctcgctggcccaggtcaacgagtccgagcacacggccgccatccagcccaacggcgtactcgtcgtcaagctgtaaaaccgcgcatagcgcctaattatccaacggctcccttgctgctcatcgtagcaggggagtcgttttcgtatctccagcaaagtcgggtagggtggtcaccgtgcgaggcaaaaacagagtgacgatggcggacgtggcccatgaggccggtgtttcggtagcctcggtgtctaattttctgaacaaacagccatatatgagcgaggcgatggccgcgcgtattgcggaagccatcgacaggctcggatacaaagtcaactcgtcggccagaaacctgcgttccgggcgtacccggttgctcaagctggttattcccgatctgcggcaggtgtacttctccgaactcgccgaggatattctggccgaggcccggcaacatggctacggcgtcatcgtggaatccaccactaacaatcgtgcccgcgagctggaaagcatcgcatcgatgggcacgcacagcgcggacgggctcatcttaagccctctgatgatgacggttgacgatatcgcggctttggatggcgattacccgctcgtactgttgggtgaacgtttgttcggcgtcaacgcgccgcacgtagtgattcgcaatcgcgaaggggccgccgccgcgacttatcacctgcttgatgccggttgccgccgcatcgccgtagtcggtgccgtgccccaccccgagcacgatttctcgtcgggctccatccgcacccacggatatcgtgaggcgctggccgcgcgcggcatcccctgtgatgacagtctgcttatcgaaacccaaggctgggggagcgccgacggtttggtcgcggtggacaccatgctggagagtggcctgcaattcgatgccgtgttcgctttgaatgatttgctggcgtggggcgtgctgcgtgaactgcgcgaacgcggcgttgccgtgccggatgatgttcgcgttatcggcttcgatgacgtggaggaatcggcctacatggtgccgtctctttccaccgttaaccccggcagggaagccatcgcccgactggccgtcgaatccatcatccaacaggtcgaatccggcagccgtgcccccgcccaaaccatcgaggccccctatagcctctccctgcgcgagtcctcaccggcgttggcgcgcgcctgatgaatccgtggttcgaaatatccgaagtgaatgacaaggcccgtcaatcgtatggtgattgacgggccctggtcgtattggacttgactgtacttggtacgggcgtgactctccgtcttttagccgtggaattccacgctgatccaggagatggcgggaagcgttgccgtgcaggtgccggtggcgttcattgcaatgtcgagcggttgcggcgtgacggcttcgggcgcttcggcggtgttggtgcggtacggatcgtcctcatgcaacagttgcgccttgctgagcgcgagcgtgccgagaccgggcaggccgggcagcccggaaaggtcgatggtgagcgtgtgcggggtgttggcgtcgcggttgacggcaagcagcagaccggtgcgggcctgttcatcccacgtgactaccgcgtcgatggccggcacgtcgccatatgcctcggtatggatggtgggggagctgatggccggagcgtaggcctggccgcgcgcgtgaagggcggcttcggcgaacgggtagaacgtggtctgccgccatgccgggccgtgttcctcggccatgatgggggcgatgacgttgaccagctgggcgcgcgaggcggaacgcacgcgatcgcagtgcttgagcagggtgatcatcagggaaccttcgaccaccgcgtcggccgcggtgtagatgtcttccagcaaatgcggagacttaggccatggctcgtggtgcaaaccctgcgcggcctccgccttccactggtcttcctgctcgttccacttgtccgaataccatacgccccattcgtcgaaggacagggcgatgtctttggtgccgttgttggcttctcgcgcctgatcggccgcgtccgagacggtggcgatgaacttggtcatgtcttcggaagaggccaggaagtcctgcatggaggcggcggtccgggttttatggccgcggtcgaagtagtaggcatggcaggagacgaagtcgagattctcgtaagccttggtgagcacggtcttctcccacgtgccgaaggtcggcatataggcacccgaggaaccgcaggccacgagttcgagaccggactcggcgagcttcatggcgtgggccaccttatccaccgcgccggcatattcttccgggctcatgtggcccacctgccacgggccgtccatttcgttgccgatgcaccacatcttgatatccatcggctcctcgatgccgttggccacgcgctgatccgcccaagcggtgccgggcgcgccgttgacatactcgagctcgtcgagcgcggctttcagcccccgggtgcccatgttgacggcaagcatgatttcggtgccggctttctggctccagcggtagaagtcgtcgatgcccatctcgttggtttcggtgcaatgccaggccaggtcgcggcgcacggggcgattctcgcgtggaccgatgccgtcttcccagttgtagttggatacgaaattgccgccggggtagcgcacgcaggtgacgcccagctccttgaccaggtcaagcacgtcttggcggaagccgttttcgtcggcggtgggatggctgggctcgtagatgccgccgtagacgcagcggcccagatgttctacgaatgagccgaacagacgcgggggaacgtcggctaccggagtggcgtcggcgttgagggcgatgctggcgtccggcgtggcgttgccagttgtggagacgttactggccgtggtgccggcggcggtcggcgccgggctgctttcctgcttgtcgggatgggtggtttcggcggaatactggctgttgtgagtggtcatgagcgggatgcatctccttcggtttgcggttagtcaccatggtgcgacatgtcgtgtttgcgtaaacataaaacatgtggtaccgtttcttaaaacgatacaagacttggaacaaaacgccaagtcccgtcgtttcccataacaaggaaggaaagaacgatgaagttcggcaagaagacaattgccctgattggtgctgtggccatgctctcctctgtagctgcctgcggttccacctctgccggggatagcggaagcaccggctcctctgataagaagatcgagctgaccgtgtggtcctgggattccacactgcctcgtacggtcaagggattcgaggccaagaacccgaacattaaggtgaaggtgaccaatgccggcaccaacaaggacgagtacaacgcactgtccaacgccatcgaggccggctccggtgctccggacatcgcccagatcgaatactacgcactgcccgaatacgtgattcgcggccacctcgagaacctctccgatctcggcgcctccgatttcaaggacttctacaccccgggcacgtggtcctcggtgagcatcaatgacggcgtctacgccctgccgatggattccggcccgatggcctggttctacaacaaggacgtcttcgacaaggccggcgtcgatccgacccaggtgcgcacgtgggacgacttctacgaggctgccaagaagattcgcgccgtggactcctacatcacctccgattccggtgacgccggcttcttcgactccatgacctggctggccggcgcgaccccgttcgagacctccaaggacggcgagaccgtgaccatcaacctgaccggtgacaagaacgtcaagaccttcaccgacttctggcagaagatgatcgacgaagacctcatcgacaccaagaccgtcggctggaccgacgattggaacaagggtctggatgacggctccatcgcatccctgctgaccggcgcttggatgccgtacaacctgctttccggcgctccgaacggtgacggcaagtggcgcatcgcccagatgccgaccgcagacggctccgagaccaactccgagaacggtggttcctcgctggccatcgtgaagtccgacgacaaggccaaggtcgccgccgcctacaagttcatggaatacgcctgccacgacgccgagggcattaagacccgtgttgacggcggtgccttcccggccgacaacgacaccctcaagtccaacgacttcctcaacatgacctccctgaccgactccgacggcaaggcccacgagtacttcggcggtcagaagttcaacgaggagctggccaaggccgcagccaatgtgtccaccggctacaagttcctgcccttcgaggtctacgctcgcggcaagttcggcgactacgccggcgatgcctacaccggcaagaccacgctctccgatgccgtggcttcctggcagaaggacctgcaggattacgccaagcagcagggctaccaggtgaagtaacggcaatcacagcagacttcctcctgtggtttctgtagcgggaggttgcgataacaggatcgggcactcttcggagcgcccgattttcttatgccatgggagcagtggcgcgcggattgcgataccaagatggcgtgttgccgaagaatgtgtataataaaagatgttatcgcaaccatagctacaaagtggcgaaacaaagccgttttgtgactactgaaccatagagtgatggttcacgatagcatgacgacgaggagagttgccatgctgttgtggtgacaatcactgcagaccgccgaaaggcgatccaaggaaggagaacagaacgatgaagttcaccgttgctaagaaggccattgcacttaccggtgcggttgccatgctgggttccgttgccgcctgcggttccgacaccgccagtggcaagccggctcaagataaggacgttaccgaaatcaccgtgtgggcttgggagcccacgctgacccaggttgccaaggacttcaccaagaagaccggcatcaaggtcgatctcaagaacgtcggcaccaacaccaaggaatacacccagcttgataacgccatcgaggctggctccggtgctccggacgtcgctcaggttgagtactacgccatcccgcagtacgccatcaagggcaacctgctggacatcaccgacaagacctccggctactccgacttctacacccctggcccgtgggcttccgtgcagttcgccggcaaggtctacggcctgccgatggattccggcccaatggccttcttctacaacaaggaggtcttcgacaaggccggtgttgacgccgagcagatcaagacctgggatcagtactacgacgccgccaagaagattcacgctctgggcgacaactactacatcacctccgacaccggtgacgccggcttcttcgactccatgacctggctggccggtgcaaagccgttccagacctcttccgatggttccgaagtcaccgtcaacctgaccgaggacaagggcgtcaagaccttcaccgacttctggcagaagctgctggacgagggcctgctcgacaccaagaccgctggctggtctgaggactggttcaagggcatggtcgacggcaccatcgcctccctgttcactggcgcttggatgcctgccaacctggccaactccgctgctgacggcgctggcaagtggcgtgtgacccagatgccgaccgctgacggctccaccaccaactccgagaacggtggttcttcgctggctgtgctcgcctccaccaagaaggctgacgctgcttaccagttcatcgagtacgccaaccacggcgacggcgtggccacccgtgtggccggcggtgcattcccggctgacaaggcctccatggagtccgactccttcaagaacaccaccactgtgaagaacgccgatggcgaggacgttgactacttcggtggtcagaagtacaacgaggttctggctcaggctgctgagaacgtgtcctccgactaccagttcctgccctacgaggtcaaggcccgcaccatcttcggcgactaccttggcaagtcctacaccggcgaccagaagctgactgacggtatcgccgcttggcagaaggcactgcaggattacggcaaggatcagggcttcaccgtgaagtaagccttgaaccctcgctgagactgcctagctaatctcacctgatacacaaagccccgtgacgaatcccgtcacggggcttttaccgttttaagccccgcctagtacactcgtcaccatgcgagtgatcggacagcgaatcaaaagaatggcaaccatagcagtgactgccatcctttccgtatccctggcctcgtgcgggcaggccacggacgacaaccgtacggagatcagcgtatggagctgggaaccgagcatgggggaggtcatccgccgtttcgaaaaagccaatccggacatccgcgtgaaatggaccaatatctccggctacggcaatcttaataccgccattcaagacggttacggcacgccggacgtggctcaaatcgaatactatgcactgttgcagtacgcggtctccggccaattgcttgatctgaccgacaaaatcggctcggattattccaacttctttaccctcggcacatggtcgtccgtgcagctcgccggccgtacctatggactgcccatggattcgggcccgatgggcttcttctacaacgaagacgtgttccgccaagccggcgtggacgccaccaagatcaagacttgggatgactattacgaggccgccgaaaagctcaaggagatcggcgcgtatatcgccgccgactcgggcgacggcagtttctatgacgcgatggtctggctcgccggtggtcagccgttccacacgtcggccgacggcaaaaccgtgaccatcgatttggatgaggatgccggcacccaacggttcaccgaattctggcagaaaatgatcgatgaggggcttgttgacaccacctccgccacatggtcggatcggtggaaaagcagagtgggcaccggcaccatcgcctccgtgttctctggggcttggatgccgtcgttgctgctgtccaatgtgccgggcgcggccggtctgtggcgcgtggctcccatgcccacctatggtgggcagcctgccaacgccgaaaatggcggctcggcgctgaccgtgttgcaactgacccgtaagccggatgcggcctatcgtttcgtggactttgtggcgcatgacgcccaaggcattagcgcgcgtgtagacggcggtgccttcccggccgattacgccaccctgaattccgctgattttctggataaaaccacgattaccaatgaccgtggcattgaaatcccgtatttcggcgggcagaagttcaaccgggtactgtcggaggccgccgaggatgtgtcggtcggataccagtatctgccattcgaagtgtatgcgcgcagtgacttcaaatcgacggtgggccaggcatacgagtggtccggcagtttccacgcctatcagcagcgacaggaagccattgagatgggcatgaaggacgaggaaggcaacccgctcgaaccattggagaagcccggcaagaaagtcagtctctccgacggcctggcccaatggcagaaagacctccgagaatacggcctcaatcagggctttacgattaagtagggttttgagtaggtttttcggggagggacggaatcgactgcgctatgcgcggccgattcctgcacaccgcgttacttcacattgcgcgagtagatgtatgccatgcctttgaagatcaggtctgaatcgtagacgtcgatcatgtcggtgtcgttcttgaaaatgcggctgagccctcccgtggctaccacttggaacggctcatcgatttccttgcggaactgctgaatcgtgcgctcaatgccaccgaggaacgtgtaatacagtccggcctgcatagcagtgcgcgtattggtggccagaatcgactgcggttgcgtgatctccacttccggcagctgggcggtctgcccccacaacgcctcggccccggtgcggatgcccgtggtgatgaagccggagcgaatcgtgccggaaccgtccacatagttgaacgtggtggcggtgccgaagtcggccaccagcaccgggccgccataggtgtggtaggcgccggcgcagtcggcgatgcagtcagagcccaaggttttggggtcgtcgagacgaatgttcatgccggtcttgacgccagggcccaccaccatcggttccaatccgaggaatttgatcagcgaggcgcggaaggaatacatcaccttcggcaccaccgagcagacgatcacatcgtccacatcgtcggccatgtaatcgctcaaagccaggaactgcgtgatcatcagaccgtattcgtctgaggtgtgcgtcgccttggtggtgatgcggtaggagccgacgatgcggtcgccctccagaaaaccgatcacgatattcgtattgccgatatcgaccgccatcagcatgggtcaggcctccttgttctcgtcatcgacattgctcgcgccgccggaacgcaacgctgcgagccgcagcaacagtcgttgcgcaagcacggttttgtccatcttgtcccaatgctcgatattcggggtgccggcatcctccgctccggacgtgagcacggtgacaacgttggtgtcggtgccgaacccggcaccggcgtcgcgcagattgttggccaccagcatgtcgcaatgcttggacgtcagcttcttctccgcattacgaatcagatgctcggtctccatcgcgaatccgcacaggatctgcgagccgtcgtcgcgcttgcgttcgccggcccacgccagaatatccgggttggaaaccagctccacggtgatgctgctgcggccggccttcttgattttctccggcgcaatctcggccacgcggaaatcgcccacggcggcggccataatcgtgatatccgccgccgggaaggcgtcggccaccgcatcgaacatatcctgcgcggtcatgacgcgcaccacatccaccgcatcgggcgcggtcaaggcgactggaccggagaccaacgttacgtcggcaccaaattcggctgcggccgaggcaatcgcataccccatcttgccggtggaatggttcgtcagatagcggaccgggtctagcggctcctgcgttggcccggcagtgaccagcacgcgcagccccttgagcggggaagatgagggagcctggtcatcctgcgcatccgccagcagccgagcggccacttcctcgatgcgcgccggctcttccatacggcctcgtcccacgtcgccgcaagccagattgccttcctccggctccacaatctgccagcccaattcggcgcaggttttcagattgcgctgcgtggccggattgttgtacatatgcacgttcatcgccgggcataggatcttcggcccctcataggccagaatggtggacgtcagcgtatcgttcgccaatccacaggcgatgcgggcgatgacgtcggcgctcgccggggccaccaccagcagattggcccaggccgcatcggccacatgattgatggtcgttggcacggtcggattggccgtcacgtcgccgtgcgcggccggataagcggggaacatcgtggtacgggtgggctgatgggtcagcgcggtgaatgtcaggggagtgacgaaaccttcggccgctgtggtttcgataacccgcacctcgtggccggccttggtccaatcggatgccagatgacaggccttgaatgcggcgatgctgccggtgacgcccagaagaatatgtgccatagctgcctcccggccttatgccaaggccgcacgtgtgcccacgccagcgcttcccgcgtcgttgcccgacgatgcgccgcgtgttgtggtcgccgcggaccctccgtcggcgccgcaatccagtatagccattgcctccggcgtgtccggggatatagtagaacgtggtgatcgacccgaatgggcggtcaaccacgcaagataacaacgaaaccatattcgggcgtaagcatgcccgaatgcatcagggagtatccatgtcccagaacaatggtgtgcacggcgagtccggcgcaaccgaagacaggaacatcgacggcgcgaatcaagctgccagcaccgacgcgagcctgaacgcgcgcgcgaaatcatcaaacaggaacaacggcggcccgaaatggtggctgtggacgctgatcgcggtcgtcgtggccgcggcgctcatcgtgggcgtcaccgtcttcggcgggaaaggcaagggcaaggacgcgaacgcctccgtctcggccagccgatccgacaccgtggccgtcggcctcaaactcgccccggtcaatcttgacatccgccaccagtcgggttcggcccttgagcagatcctcatcggcaacgtgtacgagggtctcgtctcgcgcggctcggacaacaaggtccaccccggtctggccaagagctgggagatctccaaggatggcctgacctacacgttccacctcaacgagaagatgaacttctccaacggcgacaagctcgacgccgaggatgtggcgtggtccatcaacgagctcaaggcccagaagtactacgactacgagcaggtcaagagcctggacaaggccgaggccgtggacgccaacacggtcaggctcaccctctccgcgcccaactcgaacatgctgtggtacctcaccagccgtcccggcctggtctacgacaaggacgccacctgggatcagaagaacggcgcgttgggctcgggtccgtacaccgtggtctccttcgacccgaacgacaagatcgtgctcaaggcgaaccccaagtattggggcaccgagcacaaggcgaggaccgagaacgtgatcgtccggttcctgccggacgagaacgccagcatcaacgccctcaagagcggcgacgtgcaggtgctttcgcccatctccgccacccttgccgatccgttccgcaaggatccgaactatgtggtcaagtccggtgatggttccgacaagttcgtgctcgccttcaacatggccaacgacaagctctccgacaagcgcgtccgccaggccatccgatacgccatcgaccataagcagatcatcgcctcgcgcggcggcgtggacgcccccctcggcggtccgatccccaaggtcgatcccggttacgaggatctgagcggcctgtacccgcatgacgtggccaaggccaagaagctcatggagcaggccggatactccgagtcgaagccgctggacctgaccctcacctacgccaacgtgtacggcaccgagctcggcgaccagctcaagagccagctcaagcccatcggcatcgacctgaagatcaactacgtggagttctccacttggctgcaggacgtgcacgccaacggcaactacgatctttcgctcgtggaccatgccgaaagccacgacttctacggatggaccacgccgagctactacttccactacgacaacaaggacgtgcaggccctgtacgccaaggcgctggaggccacctccga

SEQ ID NO: 1132 - DNA, 10658 bp, Unknown
  R81_24m  MAG No. k141_4989
aaggatcttggccttgatcttctggccgatgtacggggagaggtcgcggacgcgacgcatctcgacgagggaggcaggcaggaagccacgcagaccgatgtcgacgatgaggccgcccttgacggcttcgatgacggtgccctcaacgacgccgtcagcttccttgatcttctcgatgtcgccccaggcgcgctcgtactgggcacgcttcttggacagaatcagacggccttccttgtcttccttggtgacgacaagggcctcgatggcgtcgccgacctcgacgacttcgtcaggatcaacgtccttcttgatggaaagctcgcgggaggggatgacgccctcggtcttgtagccgatgtccaggaggacttcgtcgtgatcgatcttgacgacggtgccctcaaccagatcaccatcatcgaagttcttgatggtggaatcgactgccttgatgaagtcctcttcggtgccgatgtcgttgatggcgaccttggcgacttcagtgttgttctctgccatgtaaatatatggtttctaatagtggatggataatttctcgatattcagttatacgcacacccttacaggcatacagatattcacaatacaagcaactctgcccaaatttcctaggaaactctaggcgtgtcgttcggccatttccacgacgttggccaggagcatggctcgggtcatggggcccacgcctccggggttgggggtgtaggcggaggccttgtcgtagcaggccttgtccacgtcgcccttgatgcggtagcgaccggcttcttcgtcgtagacgcggctgacgcccacgtcgaccagcacggcgccgtccttgatcttgtcgggcgtcacgaatccggccgaacccattgcggcgacgatcacgtcggcgcggcgcatgtggtcggccacatcccgggtaccggtgtggcacagggtgacggtggcgttgacggcgttgcgcgtgagcatcaggccaatcgtgcggccaatggtgatgccgcggccaagcacgcacacttccttgccgttcagatcaatgtcataggcgtcgagcagctcgagcacaccgcgcggagtgcaaggcaacggtgtcgaaatgtcgccgcgcacatgcagcaccagttcgccgaggttgtacgggtgcatgccgtcggcatccttggccgggtcgatcatgtcgatgatcgcgttctcgttgatgcccttgggcaacggcaactggacgatgaacccggtgcaggccggatcttcgttgagttcgcgtacggcagcggcgatgtcgtcgaagctggcgtccgccggcagttccttcttgactgaggtaatgcccacttcctggcaatcggcgtgcttgccggccacgtacttcatcgacccgggatccgaccccaccagcaacgtgccaagccccggctggatgccccgggccttgagcctgctcacccgttcggcaaggtcggtcttgatcccggccgcgattcgtttgccgtcgatttttgtggacatcaacgccctcccccgtagtttcggtgcattctatcgaaacgataggctatcgttggaacaagtcaggattatatatcgttcgctctcacgaagaaggcgtgccatggggactcaaatcacacgacttacgcgactcgccgcagccggcctgagcgccgtcctgttgttcgcgaccgccgcatgcgcagccacctcccccactgaaaccgagccggacaacaagaccagtgttcccgcaccgaccgggccgatcaatgtggtcgcctccctcaatcaatggggctcgctggccgccgagctgggcggcgatgatgtggaagtcacgtccatcgtgaactccaccaatgtggatgcccacgatttcgagccaaagacctcggacgtcgccaagctgtccaaggcacaaatcatcgtggccaacggtgcgggctacgattcctgggccaccaaatcgatgaccaagaccacgaatatcgtatccgccgcttccgtcatgggtgccatagaaggcgataacccgcatctgtggttctccaaagacgctcgatccagcatggccacggccatcaccgatgcatatgtaaaggcactccccagcaagaagaaggccttccagaagcggctcaaggcatggcaggcggatgagaaatcgctggaaacatgggcgtccgagttcaccagatcccactccgacctcacctatgcagccaccgaacccgtggtctattatctgatggccgatctcgggttcaagaatcagacgcccaagggatatacgcaatcgaccgcttccggcggcgaaccggcacccgcggacctgcagtctttccagaaactcatcgaagacaagggcgtggatgtgctggtcaacaacacgcaggaagccagtgacgcgaccaatatgatcactggcgctgccggtcgtgccgatgtgccggtagtcgacgtctccgaacaaatgcccaaggacaccgacacgctgaacgcctggatcaaccagctcatcaacaccatcatcgacgcggtggatccgagctatggctgcgaagacgccacggacggcaacgcgaattccgatgattccagcgccgacggcgccgccacggatgatgccaatgcgcacgattccaaggccagcaccggttccagcacggagcccaagtacatccgtcagtgcaaggcggccacatccagtgactcgtctcaggattcggcaaaggccgatgcctccaatggcgattccggcgatgcctccggcaacgaccagaccgactccggcaaatagttagaagcaaaggacaacggcatcggattcatgcaatgccgatagacgccttgcacgagaagggttgtgcgaccattgtcgagatggccgcacaacccttttctttggttgccaccatccgtacacgatattgagaacgattgtcagcatcgtttgccacaatcgggcgttatgagtgaaacttccgattgcatcgtgttcagcgatgccgccatcaagcgtggtgaccatatcatctggcaacatggcacctttgccattcccaccggttcggtcacggccatcgtcggcaccaacggcaccggcaaaaccacgatgatgagggccgagctgggacttttgccgctttgccatggcagcctgaccgtactgggcaagcctgcgggcgaaatgaacaaacgcatcggatatgtgccgcagagctatgtggcgaatgtcgattccaatctcaccgccgaacaatccgtgttgctgggcctgaccggcacccgattcggcatccaccccatcaccaaggcccagaaagccaaagcgctcaaggcgatggagttcaccggcatcgccgacaaggcgcagtaccgtctgtccgaactgtccggcggtttgcgccagcgtgtggccatcgcccaggcgttggtgtgcgatccacaactgctgatgcttgacgagccgttggccaacctcgatctggccagtcaacgcgccaccgtacacgtgctggccaagctgaaccgtgaactgaacatgaccatccaggtggttgcgcacgatctcaatatgctcttgccgattctgaccggtgccgtctacttgctcgacgggcacccgcactacgccgatatgcacaaagtgctcgactccgacctactcacccacctctacggcacacaggtgcaggtggtcaccactccgcagggtgacatgttcgtgaccccgacgccggatgagccccaggaccagccgcaggatatgcacacggcagccgaagtggcgcaattgcaccatcacgagcacggcaacgccaccaatggcagtgccgccaacagcgccgagaatcgataacatcaagctagccgatccacagcccgtcaacgggctgcagctcaggcatggagaaaatacagggacatgagcaccatcaacttttcgtatgatcccgaatggctggacacactgtccgctccattcatgaccaacgccttcatcgccggcctgtgcattgccctggccgccggtgtcatgggatacttcaccatcgcccgtcgttccaccttcgcggcccatgcgctggcccatatcggtctgccgggcgcgaccggcgcggtgttgctcggcctgcccgtatcactgggcatgggcgtgttcgcactgggcggcgcactggtgatcggtgctttgggcaagcgcgtttccgagcgtgaaatcgcaaccggcaccgtactggccttcgccaccggcttgggtctgttcttcgcgcgattgtcgagttccgcctcccagcagatgcagtcgatcctcttcggctcgatcctgaccatcaccaccggccagatcatcggcttcgccgtgttcgacgtattgctgctggcattgttggccatcatctaccgcccgctgctgttcagctcgttggatgagcaggtggcacaggccaagggtgtgccgatcgggctgatgaacgtggcgtttatggcgattatggccggtgtaatcaccattgccgtgccggcagtgggcaccttgctgattttcgcgctggtgatcacgcctgcggccaccgccaatattctggccggctccccattcaaggcgatggtgatcgccagcgtgctgtgcctggtgtcgatttgggccggactcgtgctgtcggcgatgttccccgcccccccgagcttcattatcgtgacgctttccaccctgttctgggctatcgccaaggccgtggagacagtgcggaagtaatctcattcatttttcttgcccccgctggcaaattcatagcgggggctttgttatatcttctccaccaaggcattggcgatggcggcgatgccttcgccgcggccagtgaatcccatatggtcggtggtggtggcggtaaccgataccgggcaaccaaccgccgcagacagggcggcttcggcttcagcacggcgtgtgccgattttcgggcggttgccgatgatcgccactgaggccgatgccggcgtatacccgttggatgccagatgcgccacaactttttgcagcatatcgatgccatgccttccggcaccatgcgcgtccgcaccgacaccgaacagtgaaccaatgtctcccaatcgggcggcggcaagcaacgcgtcaatcagggcgtgcgcggccacatcgccatcggaatcgccttcgataccctcgtatttggcggcatcggcctcgctgcatgaatcagacgccggccagtaaagcccggcaatccacagttcacggcctgagccggcaggcgcaaaacggtgagcgtcaaaaccctgccctatcagcactcctgcagaccccatgcagtccccttcgatggcgctgcccagacgaacggcagcaaacgattatgaatcacgaagccccggcgtatcgcataaggacacgaccggggcctcaacaatcaaatcacttcttcttggacttcttctcggcttcgacacgagccaaagtatcggccgcggcctcttcgggctcggcggtgtgatgcttgtcgtcaccgggttgagcgggctcgtagcccaggttcacgtcgagcagacgctgggcttccgcctcgtcgatcttctcggacaaggcgatctcagaagtcagaatggcgcgggccttggtgagcatacgcttctcgcctgcggacaggccgtgctcgtcgacatcgcgctgggcgagatcgcgaaccacttcggcgatcttgttgacgtcaccggtggcgatcttttcgacgttcagcttgtaacggcgagaccagttcatctctttctcgatgatcggggtccgcaggatgccgaacaccttggccacttcggatgcggagacgatgtcacgcacgccgaccttcctggcattgtccacgggaacgttgatgaccaaaccatcggaagagagtacggacagctgcagatattcgcgcgtcactcccttgaccgtccgctcggtaatggcctccaccttcgctgcaccatgacgcggatagacgaccatatcgccgactttgtaagacatgtaccctccgagaactgacggcttacacacaaaaactcgaataattatgccatgcggtctggaccgcccctatgagagcgctcacaaccacggagacacaccgaaaagggcaagaattcgccattttcgacgcgccaatgtagcgttttcgactccaacgcacgtagactttgggtcatggctaaagaaacgaagatcaaggaagataccgtcaccgtgcctgtcgcccaaggcgacctcgatgcggtgagcaatgctgaattctacaacccccacggagttctcggcgggcatctcggcatcggcaagcatgccgacaccgccacaatccgtgtgctgcgtccgcttgccaagtccgtgaccatcctcacccaggatggcgaatacccgatgacccacgaatacaacggcgtgttcgtggctaccgtgccggcctccggcaccaagaagcagcccacgattcccgactaccgcgtcaggaccgagtgggaaagcggcgcagtgctcattgaggacgacccataccgttatatgcccacagtcggtgacatggacacctatctgttcggcgagggccgtcacgagaagctctgggaggcgcttggcgcgcacgtgctgcgctatgacgatccgatgggcggcgtggacggcacgcctggcgaacaggtggtaggcaccgcgttctccgtgtgggccccgaacgcccatgccgtgcgcgtggtcggtaacttcaacgcctgggatggccgtcgtcatgccatgcgcgagctcggctcctccggcgtgtgggagatcttcattcccggcatcggcgcgggcgagacctacaagttccagatcctgaacgccaattacacgtgggagatgaaggctgacccgatggagcgtcagcacgaggttccgccgcacaccgcctccatcgtcaccgaatccacctacgagtggaacgatgacgcctggatgcagcaccgccgcaccaccaacccgcatgatggcccggtctccatctatgaggtgcacgccggcagctggaagcagggactgacctaccgcgacctggccaagcagctcgtggactatgtcaagcaggaaggcttcacccacgtggagttcatgccactggcacagcacccgttctccggctcctggggctatcaggtcaccggctactatgcggtggattcccgcctcggctcccccgacgacttccgttacctggtcgatcagttccatcaggccggcatcggcgtgatcatggactgggtgcccgcccacttcccgaaggatgccttcgcactcggccgcttcgacggcaccccgctgtacgaggacccggacccgctgcgcggcgaacaccccgaatggggcacctatgtgttcaacttcggacgccgcgaagtacgcaacttcctggtggccaacgccctgttctggctcgaggacctgcatgtcgatgcgctgcgcgtggatgccgtcagctccatgctctacctcgactacagccgcgaacccggccattggcgtccgaacatctacggcggacgcgaaaacctggaggccatcgacttcctcaaggaagccaccgccaccgcgtacaagaacaaccccggcgtcatgatgatcgccgaggagtccaccgcatggccgggcatcaccgcccccacctccgccggcggcattggcttcggtatgaagtggaacatgggatggatgcacgacaccctcgagtatctgcacgaggagcccatcaatcgcaagtggcaccacaacgaaatcaccttctccatggtgtacgcctactccgaacactacgtattgcccatcagccacgacgaagtcgtgtacggcaagggctccctgtacggcaagatgccgggcgatggctggcagaagctagccggcgtgcgttcgatgttcgcctatcagtgggctcacccgggcaagaagctctccttcatgggcaacgagctggcccagtggggcgagtgggatcacgacgcctccatcgattgggattgcctgaactggcaggagcaccgtcaggtccagaccatggtcgccgacctcaacgccttctacaaggcgcatccggcactatggagccaggacttcgatccggccggcttccagtggctgaccagcgacgatgccgaccacaacacgctgagcttcctgcgcatcggcaccaagggcgagaccttggccgtggtggtcaacttctccggtgaagcctggtccgattaccaggtggcgctgcccaccggcggcaagtggaccgaagtgttcaccaccgatgacgccaagtacggcggctccgacatccacaacggcaccttcgaagcggtcgagggcgaatatcattcgcgtccgttctcggcgaagatcaccgttccggctctgggagttgtattcttgaagccggaagactgaactggtcaacaggctgaaaggtaaccggtttatttatgctcaataccacagcgcgtcagaatacgacaccgcgcatggtgctggtggtcgaggacgagcccacgctcgccacggccatcgcccagcgcatcaccgctgaaggatggaccgctcgcgtggccggggacggcgcttccgccgtccaggccgcgtcccagctacgccccgatctggtaatcatggacatcatgctgccggtcatggatggtcttgaggccaccaaacgcatcgtcgccgaacgtccggtgccggtgctgatcctcaccgcacgtgatgacgaggccgacaaggtcatcggtctgggagcgggcgccgatgattacatgaccaaaccgttctccatgcgcgagctcatcgcccgctgcaaggcgctgctacgccgcgtggagcgtgcgaaggtcatcgccaagaattcggagaacgagaagctgctcgacttcggttcgatggtcatagacccggcccagcgcatcgtcaccgtgaacggcgagcaggtgcatctgacccccaccgagttcgatctgctggccacgctggcccgccgcccgaagtcggtgctcacccgcgaaaagctgctcgaagaggtctgggactgggtcgacgcatccggcacccgcaccgtcgacagccacgtcaaggcgctgcgccataagctcggcgccgataccatccgcaccgtgcacggcgtaggctacgctttcgagccgccgaccgcgtgatggcatccaaaaaacaacagcaatcccggcttgatgcgatgaaacctcgcgtcaagccggttgatttgttctcctctctgaagctggaactcagcgtactgatcgttatcgccactgccatcgcgtttgccatgtgctggttcctcctgaaattcggctggtccggttggatcgccatgccgctgactttggtggtggccttgggcatcacctatttcttctcccgcggcatcaccgctcccttacgccagatgcgcgatgtggccgaagccatggcggatggcgattacacggtccgcgtggatatcgatcaggatcgtcatgacgaggtcggccagctggctcgctcgttcaacgagatggccggcgaactcgaacatgccgataaaatgcgccgcgatatgatcgccaatgtgagccatgagctgcgtacgcccgtttccgctttgcaggcgatggtcgagaacatggccgacggcgtcaccgagcccactcccgccaatctggagagcatcctcacccaaacacagcgtctctccgacctcatcgccttcctgttggatttgagccgtatggaggccggtgcggcgagtctgaatatcgagaagttcaacttcgccgactttcttgacgagaccatcgagccgttggaaatcgccgatggcggccacgcccacgacatccatgtcaccgtgccggccgacatctcgatggaaggcgatcaggaccgcctgcgccagctgttcaccaacatcatcgccaacgcgctgaagcattcggccgacggcaccaccgtgctggtcgatgcccatgaggatgacagccaaggcaccatcgtgaccaatgtggtgaatttcggctcccagattgcaccgtccgaccgttcggatatcttccggcgctttgtcaaaggcaagacgggtcccggcaccgagtcgggcggcaccggccttggcctgtccatcgcacgttgggcggcccaattgcacggcggcaccgtcaaagtggtcgatgacacgcgaggcgccgatttcgaaatcatcctgcctaaatatcacgtcgccgaacgctgatattgtccgccgtcctaccgtatactgtattcgaacagatgttcgaatacagggtgggaggcacagcatgacacagcaatccaagtcacgaaccatgccgcacgacaccacgctgtttgtcatgcagatggccggcgattccatgatcaatgccggtattcataacggcgatctgctgattgtcgatcgttcgttggcaccagtccccggagatgtggttgcggctgtcatggacgatgaaatcgccatcaagcggctggtttcacgggccggcatcaccatattgcacgccgagaatcctcgatatcccgattacatgccgagcaacggcgcttcgcctgctatctggggcatcgt

SEQ ID NO: 1133 - DNA, 16527 bp, Unknown
  R81_24m  MAG No. k141_5008
gcggagcttcgagcggatgatggacggctcccatgaggacacgctccgcgaaatcgtcggcagactgcgcgaggctctgcatgacccgtcgacgccggccaacgcgttgccgtcgatcagcagcaaactcgccgaattcgacgaacggatgcgcatggccgaggaatccggcagcctgttcgatgcgaatgatgacgtgacggaggtggcggaggatgtcggagcgtcgattgtctgagatcgcccaacggctcgtgaatccggaagacgtcacgtcgagcgacttcaacctgatcaacaacgcggcgtccaaggccggaatccactacgacctgtggcagaagggcttcctctacctgctgttcgccaaacgcgcggacggcaaatacgcctgtggctccggtggagcggtactgtccagctgcaggcagatcggcaagacgttcacggtcggcaccgcgatgttcatcctgtgcgccggacgcgccgggacattggtcatctggaccgcgcaccacacgcgcacctccgacgagacgttcgccgacatgtgcgacctgacacgcaatccgaaactgtccaggtacgtgctgaacgtgcgtcgagcgaacggccagcaggagatccgtttcaccaacggcagccgcatcatgttcggcgctcgcgagaacggtttcggccgaggcctgcactccgcagacatcgaggtgttcgacgaggctcagatcctcaccatcaaggctttggacaacctgattccgatcgtgaacacgagtccgaacccgttgatcgtgttcatgggcaatccaccgaagccaggcgaccagtgtgaggcgttcgaggagaaacgttccaccgcgttgtccggcaagtcggacgacatgctctacgtggagctcggcgcggaccgcgactgcgatccggacgacaggagcgcgtgggcgaaagcgaacccgtcgtatccgaaacgcaccagcgagcaggcgatactgcgcatgcgcaatctcctcgccgaggattcgttccgccgtgaggcgctcggcatctgggatgagaccgtcaccgcgtacgccatcagccccgacctgtggaaggccgcggccatcgacgaagtgcccgaaggcggcacggtgagcttcggcctcgacatgccgcccgacaggagcgtgctgaccatcggcgccgtattgcggtacgaggacgggtcggccgtcatccagatggcgaacatcaaggacgcgcggcaggcgggaaccatgtgggccgtggactggctcgccgaacgctggcacaagaccgcaagcgtggtcatcgacgcgcagtcgcccgccatgagcctgctgcccgacctgaaggccgcgcacgtgaaggtcacggtcacgaacatgcaggagatgggccgcgcatgcggacggttcctcgacatgctcaaggccggaacgctcaggcatccgcgtgacgaataccagccgcaactggccgccgccgtcaagggtgcgaccacgcgcccattggggcagtccggcgcgatcgcctggaacaagctcggctcggatatcgacataacgccgctcgtatccaccacattggcgctctacggcgcgttcaccacgaagcggcatcccggaaggcgacaggaggtgatggtctgatggtgttctacatggccgacggcaccacaatcagcacagcgccgaaattcaccggcagcagctacctcgacacagcgagcggcaacgtcggaaccatcctcggcgtcgacgacgaggacatgcccatcatccacgaactgctgcgcgtctggcgggagaaatacccgcgcaacctgatccgcggagcctactacgactgcaaggaacggttcaaggacttcggcatctccatccccgaccagatcaagaacaaggtcgaggcgatgatcggatggcccgaactcgccgtccgatcgttgagcgacctgagcgatctggaaggattcagcatctccggcgacgacacgatgggcatcaacgacctgttcgaggacaaccagctggacgtcaccgcatccgaactgatcgtatcctcatacaagcactcatgcagcttcctgaccatcgccgcagacccggaggatccggaacgaatcagcatgatcccccgttccgccgactggtccgcgggaatctgggacaggcgcaaccaccgcatggccgccgcgctgaccatcaccgaggacgacaaggacggacggatctgctcgttcaacgtatggctccccggcaaggtctacgaatgctcagggcgcccactgccatggcgcgcggagaaaatcgaaacgaacttcgaccagccgacagtcgtcgcgctcgcctacgacaggcagatggaccgcccgttcggccacagccgcatcagccgttcgctcatgagcctcgtggacgccggattccgcacaatggtccgcatggaggcgtcggccgaattctattccgtgcccaagctctggttcatcggcgcgaacaaggacgcgttcagcagcaacacgtggacgagcctcatccaggcgatcaacgcgatcagcgccgacgaggacggcaacctgccacaactgcagcaggtgcagcaggcgtccatggcaccccattcggacatgctcaagaccatggccatgctcgtcgcctcgcagacgcgcgtgccggtcgactacctgggcatcacactggacaatccgaccagcgccgaggcgatggcatccgcggaacgacgcctgacccgcatcgccgacaagcagaacgtggacttcggacgcgaactcaaacgtgccatgggcatcgccgtggcactgcgcgaaggcacgaactcgatacctgactccatgcgcgacgtgcacccggtatgggcccccacgaaggagatctccgacgcggcgcgcgccgacgcgttcacgaagatcgcggacaaggtcaccggctacgccgactccgacgtcggactcgaacgactcggcctgagccgtgaggaaatcatccgcttacgcgccgaccagcaacgccagcgcgctaaggaacagatcgatcagctaaaggctcgcctggcatcggccggcggcgaggaggttcaggatggaactcaacagcctgaacataccggagacgaacaggagagatcttcaacggctgcttgatcaagcctatgcgggatacgtcgccgaccttgatgcattggcagacgaagcggctgacgctatcgaggcgcagtaccgctccaacccgttgttcgtgcgcgatgtggtcgaggactactcgagacagtccgcgcagctggctgacgattatttcagccagctacgcgctatatgggccgagcagtcaggagtggatctgccggagttcgaacacccggatttgcttgatccaagcgaggtcctctaccgcatgaacggcggtttctccggaactgactggaatggtctcaactactccgacctcgtcgccggacgcagcaatgccggattgagcgtggacagtctgtggccggagttgaagaccatcgatgactggcagcagctcattggtgacatggtcagcacatccgccaggcttatgaccatgcgtgacatgcgtgccgaccccacaaaaccaaaatgggcgcgcgtgccacgaggcagcgatccatgcgcgttctgcgtcatgctcgccacccgtggcttcgaatacctcagtgaagagacggccgacttcggccccaccttccacaatggccactgtcactgtgatgtcatcagcagctggggaaggcagaagctcaaaggcttcgaccccgacggcatgagtgaacgctgggaacaatgcaagacggccatcgagcatcgtcttacccacgacgaatacctgagaacccgcagttcgccggaccagaagttcggcaactggaaacgcaatcagatactcgccgagatgcgctggcgcgaccgagaatggctccacagcggcgcagagccaccgatcagcttcccaagtgatgggatgcgtgaggaaaccgagaaggcaagaccgcaggagatacgaacggcccagagactgcgcagacatggaatcgtcccggcctttcagatcgaccatcgtgaagcgaaggatccagacactgggcgtatgctcctgatcggcttgtctgatttggaaggcggcatcgagctcaagacgcctcaatcagcagacaaattccgcactatcgacggatatatgggcagcgcgtcaaaaaagccggattgcagacggctgatcatcgacaattccgaaaacgacaacatgagcgatgaggaactcatcggaaacatcatgaaaagccatcgtttcaagaatgggatcgtatacatcctgaacaaaaaaggacagttgctgagaatcaagtaagcgccgctgaaactaccaaaaagggcggtaacaagggcgcttacgtatccattctatcaccttttggtggattgccggagcagacgaacggacccgactgtaaatcgggcgctttttgccacgcgggtgcgaatcccgcatccaccactcaaccggccctccggccggcggcgaccatgcgccgcatcgcatgggaggaccatacagcgcaccgtggcgcggtcgaactcgaatccacgggaaacagcaagaaggagcacagcatgttcaacatatcccgattcccggcccgtatccgtctcatcgacggcggcgacggcgaaggcggttccggcgaaggcaacgaacccgaaccgaaatcgttcacccaggaacaggtcgaccagatcgtcgagaaaagactggccaaggagcgcggcaagtacaaggactacgacgagctcaaatccaaggccatgaaactcgacgagatggagaacgccggcaagagcgagcttgacaagctcaaggaatcgaacgccgccctgcgcaagcagatcgacgacgccgcggccgagaagcagcacgccgaatgggtgtccgaagtcgccaaagacaagggcgtcccggccgaactgctccgcggaagcaccaaggacgagctcgaagcgcacgcggacctcctgcaagcggcactgcacccggcatccaagccgccgcaggtgaggaaccagacgggctctccgtcacatcagaacaacagcaaggacgccgaagagctctcgtacatccaccagctcctcggcagataacccaaccgaccgaaaggacaagccatcatggcgatgaaaacagaccagatcaagctccccgtgagcgtggccaccgaaatcgtgaacaaggccaaggacaccagcaccatcgcgtccctgagccccagcacgccgcagatcttctccgacgccgactacctcgtgttcaacggcaagagcgaggccgaggtcgtggccgagggcgcggtcaagagcagctacgagcagaccgtggattccgtcgtggcgaaacgcttcaaggtgcagaccaccacccgcgtcaccagcgaactccagtgggcggacgaggacaaccagctgcagatcatccgcagcatccaagcggatcaggcagccgctttgggtcgtgcgctcgactacgtgatctaccatgcgatcaacccgaagaccggcgccgcgctctccggattcaacccgttgagcacgtccgccgtgcaggtgaccgccggcgatgacgacatcagcaacgtggatgccttggccgacgcgctgaacgactcctacgacatcaacggcgtggcattgtccaagacatgggcgtcacgcctgcgcaagctgcgcgtgccctccaccggcatgcgcttctacccggagatcccgctgaacctgcaggccggcagtctggacggcatcacagccgccaccagcggcaccgtcaacgggcgactggccacgaccccgacgaaggtgctcgcgttcatgggagatttcagcctcatcaaatggggcatggtccgcgacctgaccagcgagatcatcgcctacggcgacccggaccagaccggcgtcgacctgaaggcgcacaaccagatcgcataccgcaccgaggcgatgtacgcgttcgccgtcatcgacccgcacgcgttcgccgtgctcaaaactaagtgaggtgaactatgagttttcccatccagacgcttgttgtcaaccctgcaggcgagggaaagcacactgtcggcccattggacgcgcaggtgcgactcgtcaacactgacggcactgccttccaaggaaccgaacggcacactttcagagaggcgattggcagcattaacagcgaagtagccgagacaacagcggcaaacccgagcaaagacgagttcaacaagctcgtcgcggtctgcaacgcgttgtcggagcagttcaacagccttgtccatggactcgcggaaagcggacttatcaagcttacggacaagaagtgaccatgacggacgaacccgacgtgttcgccacctccttcgacctcgaacagaggtggcacaagctcaccgacgaggaacgcgagaaggccgacacgcatctcatggacgtgaccgactacatcaaggaacgctccccgaactggcaacgtctccaaaaagaacggccacgcctcctggcgaagatcacctgcgacatcgtccgcaggatcatgcaggccgacccgtacggcatccccggcggcgtcacccagatgaaccagaccaccggcagcttcagcgaacaatacagtttcggagcaccaaccggcgacctgtggctgcgcgacgacgagaaacgcatcctcggcatcaacgcgcaacgcgcgttcagcgtcgacatgaccacaggcgaggtgtcctaatggaaaccatcgaagtatggcgcggccaacccacgacagacacggacggcaaccccatccaaggcaagccagtccgaatcggcacattccaggcggtggtcgccccaacctccaccaccgaccagaccgaggaaaacgccaatccacagaccatcgaatacacgatacacatccgcggcagccagccatccggcatccaggcctctgacctgatcgaagtcagaggcctactcctgcccgtcaaaggcgtcccacaggtgtggagcaacgtccgcggacggcacgtcggcgacgtggttaccgtgggcgagcggaaaggataggccatggccaaacgatgcagattcgtgttcaaccgcaaggcattcggccaacaggtgctgaagaacgagacgctacgtgaccgcatgcgcgacgccgccaacgaggccgtcaccgacagccgctgcatggtgcgcgaccataacggcgcgaaccgaaacggcgtggccatcctctgccccgcacccgtggagaaggcgcacggcacattggaggacacgctcgggaggatgcgcgtatgagcatccccgtcactccacggcgcacggagccgctgctcctgcccaggctgcgggagctgtttccggacgtgacgttcgacaccatcgaacgatccgacctcgaaccgcctttcacggaagccacattggccgactccatgcagggcatgagcactcccatctcccagtacgtgcgactgcggctgggcgtgcgctgcatgaaagaggatcatacgggcgactgggacaaggccgcccgcctgtgggccagcatcgcaagggagatcatcaggctcggaaccgtcgcgccgctcatcgacgcgtcactggaatccggaccggtacgcatgacggacgaggacaagagactggtgtgcgcgtacggcgtgcttctactcgaggtatccgtcgcctgaactgaaaacacaagaaaagacaagcaaagacgtgccgccacacgcagaacggaagcgaggtgcagacaggaatgtctgacagcaacgaagaacccatcgccgtcgaacaggcggcaaccgaaaccagcctgcaggacgggcgcggatcgaccgactatgggtacgtgtccaacggcaataccgccggcaacgtgcgcctgatcaagaactacgcgctgttcctgttccccaaggccgacagcacgttcacggaaccgaccggcgtgaactggacgccgccggccagcaagaaaccgatcggctattccaccgaggacggcgccgtcctgcatccggagccgggcgacagcaccgactacaaggcgcacaacggtgacatcgtcctgtccgacactgatccgggctactggacactccagctcgccgcgatggagggacgcaaggacgtggtgtccgcctacttcgacgtggacgtggaatccgacggcggcatcagcatcaagggagccggcctgaagaaggaatggatcctcgtattggtcgcgctcgaccagcgggaccgccccttcctcctgtacggcaccaacgcgaaggtatccgaccgtgacgacgtgagcctgaagtccagcgagctgatgagcttcagcatgacgttcaagatgctcaagggcactaacggcgaacagttccacgcgtggggcctcgtcaccgaagacgtcaagtgacccattgattcttcccgtgcggccgatggcggtcggccgcacgggaccattacccataaccgccgataaccatgaaatggagacgaaatgagcgacaacacctaccatattgtggacgtggaccttaccgacgcggaggagctcaagcccgacgtgcacctcgaggtcgccggagcgaaactcgacctgccgaacctcaacaacgcggaactgcccatcgaactcgtacaggccatcctcctgatcaagagcaggccgacgctctccgacgaggagaccagcgcgtgcatggccacgttcctcgcgtacttccaggcgatgaagccgaacttctggaacgtgctgcgcaagacgaaacgtccgatcgcctacctcatcgccacggtgaaggcgtgggccgacgaatccggactggacccaaaagcgtttacctcgcccacctctggaacaacaatcgcgcggcgttagcctacgactggatacgcgcgtacgggcagatctacaggcccgcacgcttccaggaatggatcgcgggagcccgcccgcgaaccgactggggactcgcatgggcattgacccgcgaaatcctcaaagaccacacgagccactcgtggatggcgttgcagaacgccgtctacgtgcccgacggagccgaacaggccgcatggctgaacgctcctgagcaaaagaaacgaccatggctcgaccacgggcacgatcccctccgccagccgacaccgacgcacagcctcacccgtcggcagcgcgaggacagggaacggctcaaagcctacttccacatcaacgacgacctatgatcccgaccgccatcggaatcccgacacgcagcaaggaacacgatggcagcacaggacatcggcgtcgcatacgtccacgtcgaaccatccggcaaaggattcggcaaaagcatcgaaggcgacatcggcgacgccgtcaacaacgcctccaagcaaagctccaacaccctcatctcgaaaatcggcggcgcgttcggcaaagtcggcaaagtcggcatcggtgcgatcgccaccatcaccggaggcatcacagccctcgcggccaaaggcggcttcacccgcgcgctcaacatcgagaacgcgcaggccaaactcaaaggcctcggccacgacagcgcaagcgtcaccgaaatcatgaacgacgcgctcgcatccgtcaagggcaccgcgttcggactgggcgacgccgcgaccgtcgcagccagcctgtccgcctccggcgtcaaggagggcggcgagctcaccaaggtcctgaagacggtggcggacacggcgcagatctcggggcgcagcctgaccgacatcggcacgatcttcggatcggtggccgcgcgcggcaagctgcagggcgacgacatgctccagttgatgagctcgggcgtgcccgtgctccaattgctcgccacccacttgggcaagaccagcgccgaagtgtccggcatggtgtccaagggcaagatcgacttccagacattcgccgacgccatgcaggaaggactcggcggagcagcgctggcagccggagacacgttccagggcgcgctggccaacgtgaaggccgcgctcggacgcctgggcgaaggccccggcaagatcgcgctcgaatcactgcgcaaggcgttcaacgccgccatccccgccatcgacgcgttgagcagccaactcaccccgttcctcgacaagctcaacggccagctcggcccctacatcgacaaggccatcggtctgatcgaacggttctcggccggtctgcaggacggcagcatcaccatccaggacatcgccggccagatcggtacgctcgccggcgcgttcgccgtattcaccggagtcggcggcaacatcgattccatcaccggcttcttcgacctgctcggcaccgccggagaccgtggcgtcacacagcttaccagcaaggtcaaaagcctgccggacggcatcaaatccgtgttctccgcattcatgtcggacggggccaccatggccgaggacctcgccttcccgttccaattggccggggagaagatctcgggcagcaagattgggcagaagatcgcatccctcggatcgggcatctcagacggcgtcggcaagatcacctcgacgctcaaaagcaagcttgtgtccgggttcgcgtcagccgcgttctcgctcgagaataatcccgtggtcatcgggctccagtcgttcggaggcaagctcggaggcatcgcatccggcgtcgcgggcaaggcgaaggccgcgctcgggcccatcggagacgccttcggcggcatcgccggcgtcgtcgggccaaggctgcagtccggcctgaacgcggtcggcggcctgatcacgagcttcttcagcccgggcaacttcatcaagctcctcggcatcggcgccatcatcgccgcactggtcgcgggactcggcatgctcgaccagagcatgcaggggcagctgttcgccatgatcggccggttgggcgcgcaactgccgggcatgctgcagaacctgagcatgcagatcgccgcgaacctgccgcagatgatcgcgcagggcgcggccatcctgaccgcgctgatgggcacgatcagcgcgaatgcgcccaagctgttgtccacggcggcgctgctgatcaccacgctcgtgcaggggcttggacaggcgctgccgagcctcctgcccgcagccgtgcagatgataacctctctgatcacggcgctcatagcgcaggctcccatgctcatcgagggcggcatgcagctcctgcagggactcgtgcagggcatcacggccgcactgcccatgctcggcgaacagatccccctgctggtccagacgatcatgacggccttggtcgccgccctgccgcagctcatgcaatccggcatgcaggtcgtcaccagcctcatccaaggcctggtcgcggcgatgcccacgctggcggccatgatcccgcaggtcgtcatgaccatcgtggacacgctgctggccaacctgcccggcatcgtcagcaccggcgtgcgactgctcgcgtcgctcgccaacgggctcgtcaacgcgatcccccaattggtcgggcgcatccccgcgatcatcgccgcgctcgtgggaggcatcgcctcgcgcctgccccagatcatccaatccggcgtgcagatcatcatcacgctggccggaggactcgtgcaggccatcccgcagctggtagccaagatcccggcgatcttcagcagcctcgtgtccgggttcctctcgcaggattggggcaagatcggcctggacatcatcaccggcatagcgaaaggcatcgcgggagcggccggcaagctcgtcgacgcggccgtcgacgccgccaaaaacgcgctcaactgggtcaagaacaagctcggcatcggctccccgtccaaggtgttccgcgacgaggtgggccggtggatccccgccggcatggccgtcggcatcgaccgcaacgagggtacggtctccaaggcggccaccaacctcgccaagggcgcgctcgcgccgatgctcggcgtgcccgaccagtacagggcgctgatggacgaggccaccggcaccctgaccgaggcaagcatgagcgtcaacgccatgggtcccgaccatcgcaacgggtactcggccgacgcgccgcgcacggaacagcaggagttcgccgcgctgagcggcctgctcgaatccatcgaccagcggctcaggaacctttcggacgcgctgccgggcatcatcagcgactacacgccgaagctcaccatgcgcgagctcgcccggctcgtctgacaaggaggcatgttggagactatcgaatacaccgccggcaatggcgagagcatcggattcgagggccccctgtacggggagaccatgcccggcctgcgtggccgcgcatgggattacggcctcgcctcgcgtggcctgaccggcgtcacccgcaagacacgcgaaacgaacgtcacggtgaggatccatgattcgccggccacgctagacctgctgcgccgtctcgccgacgccgacatggcagccggcacgcccggcacgctcgtcgccgacggcgaatgggagaccagggcgtggatcccgaaaagcgagccgcagaccatcacgcccacgatggtcgagacgcagcttgccgtcgtgctcctggacggcgtgtggcggagggagaccaccacgcatcacgatccgcgaaccgacgccggcagcggacttgactacccgcacgactatccgcacgactacggcggcatgagcattctggacaccgtggccaacacgagcggcatgccgcagccgatacgcctcacgatcttcggcccatgcgtcaacccgtacgtcatcatcggccccaaccggtacgaggtcgacgcgaccattccggccggcagcagactcgaaatcgacggcaccgctgacgccaggaccgtcatcatgatctccgacaccggcctgcgcacgaacctcttcgccaaggccgtgcgcggcaccggacgcggatccggcacctacatcttcgaaccgcttccccccggcacgagcacgatcagctgggctggcggattcgaattcgacctgacagccatcgaagagaggagcgaaccgccatggacctgatcgtcaccgacacgaacggcacgccgtccggctcgtacgcctcatggacgctcgacctggcatacgggtcgggggagaacgacttcgacctccaatgcccggcacgcctgaaaccaggctgccggtggtgggtcgacgggacaggctggggcggcatcgtcgacgacgtgaagaccagcgtcaccggcggcgagggcgagctcacctaccacggtcgcgactggcacggcctgctcgcctcgaagatcctcgaacccgacaagggcaaggactacctgaccatgagcggcacgatcggcacgctcctgcgcaccgtcatctcccgtatcgggctgcaggacatcatcaccgtcacggaaggcgcgtccaaaaacgcaaactggcggttcgaccggtactgcgacgcgtggagcggcctgtccaagatgctgcgcgcatcaggactgcggctgcgcatcaccgcagcgcagaacggcgtgacagtcgacgcgccgccgatcacggccgccggcgacctcatcgactccgacctcatcgacttcgacgcgaccctcgcctcgcatccgatcaaccacctgatctgcctcggcaagggcgaactcaaggacaggatcgtcgtccactggtacgccgaccagcaaggcacgctcagccacacgcagaccatcaaaggcgcggacgagcgcgcaagcgtctacgagctcagcaacgccgacgccgccgaactcgagaccaaaggcaagacaaagctccaggagctgcgagatacaggcagcatcgacgtggacgttaccggcagcatcgacctcgacgtgggcgacaccgtgaccggccgcgacaacaccaccggcatcagggtcaccgccgagatcaccaagaagatcatcaaagtcaaggacggcatcccgaccgtaacctacgaggcgaccaccgcgtccacggaatcgaccggcgagaccggcggcggtggatcaagctccggagacggccacgcctactacgccggcagcggcctcaccctctccaactggacgttcagcgccgatgtgaccgccgccgacctcgaaacggtccgcagaaccgccaccgaagccaacaaggccgcaagcgacgccgcggccgaaatcggaggcgccagagacctcgccaaacaggccggcgtaaaagccgacacggccaccaccacggcgcagaacgcgttggccgcggcgcaggcgcgaatcttggacatcactgcgtcggctccagtcacagtgacccgcaccgacgagacggctgccatcaccgtcgcacaggccacatcatcggcggacgggctcatggccgccgcagacaagaagaagctcgatggcatccagcccgccgcgaacaagtacacgctgccagtggcatccaccgccaccctcggcggcgtcaaacccgatggcaggaccatcaccatcggaccggacggcaccatcaccgcacaatccagcgcgacagtggcatccttcctcgccgcacacccaatcggctcgctctactggtgcgtcgccggcaaccccaacgaccatggcggcacatggaaggaaatccacaccatcatcggcggacacgtctggcaaagactcgcctgaaaggaacagcatggcaaaaaccacgaacatcaccaaatacacatgcgaccgctgccacgacagcgcatacctcaccgaaggggatccgcgcacgtcgagcgactggcaccagatcaaacacaccaccgcggacggagtgacgcaggaggcgctggcatgcacctcatgccagcaggaattcaagaaactcgccgccacgcaggacgcggcctacacggcatggcttaccaagggaaaggactgacatgaccaccacgctcatcacaggcaagggcggcacaccgcacatcaccagcggcgacatgggcgccatgcaggccggcatcatcggcaacggcagctacctgctgcagggcagcgacggcactttccccacggtgaccatgcaggatgcgaatcacgcgctgatccccgtcctcaacctcgtggtcgaaggacgatacgcgcgcgtcaccgaggccgagaccgcgaccatcgaaagcggcatgagcggccagaaccgcaacgacctcgtctgcctcaaatacacacggaacaaccagaacatcgaggccgccgccatcgccgtgctcaaaggcacgccaaacaccagtacggccgccgacccgaccgtcccgtcgggcagcatccactcggcctccggcacggcgtggatcccgatcgcccgcatcccgatcagagggatcacgcccgacacgccggtcatgctcatcaaacagctgcctcccatgtcgacgctgtgggattccgtaacccttgaacggcagatctggcatgggccttacggcatgacggtacgtctcgccaaagtcggcatgatggctttcgcttttgggaatacgtccttcacatccgacatcaattccaacggccagattgtgcatgagacgatggaagccggtttcctgccggaagatgaaggcgcgatactgctggaaggtgtgaacgggcagcatggagccttgtccttcgactctggcggcaaggtcacgatcagcggcagtatgcacagcggatattatttccgcgtctgcggctgctggcaggtgaaatagctttccgtaacccagacatggaagcctccatacacgaacgacagcctcactctgtgtcgcgtcggacgcgtcgtcacgatcaacggcaacgtcaagttcaccggcagtggacagcagaactactcgacggcgtcggagaccatcccagaagcgttccgcccgctcgccgacatgagcatcatcgcgttcccatcctgcggtttcggcctgcttgtcatgcgcgacgggaaggtgcagatgcttggcgacccgaaattcgcctactccacggcgcacggctgttggatggcgtcctagacgaattccacaccatcgggcaccggaatgatcttcgagaagcattggacgatatcggacgagcccacgcctccgataatcgtcaccgacccgtcggtgttccacctcgcctgtttgccatacgcggcgccggtcacgttcgcgacgcacccaagactgatcgtcttggagggcttcacgcccgctttgaacagccagacggggtaatcgccgactttcacggtgcttcggaacgaagacaggtccacgaaaatcagtccgtctttgaccgtgatggtgttcgaagcgccataagcagacggaacgaatgatgagacgtcctgccatttcagtcggcatgtctgggttacggaatcccttaccgcatgattgccttctcccacagcttctgcgcgtccttgagcac

SEQ ID NO: 1134 - DNA, 12770 bp, Unknown
  R81_24m  MAG No. k141_5100
cagcggggtgagactttgcgcccaacggcgtgtgagtctgcgctggccgttaaccttggtacgaatacccgaaaaacataagggggttttggtgagccagaacgagtccgggaccatcgcaattccgatgtatgacaaggatgatgcagtcctcgttttggaagacggacaggtatatgtgggggagccgtacggcgccctcggtgagacgaccggtgagatcgtcttcgccaccggtatgaccggataccaggagacgctcaccgatccgagctacgatcgccagatcgtcgtgcagacgttcccgcacatcggcgataccggcgtcaacagcgaagaccctgagtcctcccgcatctgggttgccggatacattgtgcgtgatccttctccgaacgtgagcaactggcgtgccgaaggcagccttgatgacgacctcgccaagaacggcatcgtcggcttgagccacatcgacacccgcaagctggtgcgtcacctgcgttccgcaggcgtgatgcgcgccggcatcttctccggcgacgccctgaccgaccaggccaccggcgcgctcaagaccatcgagcagctgctcgaagacgtcaagaacacaccgcagatgcagggcctgagcctgtacgacgaagtgtccaccaagcaggcctacaccatcgagccatgcggcgagtacgaaggcaaggagccgctgtacaccgtggccgccgtggacctcggcatcaagggcatgaccccgcaccgcatggccgaacgcggctgccgcgtgcacgtggtgccctccaccatcaccttcgccgaaatcgagaacctgaacccggacggcgtcttcttctccaacggcccgggcgacccggaacaggccggccccgaaatcgagctgctgcgccaggtgctcgacgccggctacccgttcttcggcatctgcttcggcaaccagctgctcggccgcgcgctcggcttcggcacctacaagctcaagttcggccaccgcggcatcaaccagccggtcaaggatctgaccaccggcaaggtcgaggtcaccgcccacaaccacggcttcgcggtcgacgctccgatcggcaggcaggtcgacgcgccgtttgaaaacggcaagtacggcaaggtgttcgtctcccacatcgatctgaacgacgacgtggtcgaaggcctgcagtgcgtggacatccccgcattctccgtgcagtaccacccggaggccgcagcaggcccgcacgatgcggcctacctgttcgaccgtttctgcgaacttatgaagaacaactccaaggaaggtaagtgatatgccgaagcgcaccgacatcaaatccgtgatggtcatcggctccggcccgatcgtgatcggtcaggctgcggagttcgattactcgggcacccaggcatgccgcgtccttcgtgaggaaggcatccgcgtcatcctcgtcaactccaacccggccaccatcatgaccgacccggagatggccgacgccacctacatcgagccgatcgccaccccgatcctcgagcagatcatcgccaaggaacgccccgacgcgcttctgcccaccctgggcggccagaccgcactcaacgccgccatggcgctgggcgaggccggcgtcctgaagaagtacaacgtcgaactgatcggtgcctccctggaagccatcgaccgtggcgaggaccgtgaactgttcaagaaggtcgtcgacgaggccggcgccgaatccgcccgctccgacatcgcccacagcatcgaggaagtcgacaagatcgccgagaagttcggctacccgctggttgtgcgcccgagcttcaccatgggcggcctgggctccggcatcgcccacaacgaggaggagctgcaccgcatcgccggcgccggcatccattactcgcccaccgacgaagtcctgatcgaagagggcatcgagggctggaaggaattcgagctcgagctcatgcgcgaccgcaacgacaacgtcgtggtcgtctgcccgatcgagaacgtcgacccggtcggcgtgcacaccggtgactccatcaccgtggccccctgcttcaccctgaccgaccgcgaataccagaagctgcgtgacatcggcatcgccatcatccgcggcgtgggcgtggacaccggcggctgcaacatccagttcgccgttcatccgaagaccggccgcatcatcgtcatcgagatgaacccgcgcgtctcccgttcctccgcactggcctccaaggccaccggcttcccgatcgccaagatcgccaccaagctggccctcggctacacgctcgacgagattcgcaacgacatcacccagtccacgccggcctcattcgagccgaccatcgactatgtggtcaccaaggtgccgcgcttcgccttcgagaagttcccgggcgccgaccccaccctgaccacctccatgaagtccgtgggcgaagccatggccctggccggcaacttccaggagtccctcggcaaggccatgcgttccatcgacaagcgccacatgggcttcaactgggatggcgagaagccgtccgccgaggaagtggccgaactgcttgaggccatccacaccccgaccgaacaccgttacctgcagctcatgcgcgccatctggggcggcgccacgctggagcaggtgttcgcggccaccaagatcgacccgtggttcctgaagcagatcttcctcatcaacgagaccgccatgacggtgcgcgaggccgagaccctgaccccgaagctgctcaagaaggccaagctcgccggtctgtccgacgtgcaggtggcccacctgcgtggcttgggcgatgaaggcgagaacaccatccgcgagctgcgctggacctacggcctgcgcccggtctacaagaccgtcgacacctgctccgccgagttcgacgccgccacgccgtactactacagctgctacgccgacgaaaccgagctgcgcccgcgcgagcgcgaggccgtgatcatcctcggctccggcccgaatcgcatcggccagggcatcgagttcgactacacgtgcgtgcacgccgtgcaggagcttggcaaggactatgacaccatcatggtcaactgcaacccggagaccgtctccaccgattacgacatgtccgaccgcctctacttcgagccgctcaccttcgaggatgtgctcgaaatctacgaggccgagaagaggatgggcccggtcaagggcgtcatcgtccagctcggcggccagaccccgctgtccttggccgcgcgtctgaaggccgccggcgtgccgattctcggcaccaccccggaatccatcgatctggccgagaaccgcgagctgttcggcgaggtgctcaagaaggcggagatgaacgccccgcgttacggcaccgccctgagcctcgaagaggccatggacgctgcccaccgcatcggatacccggtgctcgtgcgcccgagctacgtgcttggcggccgcggcatggaaatcgtctacgacgacaagcagctcaccaagtacgtggaccgcgcgcttgccgaggccaaggccgataccgtggtctccggccgcctgccctccccgctgctcatcgacaagttcctgcaggacgccatcgaaatcgacgtcgacgcactgttcgacggcgaggaactgtacatcggcggcattatggagcacgtcgaggaggccggcgtccactccggtgacgccgcctgcaccctgcccccgtccaccctgtccgacgaccagatccgccgcctgcgcgaaggcacctacgccatcgccaagggctgccacgtgcagggcctgatcaacgtgcagtacgccttcatggccaacacgctgtatgtgatcgaagccaacccgcgtgcctcccgtaccgtgccgttcgcctccaaggccaccggcgtggcgctggccaaggccgccgcccgcatcatggccggcgaaaccatcgccgaccagcgcgccaacggtctgctgctgcccaagggcgacggcggcgacatccaccccggccagcaggtcgcggtcaaggaatccgtgctgccgttcaagcgcttccgcaccccggtgggcaagaccgtcgacatcctgctcggacctgagatgcgctccaccggcgaggtcatgggcttcgaccgcgacttcccgcacgccttcgccaagagccagctcgccgcctacgatggtggcctgccgacccacggcaacgtgttcatttccgtgaacgacaccgacaagcgtcagttgccgctgctcgccgtgcgcctcgaagagcttggattcaagctctgggccaccgagggcaccgcctccgtgcttcgccgttacggcatcgagtcgaacatcgtggacaagatcagcacccgcgtggacaccgatccggaagccccggtcgaggtgcatcacgccgccggctccgtgggcaagaacgtggttcagctcattgaggaaggcaagatcgacatgatcctcaacacgccgaactcgcgcggctcccgttccgacggctactccatccgtgctgccgctattgcagccgatctgccgcagtttaccaccatcaccgagttccaagccgcactgctggctatcgaggccgtgaagcataatgattatcagatcatgagcattcaggagcattcgaagcagctgttcgaattggagcgacgggagttctgatgactacacccagcagtgaggaattgcaggcacaacgttcggatttcggtctgcgactgagcaattcaatggccaaatacggaccgctgtgtgtgggcattgacccacatcgcaagctcctcaccgactggggatacaacgtcgacgccgaaggcgccgaactcttctccatgcgtatgctgcaggccgccaacgggcgcgccgcagcagtcaaattccagacgtcgatgttcgagcgctacggagccaaaggtttcgaagcgctcgagcgcgtgctctacgcggcacgacaaatgggcgtcatcaccatcgtggactgcctgcacggcggcctgtccaccacgatttccgccatcgcggacgcctatttcaagcccggtgcaccgttgctggccgacgccatcacgctgctgccgtactatggcgcgcgctcgttgaacggcttgattaccgaagcgttggaaaacggacgcggcgtgttcatcgcctccctgacttccaatccggaaggcatgagtctgcagaccgcgttgcgccagagcggcgattacaagggacgtaccgtggcctacggcatcgcctccaccgcgcagaagcataacgtggatatcgaaggcatgggctcggtgggtctgatcatcggtgccaccatcggccaatggatgcaggattccggcgtggacccctccaagttcaccggtccgattctttcccccggttacggttggcagggtgccgaggccaaggatctgaaaaccgtgttccgcggtacgcgcggcaacgtgctggttaccgtgtcccgctttatcgcctcgcatgggccggatatcgccgcactgagccaagctaccgagtcgattgcgcttgacgtacgtcagtcgctgatggaagccacggccgaaggcgcagaaaaccagtaatcagaacggaatcagatgtcgcggcatgcgtacgtatctatctcattgcatacgtcgcatcacgattcatattcttccctgttcgtcggggctgtaacagttaccggtcatctcgccggtgagccgttaccacattggattcataatcgctgcacaccacatcatctccggaggaacccatgactgaaaacacccatgccggccgtctaatcgtcctgactggccctaccgcagtaggtaaaggcactgtggaggccaagctgcgcgccgaccaccccgaagtgtgggtgtccgtttccgccaccacgcgcgccccgcgccccggcgaggttgatggcgtcaactactggttcctcaccgaagacgagttcctggcccgcgaagcggcgggggagttcctggaaaccgccgtggtgcacggcatggcccactacggtacattgctcaagcctgttgaggagcatctggctgccggcatgccaacgattctggaaatcgatttgcagggtgctcgccgcgtcaagcagcgcgccgccgaactcgacttggaagtggtgtacgtgttcatcgcgccgccgagcttcgaagagctcaagcgccgtctgatcggccgcggcaccgaaaccgccgaacagcaggcccgacgcttggaaaccgccaaagtggagctcgccgccgaaagcgaattcgacgtcaccatcgtcaacgaaaccgtcgatcaggccgccgccgacctctggtccgtcatcgccaaagaatacgggctgtaacgtgtgcgaataggttctgttcgtactgagatgtccatgcttggcatggcgtgctcatgtgattatgcgtgttcagtccctgccagtcggccctcacaatagggggagagcctgacggcagggactgattcataccgatacaaagggtcatgcgccaccattgttgcgtcaatcgtttgatgcgaaaatggtggcagaggcggcgattgccgtgttgggggatgaaatctcaggattggcggaattccgaggattctgagttgtggttgtgtgtccccatttgtgcgtcaaccgtttgatatgcaaatgggggcacatgcatgtgtgcgccatcttccaaaaacgtcgaattatgcaaatggggggcacgaataggtgtcggcgtgatgtggtgtggtgcgatgctgcaggtgcggtgtgacatggtgtgggatgccagcggatttcgggtgtttttcctctggcgtcccacagaacctgatgtacggtgtcgtcaccggtttgtgggattggcagaattccaatggttctgtggaatggggtgtgggatgccagccgtgtgcatcgtttgacgtgcgtggcgtcccgcacggttgcgggacgccggccccaaattggccgctaaccgtgtggtatcccgcatttctccgatatgcgagaggaatccgtccactataaggtctctagcccagcgactaatagttttcctctatgtgcgaataatacgggctgtaactaccgctttaccactagctgctggtggagaatttcggtgctgtttctggccggcgcctgcttccaacggattgcttcggattcgtgatgctcggtgacataatgccgcatccattcgaagcactgctgggtctggatggcatcgcttaatgcgcggtgttcctcattgtccgcgatgccgaagcgcacgatcaggtcagccagacggtgatgccgctgcgcggggaacagggcgcggctgatctgcatcgtgtcataatccgcgcaggcaaagccgcagccggcgatatgccgggtgttataatccaggaatcgcagatcgaagctgacgttatgaccgacaatcggctcaacggtgggaccggcagccggggtagcgagccatgcgatgaatcggggaagcacctcgtcaatcggatcgaggtcggccaccatcgcatcggtgatgccggtcagcgtggtgatctgacgcggaatcggccgcaagggattcaccagctgctggaattgatcgacgatatgcccctcccgcacgcgcacggcaccgatttccgtgatggcgcaactgttcgggtaaaagccggtggtctccagatccagcgccacataatcggtgggaaagagggcatcgtccatggcgattcgcccgccggcaccatgattgggctgggatggttggccgaaaacggtaatgccggaagtggtcacggaggctcctcatatcagtcggtgttcggtgacttattgtaccggcagcccggtctgacggtaaaatttttccctcccggattttctcggatatattggttaggcggccggcaacatgcggcgcatcgggaagggagcacagctgatgaaacagatagtggcaggcatcgtggcgcatgtggacgcgggcaagaccacgctgtccgaggcgctgctctaccgtaccggtgagatccgcaaattggggcgagtggatcacggcgatgcgtttctggacaccaattccttggagaaggcgcgaggcatcacgattttcgcgcaccaggcattggtagaacacggcgacctgtgcctgaccttgctggatacgccggggcacgtggacttcgcagccgaaaccgaacgtgtgctgcgtgtgcttgactacgcgattcttgtggtctccggcacggatggcgtgcaaggccataccgagacactatggcgtctgctggccagatacggtgtgccgacgttcatcttcgtcaacaagtgcgacgccgccggatttgcccgcgaggccgtgttggctcagttgcgcaggcgtctgagcgatgcgatatatccgttgccggcaatggaacagtccactgagggcagcgcgctaccgttggacgcgttcgccgaagacatcgccaccctggacgaggaggcgatgaacgactatttggaacatggcgcgctgtccgtgggcagattgcgatcgatgatcgccgtacgcgagctgttccccgtatatttcggctcggcattgaaactcgaaggggtcaaggagttcctggacgggctggagacgttcacccgcgaacgtgaatggccggccgccttcgccgcacgcgtgttcaaaatcgcccacgacggtcagcacaaccgtatgacgtggctgcgcgtcaccggcggtgcgctcaaagccaaggagatcgtctcctcatcctcgtgcgccgcggcgtcgacaccgtcgccagcgcaggaggatgatgacatggcgtggtccgagaaagtcgatcaggtgcgcatctacaatggcgccaaattcgagacggtcaccgaagtgccggccggctcggtatgcgcggtgaccggactgacgcggaccttccccggcgaagggctgggaacggaaccggacgccgaatcgccgtcgttgcaacccgtgttgacctacacggtgttgcccgtcggagcggaatccgatacggccggcacctcgggagcggccaaacgtgggggagccggccatgacagcgtgaatcgggacgatgccgagcatgatgccgccaagtcgggaaccggccgcaatgaggagaacgacaccgccggccagaccgcggcggacaatagctcgccggcccgtccccagttcgatgatctgaccttgcacaaggtcatcaccgcattgcgtgagctggaagacgaagacccgttgttgcatgtggtgtgggtggaacggctggccgagattcatgtgcaattgatgggcgctgtccagctggaaatcatccagcagaccctgcacgaccggttcggtctggatgtgtcctttggccccggctccatcctgtaccgtgagaccatcactgcgccgatcgaaggcgcaggtcatttcgagccgctccgtcattatgccgaagcacatatcctgctggaaccaggggagccgggcagcggagtcactgtggcctcggccctgtccgaaaatgatttggaccgcaattggcaacggctgattctgacccacctgaccgagcgtgagcatctcggtgtgctcgttggcgcaccgctcaccgatatcaagatgactttggtggccggccgcgcgcatctgaagcacaccgaaggcggcgacttccgtcaagccacgtaccgggcgattcgccaagggctgatggaagccagggcaggagtcagtggccggcccgagacgccggtcgagagccggccggacaccacaggggagggcaactgccgactgctggaaccgtggtaccggttccggctcgaagtgcccgcagacatgatcggccgtgccatgagcgacatccagcgcatggccggcagcttcgaatccccggtcaccgatgacgaatacgccgtgatcgaaggcgaggcgccggtgtccgaaatgcgcgactatgcgatggacgtgaaccagtacacgcacggccatggccgtttctccgccaccttcggcggctacaagccatgccatgacgccgaacaggtcatcgcagccgccgcctacgatcccgaagctgatctggacaacacccccgactcggtcttctgcgcccacggtgccggctaccccgtcaaatggtacaaagtccccgaattcgcccacgtagactacgtcatgtgaggtggtgactaccaaatctgcgaccgaatgaatccgttggcctccaagaaccgttgaatatcgcgcatttccggcatattgatcgaatgggccatgcccggatacacttgttcggtcaacgtgccgtgctcgcgccagaactcacccatcgccgtcacatcggctttcgggaagatgtcgtccgcagcaccatgcccgtagaacacgggcggcttcaacgaagccaattcggcatcgcccgcaacggaccccggtgccagccatccagagcaggagacggctgcggcatatcgcttcggattgaaacgcagcagatgcgcggccaagaggccgccctgcgagaatcccatggcaaccaccggccgagtggcgggaatatgctccgcaacccatgcatcaatggcttgggcggcctcagccgcctgcttgtccaatgattcgccctccggcacaccttcatgcgcccacgcaccgaaccatgtatatcccatgccataggcgatgggtgcctgcaaactggcataatcagccgaaccggcaccgcaatagttcagcagatcgggcaaatcgtattcattggaaccccagccgtgcaacagcacgaacaccggggtggtttcaggaccggtcaaacgggtcaaggccttggcaatcttcatggctcccagtgtatccaccgtttaggcgacaatattgccctgatgttcgcccatcgagtaacgtcccataagtaatgcatatagcgcagcggccatgccacgtgttctgatactctacgatgacacggcaagggggccgtggcaggtatgttcggcccccgaaatcgtacatgggcggctaagaccgtttatgcgcaggagaagaaacgagaagcaaaggaaggagcgcgcccgatgacattcgattggtcgttcgtgcagcgttacgcgcctttcttcgtcaatggcacattgatgaccttattcatatccgtgtttggcatactgcttgccgtcgcggtgggtctggtctgcgctggcgtggaaatcgcgcgtatcccggtcgcccggcaaatcgtaagaatctatatcgaactcagccgcaatacgccattgctggtacagctgtactttctgtacttcggcctgcccaaactcggcgtagtatggtccgccgaaacctgcgcgatagtcggcctcggattcctgggtggttcctacatggccgaggcgatgcgcggcggattggaagcggtgcccaacgtgcagcgcgaaaccgcatacgtactggggctgacctccacgcaaaccatcacccgagtcattctgccgcaggcggtgtccaccgccattccaggcgtagtggccaatgtgatcttcctgttcaaggaatcgagcgtcgtctccgccattgcgctcgccgacgtgatgtatatggccaaagatctgatcggcatgtactacagcacctatgagtcgctgttcatgctgattgtggcgtatctggtgattctgctgccgatttccatctttggcacatggctggagaggagattcgattatggacggcgctgaaatactgctccagccgggcgtattcccacgtctgttgcaaggcctatgggtcaccgtgtggatagccggcgtatccgtaggcgcgtccatcccggtcggcctgttggtgggctggctgatgacgctgaagaaccccgtgatccgggccgcgatgcgcatctacctcgacttcatccgcattatgcctcagctggcgttgctgttccttgcctactacggttttgctcgatggttcgattggaatctcgatgccaccggtgcctgcgtgctggtgttcatcctgtggggaggcgccgagctgggcgatctggtgcgtggcgcattgcagtcgattcccaaagtgcagtacgaatcgagctacgtactggggttgagcccgtggcaggctttctcccgggtgattctgccgcaggcagttcgccgtatgctgccggcatccgtgaacttggcgacacgtatcgtcaaaacaacatcgttggccgtgctgctcggtgtggtcgaggtcatcaaggtcggccagcagattatcgacgcgaaccgattccaattcccgaccggaaccttgtggatttatggcgtgattttctttatgtacttcatcgtgtgctggccgctgtccattgtggcccgccgactggaaaagaggtggtcgaatgactgaacccgaaacgacctgcaagggtttcgaggtggatcatctgatcaaacagtatgcgaatgccgacaagccggtgctggacgacatctccttcaaggtggagcatggttcggtgctcgtggtgctgggtccttccggctcgggcaagtcgacgctgctgcgcaccatcgccggtctggaaccgattcagggcggcacgatttccatcaacgatcaggtgatcgataccggaaaacccggcacggaacgagccggacgatccgaccggtccagtgaactgcgcactcgtatcggcatggtgttccaaagctacgatttgttcccgaac

SEQ ID NO: 1135 - DNA, 29486 bp, Unknown
  R81_24m  MAG No. k141_5266
cgtcatcattatcggttctggtcccgctggctacacggccgccatctatcttggccgtgcaggtcttaatcctgttatggtcactggtgcgttgtcgccaggtggacagttggtcaacaccactgaggtggagaacttccccggattcccggaaggtattcttggcccggatcttatggatcgcatgaaggaacaggccaagcgcttcggtacaacctatatcacagacgatgtctcttccattgaggcgtgtgagagtgattcggtcaagccgacctatcgtgtaacgctctccgatgactcccagttggaggcatcagcactcatcatcgccacagggtcgtcattccgtaagcttggggtgcccggcgaacaggagctgtccggacatggcgtctcgtactgcgccacctgcgatggcttcttcttcaggaacaagcctatcgtggtcgtaggcggtggcgattcggcttttgaagaggcattattcctgacccggttcggttcttcggtcaccttgattcaccgacgcgatagcttccgtgcctcgcagatcatggtggaccgagccaaagccaatccgaccatcaccctgctgaccaacacagtggtgacctccattaccggcacctcctcccccacacagaacaccggtgcacctattgccattcctggcttgacaatcaaacgaccggctgtggcaccggccagtgtcagcagcattgccgtacgtaacgtggtgaccggagaagaaagcacgctggacaccaacgccgtattcgtggctatcggccatacgccagccactgattttgcagctggtgttgtggaccgtgacaatgatgggtatgtcgtggtgcagggtgccagcacggtgaccagtgcgccaggcatctttgctgcaggcgattgcgtggatcgtacttatcgtcaggcaatcagcgcagcgggcatgggctgccgtgcagcgctggatgcgcaggcctatcttacggactgattgcggcgacctgctgatggcttgctgttctgactgctgcctgtgacataggagcagcgctaggtcagtgttacagcatgccgcccttggatagtacgcaccggtcaaaggcatagaaaggcccctcaggcgacggagaatcacgatgtgtgatttgtcatcctccagactgaggggtttttattgcgacaggggctacaacgcaggcatacgcccctgccaggaatcacgcagaggctataacgtcttgcgcgtacaacgcactgcacagcaataatgccggcgacaacacgaatgttcttatcgtgttacacccatttggaatcggcatcgccttggctcggcaccagcagctgcaggatgcgatccatatcctctggtgacgagaagacgatttcgatgcgaccatgcttggtgctgcccttaatcgacaccttggtgtcgaaatgattttccaaactctgctggatggcggaaccaacccaaggattggtcttggacgtcttgggcttcttcggctgctcccccgacgcaatcttcatggcgacgatttcttcggtgctgcgtacagaaagaccttccgcaataatacgagaagccagcttgtccatttcctccggatcgctcaggcccaatagcgcacgcgcatgaccggacgatagcacaccggcagccactctcttttgcacagaggccggcaggttcagcagtcgcaaggtattggcgatttgcgggcgagacttggacaccgacttggacagttgtacttgtgtcaacccgaactcttcaatcatctgctggtaggcagccgcctcttccagcggattcaatgccacacggtgcaggttttccagcaatgcatcgcggagcatatcatcatccgcagtggttttgacgatggcgggaatcgtctccaacccagccaactgagaagcacgccaacggcgttcacccataatgagctcatacgggctgtccaaatgaccggcaaacggatttgtgctggattccgtctcgtcgtgcttggcggctttggccgcagcaatctggcttgccggacgcttgcgcacgactatcggttgcagcacaccaacttccttaatggaagcagacagctcattcaactcatcctcgtcgaagatggtacgaggctgatgtgcattgggcccgatatcagacagtttgagttcagccagataaccaccggctaccggcttgagttcgtccttcttatctgtgtcagcggtctttgccgccgatgcagtctgagatgtttcacgtgaaacatctttgacggtgacggatgtacgatgtgccgtctgagacgcagacggcttgccgccctgctgaggtgcggcgaccttaccggtttgaggtttctccgtaccgaaaaacaggtcgctaggatgagtaatggtgtccaatgcgggcatggatgcgcgtttaccggcggctttcttggctgctttgctggacgataccatctgaggcgcggcaggctttgattcctgctgggcagtagccttcttggcgggggttatgtcagcagtggccgccggagtagacgaatcctcctcaatcattgcgggctgctccgccactggctcctcccctggcaatgtggggaacaaagcgccaaggcccttaccgagtcgtgattttgatgccattacttgttcctcctcgcatcaatggtgtcaaggacttgttgcgaacgctgtgcgatttccaaagctgcttcaccatacgatatggcacctatgccacgaggatcataggcaatcaccgattgggagaaactcggcgcttcggagatcttgactgaacgcgggatggtggtattcagcacaatgctgggatagtgtcccttgacctcgttatatacttcacggctcaatagcgttcggcgatcgaacattgtgacgagcatggtggacaccagcagtactggattgaaatgctcctgcaccaaaccaatcgtgttgatcagctggccaagaccctccaatgcgtaatactcagcctggataggaatcagcatctcggtcactgcacacatggcgttgatgaccaagaggcccaagctgggcgggcaatcaatgaacacgtaatcatagtgtttatctgattgacgcaggtagaggtccaaggcctccttcaacaatgtgtttcggttgggcagatcagccacttccaactcggcaccgctgagatcgattgatgcaggcacaacatcaagtgtgggaaaatcaggacagaccgtgataacatcacccagatcggaacgcccctcgataacgtcatagaccgagggctctcccgatgcatgagatacacccaacgccgtagaggcattgccctgcgggtccatatcgatgaccaacacctgcgcgcccttgttcgccagcgccgcagcggtgtttaccgtggatgtggttttacccactccccccttctggttggccacggcaatacgacgggtacgttgaggtttggggaaatcggttttcttgagtacatcgtagcgtgagctttcatcagccatctggctgccaagcactgaaccgtgaccatcgaatattcgctgaagcgtttcggaagccgattctataggttccgactgatgatccttggtggacatcgctcctccttgcacagacgtaagttccagtgttctcattcgtatggacatgatgctcgttatccacaattgcgatatgcaatgtggataagtgtggataagtgtgaatgacgttgagtgttagattatgtatttgcagacgaaaaacattgaaaaatcagtgttttcatcattctgcacatcgtcccgtaaaaatgtggataacttatacgcacatatggaaatgtggataactcaatcagtactccactcatcgcttatccacaatcaccacgtgggtaggctcaagatccggtccgacagccgcctcaacgacgcgtggacgacgaccaccgaattttgcaatctccttgccagccttgtcgatttcagcctgagcagaccgtcccttcagtgcgatcaactgtcctgacggtttcagcaacggcaacgtccagccagagagtttggtcataggagcaaccgcacgacacgtgacaacagcgaacggatgaatttcccgcttccgtacctgctggatgacggcatcggagcgtccacggataatctcaacgttctgcagttgcatcaggtcaacacattcatgcaaccattcgattcgccgctccatcggttcaatcagcgtgaagtcatgatcaggcaaacacgcggcagccaccaatccaggaaaaccaccaccactgccgacgtcggcaactgttttgaagcgaataccattcgtcacattccgaacgtacggcacaatcgcagcggaattcagaatatgccgttcccaaatgatatcgacgtcacgggggccgatcaatccacgaggttcaccctcttcggcaatcttggcatggaaacgctccaacttcggcaacgcatcacccaagacctcagcaagtacaggtgacccctgcagctgatccgtcatagccatctccctcaccatgtttcacgtgaaacaatcaacatggaaaaggcgtcgctcattacgacgccattctccctacggtcactcttgtttgtttagagacgacatccgttgaacgtccttgtcatctcaaaaactcgtcgacctattactcctgatcaagctcgtcgtcttcggcaacatcctcgattttgttcttgagatacaccgtcacgtaacgatgaggctcctcaccgtgcgagcgagacttcagcccctcttcccgaaccacatcgtgaacgactttacgttcgaaggaattcatcggcttcaaatcatacggctcgccggaatccttcactgcgtcaatggcatccagggcgatatcacggaggtgctgacgcttgcgcttcaggaaaccgtcgacatccacaatcagatgagaacgctcgccggtcttctgctgtacagccagacgagtcaattgctgcagagcatcaacgacttcaccattatggccaataagatgtttgatgtcggtatcgtcatcagcaacgatttgcacggtggggcggtcattacgcacgcccatctcaatgtcgccctcatagtcggcgatatccagtaggccttcaaggtaatccgcggcgatgtcagcctcttcgttgagctgatcgatcgacttcacgtcatcctgtgccatacgctactccttcatgtcgtgtttgaattccaagtctaagccctgctcccccgaacagagaaagtaatgtcggtgcgtgttgaatgtttcacgtgaaacatcgaacgcgcaccgacatggtcgtcacttctttttgcgcttacgcacgggctgttgacgctgatagccctgagtggccttacgctcagcctcttccttggccttggccaatgcttcttcttccagagagggcaggccggcctttgcgcggcgagcattctcattacgatgatcgcgcttctccttgtccgccgcagccggagagccaggggtcgggaatgcatacacctgccacagcgtacggcacaagttgcaaacgttgttggtcagccagtacaccaacacggcgaacgggaaggaaacacccgagaagatgtacatcaccgggaagagccacagcatggccttctgcatggtctcggtctgcttgttcatcgaagcagctgccatgttgcgcttcatgttgatgtactgaatgagccacaagcagaagcacatcaggaacacgaagataccgatgaccaccttgcctgcagtagatgcgcgggtgaagttatcggtcacactgacaatgccgaacacatcggtttgggtgaattgcttggcggttgctacgtcgaacgcgcccaacgcatcgcgtttaccgttggcaatgtatggaatggccgacagcgtatagaacatggacatgaacaccgggccctgaatgagcataggcaagcaggagccagccggattggcgtcattgtcttgatacagtttcatggtttcacgactcatggcttccttggacgcctgatccgtcttacctttgtacttgttctgaatgcgctgcatcttcggtgccaatgcctgcatcttgcgcatcgacttcatctgcttgtagaacagcgggaagatacaagcctgcaccaccagcaccaggatgataatggcaagcacccatgagacaccaatcgggctcatgcccagcatcgcgaagaagtcatgcacgatcttcatgatccaggtctgcaaccactcaacgggagtcaggattttatatagaaatccccaaaacccgctatcaagcagaaattcatttgagttcatcgttgggcctctctttgggttgtggccaatggtgtcagtcggggctcttcatgagccttcgaccacgaaaacctgtaaaaaacggaataccgttgtggaacatcgtcgattcccccacgactccacggccggcaacgcagtaatctcagcatggcgagcactccccctttgaacgcaccataccgttccaatgcctcaatggcataattcgagcacgttggataatacttacaacaaggcggtgtgtttgccgagatgtgctgttgataccagcgcaccccaccaatcatcaccgccttgaaagaagctgtcatgcctcagccaccttatgcgccactgtggcaaaagccttcgcgatctgctgatctagcgaagcgaacgatgcggtcgcggcactgggcttggcgcgcaaaacgatatcgcaatgcgcgggcagcagatcctcatgggctctggccaatacacgaaacctacgcttcaccgtattacgggtgaccgcatgtcctaccgatttggagacagctaatcccaaacggcgatgcaccgtccggtcgtcatcatcatgatggtcgtcgggcaccaaatagtgcacgacgatatccttgccacctgctttgcgccggcgtttcagcacggtgacgaaatcacgatggctttgaagccgctccacctcgactatgcctgtggcactgatcggaatgatcaggcggagagggacttgcggcccttggcacggcgacggttgatcaccgcacggccagaacgggtgcgcatgcgcaggcggaagccgtgcttcatgtggcgacgacggttgttcggctggaacgtcctcttcataatccattgctcctaggtctattcggcaacgcttcgcgctgccctcacgtgagtcaagctataccaaagtactctcacccctaccctcaagtcaaaacggacggagtattttcacatttcgacacgttgcgagacacgcctcaaatctcttataatcggcggaataccaaccattcacggccaaaagttatccacaaattacatgtctgttattcacaatccagttatttcaacacgcgacacggtggataacttgtctaaaccagagtaaatattatctgttgtacagatttcgccacaccgatagaaggggccaccatggttaacgcttccggcgaccccgtaatcgaggccgcccacatctggtcagacacgctgacggtgctcaaacacagcgcttcgctcagcccacgagaaaaaggctggttggaaggcgttgttcctgaaggcgtcttcggttcgaccatcgtgctgtgtgtggacaacaacgatacgcttcaagccattcagggtgatttgaacgattccctgcttcaggcattgcgtacggtaaccggcgaaaatatgtttcccgcgttcaaggtcgtgccgaaaaccgagcccgaaccgctttcggcggcaaagccggcgcagccatatccttcggaaatttctccgaccgtcgccgagttcggtaaagaatcctatggtgcaaagccggtagccgcaccgcgggaaccgatgcccgccaccgagtcgcagttcccggtcggtcagcagaagatgaatcgcgatcccgagactcatctcaataagaacttcacgtttgattccttcgtgcccggcgattccaaccgttttgcccgtacggtcgcactggccgtggccgaaggttccggtcaggatttcaacccgttgtgtatctatggcggatcgggcctgggcaaaacccacttgctgaacgccatcggcaactatgcactggtcaaggatcccgggctaaaggttcgatacgtcacgtctgaggaattcacgaacgaattcatcgacgcgctgcaaaacccgaaccaaagccagggtcagattgctgaattcaaccgtcgataccgacaggttgatgtgttgcttattgacgatatccagttcctcggcggcaaggaagccaccttggatcagttcttccatacgttcaatgcactgcatcaggcaaataagcgtattgtcattgcttccgatgtggcacccaagaatttgaagggtttcgaggctcgactcatctcgcgcttcgaatccggcctgaccgtagacgtcaagccgccggatctggagacccgaatcgcaattcttcgtatgatcgcctcgatgaacggttcgaaaatccccagcgatgtgttggacctcatcgccgaacgcttcaccgagaacattcgcgaacttgagggcgcgcttacccgtgttacggccgtggcctcgctgagtaatcagccggtgacccgcgccttggccgagcagacgttgcaggacttcttcaccaccgatgtggaaatcaagcccacggacatcatcagtcaggtggcgaagtacttccacctgacgtttgaggatcttgtcggtaaatcacgaaccaaaaacgtggctgttcctcgtcagatcgccatgtatctggctcgcgaaatgaccagtatgagcctgatggatattggccaggtctttggcgggcgcgatcacaccacagtaatgcatgcctgcactcgaatcagtgaccgaatgcagcaaaaacaggagatctataactacgttatggagctcacggttcgcctcaagcaaagcaacaccaactgacacaacgcttctgagagacgaaaaacggcacttttcggactgactttccgaaaagtgccgtttttggttgctcaggcggattctggtggatacgtcgaggcaacggattcgagacatcagattcctcatggctcccctttgtgaggagagctgtcgtcgcagacgactgaggggagtttcgaaggggaacacgcaaaaaacccatgaaacgagagaatcgattctgaggaccgattttgcgggtttgggcgagcgagacgaaaaaagtgccgaaaacggtctccagaatcgattctcctcgacgaaaaacagccttcaacacgccgtgcgaaagtacgaaaaccaaaaaagttatccacacagttgtgcacagatgtgggtaaactcggcggataactcgtggattacccactgttttgttgtggaaaactcgtgcataactgcgacctcgatgtggaaaacccaaattcgacgaactggctgtggaaaactcgcccacttatccacaagccatgcagaatttgtccacaattttcggggacttatgaaccgttgcatttgtagggctcaaccctacttatccacactatccaccggccttattatggcgattacttactcagttacgtgaaaagcatcatcgccacagtaacagccagtcacccatcgtacgtaagttcgccacctaacggctagaatatttctcagccaatccgacgaagggaacaatcacacatgaaagtcgaaatcgatactgcagccctggccgacgccgtagcctggacctcccgagtcatcgacgcacgtccctccaacccgattctcgctggcgtcaagctggaagccattgacggaacgctgcaattctccgccttcaactacgagatttccgctcgccaccacatcgaagccggcgttgacgaagccggttccgtactggttcagggcaagctgctggccgatatcaccaaatcgctgcgttcggagaaaacgtacctggtcaccgacggctccacgctgaccatcacgtccggcaagtcgaagttcaccttgcagctcatgcccgacaccgagtacccggatctgcctgtggtaccggccatgctcggccaagtcgatgccccgactttcgttcaggcagtgaaccaggcatgcgttgccgtctcccgcgaagaaaaccgcccggtactgaccggcgttcgcatgcaattccaaggcgacaaggtcgtcatgacctccaccgatcgcttccgtttggcccgcgccaccttcacttggactccgcagaacccggacgtcgacaccaccacgctggttcgcggctccctgctcaaggatgtggcccgtgctcttgacgagcaccagaacatccgccttgatttcgatgccgatagcccgacgctgctcggcttcgaaaacgccggccgcgtctccacctcccagctcatcgacggtgaattcccggcggtcgaccgcctgttcgccgacgaatacccgattcaggccgtagtcaacaagcaggatctgctcgacgccatcagccgtgtggctttggtcgccgaacgcaatgctccgattcgcatgaccttcaccggtcaggaagtggcgctgtccgccggatcggtcgacgaggcccaggccaacgaaacactggacatcgacatggatggcgacgacatcaccgtggcattcaacccgtcctacctgaaggagggtctgtccgccgtgaccgaaccattcgtgcgcatcaagatgacgaccccggtcaagccggtcgagttcaacggccagcaggaagctgattccgacgagtccatggactaccgatacctgctcgtgccgatgcgcttcaacaactgagatccctgaatttccaacgattcgctaatgcacatctcccgtctcgcactcgaccactaccgctcatggagtcaagtagtggtcgatttcgtaccaggcgtgaatatcctgttcggcaagaatggcttgggcaaaactaatctggtggaagccgtcgaagtgctgtccaccggatcgagtcatcgcacgtccagcacgttgccgctgatcgaacgcgggcagaccacggccaccatccgcgcgaacgtcgctgatgatgccggtcaaaccactacgtatgaagcgtcgattcatgcgcgtggtgccaaccgagcccgcatcaactcggggtcgtcgctgtatctgcgcgatatcatcggcaagattcccagcgtttccttcactcccgaagatcagcgattggtgtccggcgatccgggagcacgccgcgtcatgatgaatcaggctgcggctctgctcgagcccggatacatgcagacgttgcaacagttcacgcgcatcgccaaacagcgtgccacattgttgaagcaattgaatgccaatgccaacaatggacagccgatggatgcggttctgagcggtttggaaatctggaccggccagttcatcgaagccggtgtggcgttgacccgtatgcgcgctcatgtgatcggtctgcttgccgagccatttgccgcgatttacgccgacttggccggtgccggcgagcaggtgacgctcacatatgcgccttcattcgacgaagtgctgatgttcgacgatccacatccgcagatcagcgagcattttcaacgcatctaccccggtgaaatggctcgcggcgtgaaccttatcggtccgcagcgcgatgacatgaaccttgagttggccggtattcccgcccgcgagttcgcttcgaacggcgagatgtggacgatggcgttggccttgaaaatggcattgtttgaaatcgtgcgtgaccggttgggattgcagccgattgtgattctcgatgatgtgttcgcccagcttgacgacagccggcgcacgcagattcttgatttcgccagaaaacaggatcaggtgctgattaccgtggccgctgaaggcgatgtgcccgactatgaatcggcccatcgtatcgacgtggccacactggccgaacccgcttccgtaatactgccaactctgggcaatttgtccgattcgcgggaaaacgagagtttgggtaagtatgacggaaaacccgcggtggacagcgcgtccgtagaacggaaagtgtcatgaacccgccgatcgcccgccaactcaacctggacgagaccaaactgccggccgaaatattcgagcggctctcccgtcgcggggcgaccttgaaggactacagacgccgccgtgaagaggccatcgaaaacttcggcaaaccggggcgcgatccggctgaactgggcagcgtgatgaccaccatcgccggcaatggcgtctgggcggcgaatatgaaacttgcgcaattgcgcaaccattgggaccaagtggtggggcaggccatcgccagccattcggcagtcgccgatttcacggacggcgtactgaccatccgtgccgaatccacggtctgggccacgcagctgacctaccttatcccccaacttaccgataccatccgtcgcaatctcaaaggattgaccatcgccgagattcgcgtgaccggaccggccgccggatacacgcgcaaatgggctcggcggcggtagccaagataccaaacaaattcgcagaagcctcgctatggcgctcgtcgggttagacgagtaaaatcacatgcagtatggtcaaatggccagaagagccctttacgggcctcgtaagccatatcgcctccgtgaatgaccttcatgacggaggttgaccctgtagtcacggaaggaagcctgttggcagacgaaaccagcaaagaggagcagctgaaggcggctgcggaacgcatcaacaatgcggaattgaccgaaggcgaacttgacgaatccatggcccccgagcattatgaggcctccgatctgagggtgctcgaaggactcgaggccgtgcgtatccgccccggtatgtacatcggttccaccggcccgcgcggtttgcaccacctggtctatgagatcgtcgataactcggtcgacgaggcgctggccggatacgccagccatatcgaggtcaccattctgccggacaacggcatccgcgtggtggacgatggtcgaggcatcccggtcgatgaggtgcccggcgagggcgtctccggtgtggagaccgtgatgaccaagctgcacgccggtggcaagttcggcggcggcggttatgcagtgtccggcggtctgcacggcgtgggtatctccgtggtcaacgcactctccacccgcgtggacatcgaagtgcgccgtcagggcttccactggacccagacgtacatcgaccagcaccccaccgcgcccttgaagcagggcgagccgatgaccgaaggcgagtccaccggtacgtccgtgactttctgggccgacccgaagatcttcgagaccaccatctacgacttcgagacgctgcgttcccgtttccagcagatggccttcctgaacaagggcctcaagatcagcctgaccgacgagcgtgagaatgaccaggccggcgacgaggtggccggcgacgccgcggacgagcccggcgcaaagcaccagaccgtcacctaccagtacctcaacggcatcaaggactatgtcgactacctggtcaaggtgcgcaaggccacgccggtggaagaggacgtcatcagcttcgaggccgaagacctgaagctcggcatctccgccgaactcgccatgcagtggaccaccgcctactccgaggccgtgcacaccttcgcgaacacgatttccaccaccgagggcggcactcacgaggagggcttccgcgccgcgctgacctcgctggtcaaccgttacgcgcgtgacaagggcatcctcaaggacaaggacgagaacctctccggcgacgacgtgcgtgaaggcctgaccgccgtgatctccgtcaagctcaccaacccgcagttcgaaggccagaccaagaccaagctcggcaactccgaggccaagaccttcgtgcagcgcgtgatgaccgacaagctcggcgactggttcgacgcccacccggccgaggccaagaacatcatccagaaggccatcgaggcctcccgcgcccgtctggccgccaagaaagcccgcgagaacacccgccgcaagtccatcttcgagtccgccggcatgcccgacaagctcaaggactgccagtcctccaacccggaagagtgcgagctgttcatcgtggagtgcgattccgcaggcggctccgccatccagggccgcaacccgatcacgcaggccatcctgccgctgcgaggcaagatcctcaacaccgagcgcgccagcctggaccgcatgatgaagtccgacaccatcgaatcgctgatcaccgcggtcggcggcggctatggcgaggacttcgacatctccaaggtccgctaccacaaggtcatcatcatggccgatgccgatgtggacggtgcgcatatcgccaccctgaacctgacgctgttcttccgctacatgcgcccgatgatcaccgccggctacgtgtacgtggccatgccgccgctgtaccgcctgaagtggaccaagggcccgcacgacttcgtgtacaccgacgccgagcgcgaccgcgtgctcgccgaaggcaaggccaacggacgccagctgcccaagggcgaaggcatccagcgctacaagggtctgggcgagatgagctaccaggagctatgggagaccaccatggaccccgagcaccgcattctgaagcaggtgcacatcgaggacgccgccgcggctgacgagaccttctcgatgctgatgggcgatgaggtcgaaccccgccgcctcttcatccagcgcaacgccaagaacgtgcgttggatcgatgcgtaacggaatcctccaacctccctcgtcagagggaggtacacaacggacttagacaactaaaggaacaacagtggcagatgaaaacaacaccggcgacgagcagttcacgccggacggctcgatggagccgttgagcccgcaggaggcggacaccaccgactacggcctgatggacaccggcgaacgcatccagcgcaaggacctgcagcaggagatgcgcgagtcctatctggcgtatgccctctccgtgatcgtcgagcgtgccctgccggacgtgcgcgacggcatgaagcccgtgcatcgccgtgtgatctacgcgatgtacgacggcggctaccgccccgatcgcggctacaacaagtgctcccgcgtggtcggcgacgtgatgggtaagtaccacccgcacggcgattccgccatctacggcaccttggtgcgtatggcccagtcctggtcgatgcgcaacatgctcgtcgacggccagggcaacttcggctcccccggcgatgacccggccgccgccatgcgttacaccgaatgccgcatggccccgctggccatggaaatggtgcgcgacatcgacaaggacaccgtcgacttcgtgcccaactacgacggcaagacccaggagccgaccgtgctgccggcccgcttcccgaacctgctcgtcaacggttccgccggcatcgccgtcggcatggccaccaacatcccgccgcataacatgcgcgaggtggcggacggcgtccactgggcgctcgaccacccggacgccagccgcgaggaactgctggaaaacctgatccgcatcatcaagggaccggacttccccaccggcgccaccatcctcggccacaagggcatcgaacaggcctaccgcaccggccgtggcctgatcaccatgcgtgccgtggtcaacactgaggagatcaacggccgtatgtgcctggtggtcaccgaactgccctaccaggtcaacccggaccgcctcgtcgtctccattcgtgaggccgtgcgcgacggcaagatccagggcattgccgacatgcgcgacgagacctccggccgcaccggccagcgcctcgtgctggtcttgaagcgcgacgccgtgccgaaggtggtcctgaacaacctgtacaagcactcccagctgcagcagaccttcggtgccaacatgctggccctggtcgacggcgtgccgcgcacgctgagcctggacgccttcatccgccactgggtgaaccaccagctcgacgtaatcgcccgccgcaccgcgtacctgaagcgcgaggccgaagagcgcgaccacatcctgcagggctatctcaaggccctcgacatgctggacgaggtcatcgccctcatccgcgcctccgaagacaccgacaccgcccgtacgggccttatggggctgctggacatcgaccaggtgcaggcggacgccatcctggccatgcagctgcgcacgctgacccgcatgaaccgcgacaagatcgtggccgagcatgaggaattgcagcgcaagatcgccgactacatcgacatcctcgccaagccggaacgccagcgcaagatcatcggcgatgagctcgacgagatcgtggccaagtacggcgacgaccgccgcaccaagatcctgccgttctccggcgagatgaacgtcgaggacctgatcgccgaagagaacgtggtggtcaccgtgacccactccggcttcatcaagcgcaccaaggccgacgaataccgcgcccagcaccgcggcggcaagggtatcaagggcaccaagctgcgcgaggacgacgtggtggatcacttcttcctgacctccacgcacaattggctgctgttcttcacgaacaagggccgcgtctaccgcatcaaggcctacgagctgcccgagggttcgcgcgactccaagggccagcacgtggccaacctgctgcagttcgcgcccgacgagaccatccagaccgtgctgtccatcccgaactacgaggtggccaagtacctggtgctcgccacccgttccggcaaggtcaagaagaccccgctggccgagtacgattccccgcgccaaggcggcctgatcgccgtgcgcctcatggccgacgagaatggcgagaacgccgacgagctcatcggtgccgcgctgtgcaacgccgaggatgacatcatcctggtctccaagctcggcatgagcctcaagttccaggccgacgacgagcagctgcgtccgatgggccgccagaccgccggcgtgcagggcatgaagttccgtaacgacgacagcctgctggccatggatgtggtccctggcgactccgacaaggacctgttcgtggtgaccaacgagggcttcgccaagcgcaccgccatcagcgaataccgtctgcagggccgtaacggcttgggcatcaaggccgtgcaactggtcgagggccgtggtgccctggtcggcgcgctcgtggtgtccgaagacgatcaggtcatggccatcatgaagtccggcaaggtgattcgttccaacgtggacgaggtcaagcgcaccgggcgcaacacccagggtgttaccttcgccaagcctgacaagggcgacacgattctctccatcgcccgtaacgaggagaaggacgagcccgaggacagtggcgatgccgcggcgaacggcaccgccgagaccgcacaatccggcgagaatgtgaacaacgcggacgaggcgtgagcagcgtcctgaaaagctggtagcctcgcatacagcagaggctaccgccaagcctgttaaggagaaacgatgagcgagaatctcgaagacaacgagccccggatcataccgccggcagtcggcaatacgcagaacgatcatgtcgagccgctgatcggtactgagcacgctccccgcgtggcacgctccgtgtccagcgatccggaagaatccacgttgccttcttcaggtgccgccactcccgtgcgtccggcacctcgccgtagcgcccccagggctcgccgcatgagcttgtcgctgacccgcgtggatgcttggtccgtggccaaggtgacgttcatgctgtccatcgccgtggcgattattcaggtcgttgcctccgcgatcgtatgggtgctgcttgatgtggtcggtgtattcagccagattacgcagattgtgtcttccaccggtcttgatgcaggcggtttcgatctcaagaacgtgttgtcccttaccaccgtggtctccggcgtcaccatcttctcgattgttgaagtggtgatcttcaccctgctggccaccattgcggcactgatctacaacgtggtcagctcgctggtcggcggcgtgcacgtcacgctcggcgacgactgatatagctatactggcagaactcccctcagtgaaccgcaccccggttgttggactgaagtaattcagattcgatgatcggaggtgcggtttcttatgtgtggggttcgtaggcgtcgttgctgggccgagacttgggactccggcgacgctgggggtggcaggcgtcggtgttgggacagattttgtatctctgacgacgctgtggagggcttaccgtcgtcagtggtacagatcttggagttctgccgatgctgagggtgtgttctgtgtcgtttgcgtccaattcttggccctctgccgacgctgggcacagcaagcgtcgttgctgggccaagttttggactgccgccgacgcagagaatgcacacagcggtgttggtctgccagcgtgtggcagcttggcgccgttgaggaaggtctatgtggtgtggttccgccaaaggactggcaggttggcgctactgaggggactttatgggctcttccggttttggcatgtaggggccgtgcggtttcattcactttttcaatcacacaccgaatcaaaccgcacggcccctacgcaccaaaatgcgaagagccggtttcgctaactagtgcctatatgcctgcaatcaggctgatttgtgctgtcaggctggctggcgtcagcggttgatctgccgatgttgctgctcgtcagtctggactgttgggctttcgttttgacagcggaaggaagatcctcctcgcggtagggcaacaattatcagtatcataattaaggtaatcgtgattacattaaccatgatactcttattattgggcggtaggcggatcggagggctgcaatgtttgtcgcacgagagcacgagttacaagtgctggaaaagctgtttaccagcgattcgttcgaaatggtggtgctgtacggtagacggcgtgtagggaaaacggcgttgatcgacgaatttgtcaaagataaacgcgtgctgtacttcacggccatacagcaaagcgccaagatgaatcttgaagatttctcaagagcggcattgtcgttctttggtatgccggattccaccccgtcgtttggcgggtggtctgatgcgttatcgtttgttgctgaacgtgctgcacagactgacgaacgtatggtgttcgtattcgatgagttcccttatgcagctgccgccgagccagcattaccctccatgttgcagatagcaattgaccatggattcctcgccacaaaagtgacgatgattctatccggtagtaacgagggattcatggaaaacgacgtattggggcgtaaaagcccgctatacgggcgtcgtacagcacagattcgactcctgccattcgactatgcggatgcggcaaaatttctaacgaacacatctccgcaagaactggtccaatactatgcgactttcggcggtacgccatattatctggcccgtatacaggaagccgatggctttgaatccaatgtgctgcgcttgatgttcgacaacttgggcgtactgcgtgaggaacctatgatgctgttgcgtcaggagcttcgtgaaccggcatcgtattattcgatattgcaatctattgcgggtggtaattcctcgccaaagcttatcgctgaacatgcgggtgtcggatctgattcgattggagcatatctgaaaacgctggtcgatttgcgcttaattgagcgaaaagtgccgtttggtgaagatccgagtaaatcgcgcaagggaatgtatgtggtgagcgatcccttctttgcatattggttccgctttgtggggcgcaacatgagcattttggatggtaatatcagcgaggaggttacgagcagactcgcttttggaccagcgtttgatacctatgttggtcaacaatttgagacgatttgcctgcaatggcttattcgaaacaacgctatgggcaacctcccctttgttgccactcagttcggcaaatggtggggcaatgatccgattgctcacgagcaaaccgatatcgatgtgattgctgcggattcgctcgataaaacgattctgttcggtgaatgcaaatggcgtaattcattcaacgaaacggaggctattgaaaagctccatcagcgtgctggcttagtccgcggctatcaggcaggtaatgcgtggcttatgctgttcaccaagaatccggtgagtgagtccacgcgaacccgctacatggatgatgaacgaatggtattcgtttccgcggaagagttatacactgcgtgatacattactgggtgattgtgacgcggtatctagagtcctgccgacagccacgtggcaattacgccgaatcacgcaccaccaaatcggtgttcaggtgcatcacgcgcggtgaagagactccgttgatggctttgatgaccacgtcggccatggtccagcgcgctgatccatgtgctgatcgacggtggtgagttccggggttatggaggtggaagctaagttgttatcgggcttacgtatttggggatagcacttgttgctcgttgtacatatagcaatgcccttgcctcctcacgggaagcaagggcattacgctactgcttagtactgctcagaggcaagcgtcacagcacgccctgggcaaccatggcgttggcgaccttgacgaagccggcggcgttggcgccgagcatcaggtcaccctcgtgaccgtattccttggcggcggccagggagttggcgacgatctcttccatgatggacttgagcttggcgtcgacctcttcgaaggtccaagacagacggtagctgttctggctcatctccaggccggagacggccacgccaccggcgttggcagccttggccgggccgtacagcacgccgttcttctggtagacctcgatggcctccggggtggacggcatgttcgcaccctcgacgaccacggtcacgccgttgtccacgagcttctgtgcggattcgccatcaacctcgttctgggtggcgcacggcagagcgatgtcgcccttgacggtccacacgcccttgctgccctcgtggtactcggagcccggaacgcgctcggcatattccttgatgcggccgcgctcgacttccttgatctgcttgacgacctcgacgttgatgccgttcgggtcgtagatgtagccgttggagtcggagacggtgacgaccttggcgcccagctgctcagccttctgagcggcgtaggtggccacgttgccggagccggagatcacgacggtcttgccctcgaaggagtcgttgcgcagcacgcgcagggcttcctgggtgtagtagcacacgccgtaaccggtggcctcggtgcgggccagggagccgccgaattccagacccttaccggtcaggacgccggagtactcgtcgcggatgcgcttgtactgaccgaacaggtagccgatctcacggccaccgacgttgatgtcgccggcgggaacgtcggtgaactggccgatgtggcggctcagctcggtcatgaaggcctggcagaagcgcatgacctcggcgtcggacttgcccttcgggttgaagtcggagccacccttgccgccgcccatcggcagcgtggtcagggagttcttgagaatctgctcgaagccaaggaacttgacgacggactcggtcacggtcgggtggaagcgcaggccgcccttgtacgggccaatggcggagttgaactggatgcggtagccgcggttcacctgaaccttgccctcgtcgtcaacccaggccacgcggaacttgatggtgcgctccggctcgacgatgcgctccagtacaccggccttctcgtactccgggtgcttctcgacaaccggctgcagggtctcgaagacctcgcgaacggcctgcaggaactccggctgatcgccgtcacgggcaacgacctggtcgtagacacgcttgatgtactcgtcagtgagcatgattctcctcgatttggtagggaattaagacggttttattctatgcgcgcaggcccttgctgcatagagtctcgctcggataacgggaaagctttcggcgtggttatggagtggctcaagtttccgtttgttagatttttcgggcgattgttggatgtctgtctatgcgtgaatcgggtcgaaatggaagccgcatcacaccggaggcacgttcatatagtggacataaaggcggacttgggtgatgtcagatgtgtctgttggggatcgtgcggtctgtggggtttgtggggtgtggctggaccgtggggtcgtatggtttttgtgacctgtggggtttgtggggtgtgtggccgcaggtcttcggcgcgcaggttaccgggttcgcggtcagtgtgcgaagtaggtctgcagaatcatcgtggtctcggtgcttaccggcaccgtgcggtggatgagattgagcagttcttcaagtgcggtaggggaagccacgcgcaccaccagcacgaaactgggggcgccggccaccgaatagcaggagacgatgccgtcgatattgttcagcttgtccgggatcgaggattcggctgagtagtcgagcggggtcacgttgacgaacgcgctgatgggcaagccgcgctgctcttggtcgatgatggccttgtatcccttgatgatgccgcgcttctccagcttctgcacgcgcgactgggcggcggagactgacagtccggtcgcctgggccagttgcgcgagcgtggcgcggccgtcggcctccagcatggtgaggatgcgctggtcggtctcgtcaatcgcggtcatgatgtcttctccgttcgttgtgctctgtgttcactgtacctgttgccggaatgcgatggctttccgattttgcctggtaatttcagtagttcttcctgtgttttctgttgtgtggtggaatgtttacgtttaaagtcctaattggatgtaataattccttttgaaataagagaacgatgaaataattccattgaggagggatgatatgcagaagttttccaacatgtctctgtccgaagttgcatctgctgctgtgcctgctactatgcctgctgccggtcgggttgctgtgccgaccgccgagcccgcgagcctgtccgccgaagccctgaatatcccgcgctccggcatccgagacgtattcgaccgtgtagagcgcgtgcctgacgcgatttcactgaccgtgggggagcccagcaccacggccgcgccgcatatcgtggcagccgcttgcgaggccgcacaggctggccgcactcggtacaccaacgtgcttggcatccccgaataccgcaaggccgtggccgattactccgcctgtgtgaagggacttacttatgatcccgaaaccgagattcaagccgttgacggtgccacgattggcctgtttctggcgctgaaagccgtggtgggcaccggcgatgaagtgattattccctcgccgttcttcacttcctatgacgccgaagtgatgctgtgcggcggccgcccggtcaccgtggcgctgcgtccggagcacggcatgcgcgtgaacgcggcggacatcgaagcggcgatcaccccgcgcacccgcgccgtaatcatcaactcaccgggcaatccgaccggcgcggtaacctctgccgccgaactggcgcgtattgccgaagtatgcaagcagcacaatatttgggccatctccgacgaggtttaccatccgttcgtgtttggggaaacgttcggggaaacgcttgggggagaggcagccgtggcaccatcgatcgccgcggtgccgggcatgaaagagcgcaccattgtggtggaaagcctgtcgaaaacctatgcgatgaccggctggcgcatcggctacctgctggcacccgaagcggtcatcgaacagaccggcaaaatcgccgaactcatgcactcctcggtgaactccttggcgcaatacgcaggcgtggcagcactggctggcccgcaagataacgtggccgccatgcgcgaggaataccgcgccaagcgccagatcgtgctggacggtctggccggatgcacggtattgcgtctgatcgaaccgcaaggcgcgttctacgcctttgtggacgtacgcctgactggccttgactccggtgaattcgcagaccgtctgctggacgaagagcgcgtggctgtggtccccggcgaggccttcggcgaggaggggcgcggcttcgtgcgcctctcctacgccggagatgccgacgagctgtgcgagggcgtcgcccgtctgcgcgcattcgccgaacgggtatggaaccccatcaccggccaccacaccgccacctatcaccccatggaggtgctggcctgaggcttaaagcgaggctaggccgccattcggcctcgtcggcgcgagcgatggcctgcttcttggctcgcagcaagatgtagccgagtaccagaacgttggccagagctcgatgttggcatcgcgtcaaaacaaccgcattaaggctgccgcgtctcgtatcgttacgcgtaggggctggctgaggcgtaatgctgaagagtaacattgaagcgatggcaatcaaaccgatttgagggagaggggcacacgatggcgtactgcggccactgcggaaatagagttgatgggccggcacgattttgcccggcatgtggagcgtctgtagacagcgcaccagttgcgacggcaccagtaccggccgcatcgccagccgtaccgcctgcgtcgataccggcacctgctgtgccggcgtctgcggtaccaccatcgataccagccgcgccggttgccccatcggtttacgccgcgtccgctgccccacagccggcaccaaccgttcccctgccggctttgccgattcccgctcctgccgcatatcaggcgactgatgcaaccgccgtcctggcaccgcagcgcaaatccagcaagaagctgatcgccgctttctgcgcattgcttgcgacgattctggtggcggccttggcgttcatcatccccaacttcaccgccgtcaaagcgatgctgggcttccggcccaccaatccgctggtcgtcaccttcgacgcgatcaactcgctgtccactctgcgcagcaccaaatacgaactcagaacccacagcagcactgacgattctcttgacgcgcggatgtctggcatgtattcgctgggcaaaaccaccaacgaatcctccgcgtccttcactagcaaaacagacgaatatgcaacgaccttcgcttggtacaaaggcgcattcgccgggaaatccgtttggcatgacgacgacccctactacatctactacccggccgaccaatatgaagatgacttaaggaacggcgttggtagtgatgtggcggacttgatattgaacgtcaaggatgcgttggtcaagaacggtgcttgggacatcaccggcgcggagcaaacgttctacgatcagctggacaagatgaacgacgatgggtactcgaacgacatcgaccgggccaagggcacgaaaacgtctgccgaggtgaaggccgaggccagcaaattcatccaacaatatttcggcgtggagctggaagataagaatgtgcgcagccagctgttcccgaatacatcgtctgccaagtctgccggcaatacgcagctgtcgtaccaaatcgatatcaaagcgttgtctcagcatttcgtgaattactggatcagtcatgaagcgcagtatccgcatctgaaatcctgggtgattcagcaaatcgaggatgccggcgtggacgatgctgaagatgagtaccgtcaggcgctcgataatgtgcgcaactgggatttcggcacggatgaagagccggagatgccgactatcaccgtggatctgaactacggcagaaagcgtctgatgaattcgattgccataagcgtgtccggcaaggacgaatacggcgactcctataatggctcgctatcgttgacgctcagtcagcagaacgcggtgtctgtggacgaccccgatttgactgatatggtgagcaaagccaaggacaacaacggactggatttgtcctgaatatggtgcgtgggatgttgcggcggcgctaatttcctcggtgggctatcacgcactcttcccgcttgcagcggtctgctcgctgattggcgcggtgctgatcgtcttcatcaagtcagtgaagtaaacatacttattcatccctcttccttccataacaaacgagcggaggggttgggccattgttttgcggtgtgtccagtctctccgctcgtttatttgcttgattctgtggaatggaaggggcatgctctatgtcaaataagataatgcggaagggctgttctgcgtgcatatatcttgctgaacgtatttgagggtactttctggttaaagacacgccctatggtgggcagaatgctgccgttgtgtctggcgtcggtcgcaggacatgttgtatcatgagggcacaagcttaattcagccgtcctcaatctgattagtcgtcgggtcggattggcgtgatcggcttgcagggaatcatccggctcttccggttttggtgtgtagaggggatgcttataggtgggcttgtatggtgtgtctgaagccgccggtgtggaggaggctgcgggtgacgtagttgtcgaggttgcggaagccgagggcgatgccgcgtagggtctcgggcctgccgttgatggcctcggtgggaccgttggcggtgccgtgggcgcggtcgtcggatcgatcgtccccggtgccggcaccgtggtcggcgcatttgtcggaacggcgattggcactggagccggatggctgataagtagcggcttagacgcactttacgacaatcaggtgcacagaggcggtggagatgacccgggcagtcatttcaaggataatctcgggttttggaagtgggggtatctgttggcgttgttcactcggtatgtgttggtggggcgtcttgaggacggggcgcaggtgttctgggacacgctggagaagacgccggtcaagcgcaagctggatttcggcggcgattccggctgggcgcgggctggcgcggcggccggcggcgctgccgccgcggctgcgcccggcctgatggtcatgatccacggcatcgcccggctgctcaccccggacacgaagacgcaccacacgcataccgatgacgtgacgctgctggcttttctcagaccggtcactatatcccgcgacgcatggaacacgtacgtggcggtcgccgtgatgtggctggccggactcctcctgtactggggtttctgccggctcgtgttcggccggccgaacacctacgtccccgcctcgctggaggacttggcattcgcctcctccgtgcccgccacgaagctgcgctacatgttcggcggccccatcgtcggcacgctgttcctcatcgcgatatcgggcttccccatagcgatgacatggatgttctggtcgagcgcgcaatgggtcgacaccggcagatccacacctgactggattggatggttggctttcttctgggcgttcctcgccacatgctccccgattctgttggccttgcgtttcgtcggaccgtgggactggcggggacgtttcagcccgcgcgcgggcgccgaacgctggagccggctgaaatgagcacactgctgatgggggccgggatgggcctcatggtcgcaatctcgctcgcattcatcctcgcgttcaacatgtcccggctccgctggctcatggaccacgacatccacccgctgctcgaggagcacggactgcgcgaacccgacgacgggttcacgtcctccggcgccaaggagcgcatggccgcgttccactcggacgtcgcggaggcgctggcagcgccggaacgggaacgcgaagcgagggaacggcgacgattcactgtgttcgacccgacggtcgacaagttgccgctgccggcgggcccctacccgttcgaccgtccgacggcgtcctgggcacgcgacatctacgaggaaggcgattgggcgtacgccgacgcatgggtcagggggcggaggaagccacgcgtggtgcgcgagcaacgctacgactcgtggcgcaacgaagtcctcgcccgccacggcctgaccgacgcgccatccgccacgctcaaacacatcgaacacgccgctgcacgcatccgcaccctccaccacaccagcccagccgaagcctacaaacaagcctgcaaggaagccaccggcaacacggtcaacgacgaaaccaccggagaaggaaaagaaaacggctcttccggttttggcgtgacccgcagcctcctccacaccggcggcttcagacacaccatacaagcccacctataagcatccccctacacaccaaaactggaagagccaattatctgccggtaccttccacccgagaggaaggtgtagtcctccgggtccgggcgatatcgccgcaaggcgaaggattttcgtgtaccgttccgtgaagacggagcgacaatgaccacgcggttggtctgaatcctcgaggggtggtccttaacaggaccacccctttttcgatggagagggccatggcggactgggagaatccctcgaacaagaacgcaaaaaccctcagaatcggtattattccaagggttgtctgtggagctagccgggttcgaaccggcgaccctctgcttgcaaagcagatgcgctaccagctgcgctatagccccgtgagaaaaaaagagcggctcgcagccgcttcattttttctgtgggcccgggaggacttgaacctccgacctcatccttatcagggatgcgctctaaccagctgagctacgggcccgatccatacgcttcaaaagcgcacaagtaattacaataccattgaacggcggtatgtcaataacggcgtgtcgtgattgtcgcttgcgccatgattgccggctcgacggtcaatgtccagcaacgccacagccaatgcccagctacgtaaccttgcgttctcacaccgtaatgctgcggttacacctccctctctgcgcagaaatgtccaatacatatgaggcttctgctgttttcgtgggttgggttcttggttgtggtgggcgtatgtcgagtccgccgcggcgaagcatgacgagggcgatgggattgttcgcgtggtggaagccgtaggccatgcggatggtgaccttgatcctgttgtcggacgcctcgagcctggcgtttgaacagcccaattcgattgtcccgaggatgtcgggcccatga

SEQ ID NO: 1136 - DNA, 30672 bp, Unknown
  R81_24m  MAG No. k141_5291
ccctcaaaaaacctcacccctcatcaaaccctcccgggtacccgaccaccacgacaggcaatcaggcgaggaatgaactggcaatcattgactataaagaagtagtacaaacacgctcttgagttctcaaaccaccaccacaccagcaagacaggaaaccaaccagaagaaggaacccgccgcgctgagcggcaacaggtgaataacttacacgcaaccacgccacaacgcaaatcaaagcgcacaagaacccaaggaatcggcataacagcgcggttccttcggcgtgtcgcacagagcccaatttgctctgatagggctagcgtaacccctcgaatgtttccggaaaacatcgaatccattattcggctggcgtgtcgcacgagttttcggactgtcagctccatgttcatcgttcggcaaccacaccaccggcgcacaatcaatgcatggcaacaacgctccatcatcggatttcgttcatgaatcacgggtatacctgtagttatgaccaagaagattgctgtattaaccggggcgggcatttccacgtccgctggcatccctgatttccgcggtccagacggtgtgtggaccaagcatcctgaccaaatgagcgtttacgacatcgatctgtttctgcgtaacaaagaagaccgtgagtactcctggcgctggcagaaggaatcaccagtatggaacgcacagcccggcaccgcgcataaggcgctggtcaagctggaacaagccggcatgctgacgctgctggccacgcagaacttcgatgcgctgcatgagaaggccggcaacagcgacagcgtcatcgtgaacctgcacggcaccatcggcacctcgcattgcatgaagtgccatcaggaatatgccacggcggacatcatggcccgtttggatgaagaacccgatccacattgccatcgcaaactgaagtatcgcggcgatatgccatgcaatggcattatcaaaactgatgtggtgtatttcggtgaggcactgccggacggagcgatggagaagtcgtacagcttggccaccaaagccgacgaactatgggtaatcggatcgacccttgaggtgtacccggcagcgagcattgtgccggtggccgcgcaggcgggcgtgcccatcaccatcatgaatatgggtcacacgcaatatgaccatcttgcgagccgcttgattcatgaggatatcgccgtcgcgctgccgaagttggtggacgagacgattgcggagaacaagtagtcctcagcataacgaaagcgccggtgggtggttaagcaactgatgattgttggttaaccacccaccggcgctttcgcgccacctcccgctagcgggaggtattggagcacacttctgcgcggcctcccgccagcggtattggaatcagtagatgcgcttgggctggaatccagcttccctgagtgccgcgaggatgcggtcgatgtgctcggggccgttggtctcgaccgtgacgccgagagacaccgcgttggtgtagtggccggatgccttgaactggtcgtggtcaagctgaatgacgttggcgcgctgctcggcaagcagggtggccaccttgacgagctggcccggagtatccggcagctcgacctcgaagttcatgatgcgaccgcgggcgatcatacctttctgaatcaccgcacccatggtcacggtgtcgatattgccgccggacataatcggcaccaccacgtgcgggccggtggcggcggcgaacttgcgcgaacgcaggttcaggtgttccagcgcggccagcgagacggcgccggccgcctcgaccaccagcttgtgcttctcgagcatgagcagaatcatttcgttgatgtcgcgctcggtgacggtgaccagatcgtccaggaactcgttgatcagagcgaagggcaggtcgccggggtgcttgaccgcaacaccttcggcggaggtaaccacatggtcagctggagacacacgacccgcggccagcgagtccttccaggccggggagccctccggaatcgcaccgattacgcgcacttcaggcttgaatgtcttgatggcgagcgccacaccggcacccagaccaccaccaccgagcggcacgaccacgtcagtgacgttcggcacgtcttcgaggatctccagaccgatggtgccttggccgcagatgacttcataatcgtcgaacggcggcacgtaaatcatgccttccttgtcggcgagctcagcagcgtgggcggcggattcgtcgaacacatcgccgtacagcaccacatcggcgccgtaggccttggtggcatcgaccttcagcggcggggtgatctgcggcatgcagatggtggccttcgcaccacgctcacgggccgcataggccacgccctgggcatggttgcctgcggatgcggtgacgatgccacgggcgatctgctcttcggtgagcgatgcgatcttgttgtacgcgccgcgaatcttgaaggaaccggtgacctgcaggttttccggcttcaggagaatctcatgaccggtcatctcgctcaataccggcgaagggataatttccgtatgacgggcagtccctttgagacgtttggcggccagcttcagttcggctgcatgatcacgctgcagcgccttcaaaacatccttttgttccatagctttccattgtatggcgcggggacaccgaaaacagtggcttatctcgctaacgagcgctcatttacggtaattcccgttcgtaatcagctttcgaggggctgatttggcttcgcggggaggtctatctcctcttcgaggggctgcccgatcgtgcaatgcgtgagtatgacacatcatttgcagcggtattatgcggttttcggagcccggctattcaggcaccaaccccttgaaacggagatagacctccccgcgaagccaaatcagccccttgaaatggagataccgcctagcaacacttataggctgacgacgacgccctcccatggtgcaagctcacggccggcaagagcggccacagcgtgcgcggcgtcatacgtgctgatcaccacgttcgactcggcaaggccatcggccactgccaacagttcggcggattcgcgaggcaaatcaacggttcggccggacatgttgaccacgaccagcagcttctcatcgccgagggtgcgggtgaaggcgtagacatgcgcgtcatccgcatcgagcagatgccagtcgccggccgccacgacaggcatgtcgtggcgcagcgcgatgagctgcttgtagaaggcatacaccgaatccggatcgtcgaattcgccggccgcgttgatcgccgcatggttgggattgacggagatccatggctccttagcggcatccggcgcagtgaaaccggcatagacagagccgtcccattgcatcggggtacgcgaattatcacgaccgcgcgcggcgatacccgccaacatcgattcgggcgactgcactttggcttcctcaaccctttgacggtaagcgttcagggactcgaggtcacggtactggtctaggcgcgtgaagtgggcgtcggtcatgcctagctcttcgccctgatatatgtacggggtgccgcgatgcatgtgcagcatcaggccaagtgccttggccgaacgcacacgagattcctccgaggagtcatcaccccaacgagaaacgacgcgaggctggtcgtggttaccagtaaacaggcttgcccagcctgcattcttcacggccgcttgataaccggccataatgctcttgagcttcggcaggtcaagtggcagtggcttccatttgacgccttcgcagtcaaaatcaacgtgctcgaataggaagagcatgtccagctcgccgttggcggggtcggtgatgtattcgttgcgctgtgcggtaacgccgggagcctcgcccacggtgaggaagccctcacggccttcgaacacttcacggcgcatttcggccaggaattcgtcttggcgagggccgtccgcgcagaacggattcgggttggaatagccttcctcacccacgggcagatcgtccagctcggaaccgtactcgccgggcagcttgccagacaggtccgtgcgcttggaaatcagcgtaatcacatccatgcggaagccgtcaacgccgcggtcaagccaccagttcatcatgtcgtataccgcgcggcgcacagccggattttcccagttgaggtccggctgcttcttcgagaactgatgcaggtagtattcgccacgctcagggcaatactcccatgcagaaccgccaaagtaggagccccactggttgggctcggcaccgggctcgccggcagtggtgccgggacgggcgggacgccaccaataccagtcggcgtgctcatcatccttgtttttggacgcttcaaaccaggcgtgttcatcggaagtgtgattgacaacaagatccatcacgatcttgagcccgcgcttgtgggcctcggccagcagctcatccatgtcgtcgagtgtgccgaacagaggatcaatgtcctgatagtcggaaatatcgtagccattgtcgtcttgcggagacttgtataccggggatagccacagcacatccacgccgaggtcggccagatagtcgagccgtgacgtaatgcccttgagatcgccgaggccgtcgccgttggtgtcttggaaggaacgcgggtaaatctggtaaacgaccgcattggaccaccacggatttggggtggcaccgttggtgcggatggaatctggaattactgtgcgttgtgaagtggtcatcgttggctcctccattatttatggtctacattgcctgttgctcatagtctaaaaagcgctgaattacatttccattggggaactgcgttggtgtgccggaaacaaaaaccgcaaagagccggaaggcactgctacggctcaattctcataagctgcacatgctatttagcaacatatgggccctttcgctgtttgtggtgggtgactgtgccgtggggtgatgttggtcgggtaggttggaggcatggatgcctctcacctgttcaccgccgcgcttcggctgcggtcgccttggagggtcgggtctgcggacttccgtgacgccgacggcgacgggcgggagccgcacatcacgatcggcttcgagcccggcagagggttcatgctcctgttcgaggcgtgggtgtggctatatcgcctgtgctcgtggatgatgcactcgaggctcgaacctatgaaggagctcgcccgcttgttccgccgccataatctacctgacctgcggcagctcacatattaacggttcttctgattgcgacgcgcaagagcaacttcgagcgcgcttggattgcctgcttgaacccactggtgcggggatagatgatttagttgacacgcctgcgggaatctggtggggatttcgctggcacaccggatttcaagcaaaccccgcctcgggaaccgctccggacttcggcgttggcccggttcgtatgtcaatcgattgccgtctgaaccgggacagaatccgctgtcccggttcgcgatttttgtccttttttacaaacagggacaagccaatctccgcagttcatatgctccgtaatacaaaatcggcggaatagagccgatcccggaatcaacatgttgtcccggttttcacataaaacgattgacagtcataccgggacaatgaaaattgtcccggttcgcgcgtcaaacggttgatatgtggaccgggacaagccagtggcacggcgacacagcagatgcgctcaattgcaccgtaagccgtacggtttcgtcactttttcattcgcacaacgagcaaaaccacatgacctttgtgcgccaccgccacatcaaccgaccgtcgcctttattgtggcggtttccagtatggcaacaggacagaaaagcctcctccggtgagagccggaggaggcttgggtggaagcggacctttacttcacagagtcctgcaattcaggactggcctacggccagacccaacatgacctcgcgagtacgcgacctatccggccgcccgggccgggaaacagcccacggggctgtttccttaatcggctcgtctcgctcgacgcggtgaagtaaagcagcgcctgcgctgttttacttgaccgctcccctcatcacaccaccgacgacccacttttgggcgaagatgtagacgatgaggatcggggccatggccatcaggtagctggagaaggccatcgggtagttggtggcgaactgcgagctgaagacgtactgggcgagcgggatggtctggttcgactggtcggtcaggatgatcaacggcaggaggaagtcgttccaggcccacagtgcggtcaggatggcgatggtggcgttaatcgggctcatcagcgggaagatgatggtccagaaaatgcgccacgtggatgcgccatcgattcgggccgcctcttccagcgaaaccggaatcgaacggatgaagccagtggcgatgaacaggttcgtgcccaggccgagcaccgtgtacaggatgatcaggccgacctggttgtccaggtgcagggagcccatctgcttcgcaatcggcagcatgacgaccgggaacggcacgaacatggcggcgatgaagaagtagtacaggaagcggaagaagcgcttatccatgttgcgggccacagcgtaggccacgaaggtgttggtcagcaaggtgagcaccacggcggccaccgtgatgatcgcggagttgagcgcggccttcgggtagttgaccttggcggaggcgtcggcgaagttgtgccactgccacgaggtgggcagggcgaaggtgccggcttcggccggagtcttcagcgcggtgacgatggtgaagtagagcgggatcagaatggtcaggctcagcacggccacggcggcggtcagccaccagttgatcttgtggtccctgcggaacttggcgggcttgccggacttggacggggtaactgttgcagtagtcatttcttatcctcccctaaatcagatctgttcctggctgcgggagatgcgcagctgtacgaaggcgatgatcgccagcacgatgaagaagagcacggcgtttgcggtctggtaggcgtactcgccaccggtcaggccacccttccagatgaggtaggtgacggtttcggtggaggagttcggaccgccctcggtcaaggcgacgacctgatcgaaggtgccgagcgcgttcttcatggacagcacgaggttgatggtgaagaacggtccgatcagcgggaatgtgatcttccagaacttctgccaggcgttgacgccgtcgatggcggcggcctcgtagatttcgtcgtcgatggtctgcaggccggcgaggtagatgagtaccgagtaggcgatgccctgccagacggcgaggaagacgattgggatccagctgagttgctcattggtcaacagcgaggtggacagccacttgatgcccagcgccttgccgagctcgggcagcgggttcatgaagatgtacttgaacacgtagccgatgaccagcacggagagggtgtaggggatgaagaagacggctcggaagccattcttgaaggcgatcttcgagttcagcagcaccgacaggaacagggcgatcacattaatcagcaccgtgatgagaatggcgatgaggaacgtgaacaggtaggcgtggcccacgcggttgtcttggaagagggcgatgtagttcttcaggccgatgaacttgtaatcgccgtagccctgcgagttggtgaaggaatactttacgccgtcaagaaatggcaggtacaggaagaaggcgaaaatgatagccgccggaaccaccatccagtagtaggcggggtccaccttgcgggtggagaaggcggagaccttcttcttggccggtttcttggcagcggtcttggttgcggttgcgtgtgacatgatgttctcctctcctaccgatcactcgaaggtcctggcttggaccttgtcccattcggtctgcatctggttcaggaaacggtcggtgttgccggaggtcaccatggtctgcaggtagccgccgatgttgatggacgaaggaatgtagtggtcgcagaagtcggccagtcggttttcctcgaagaacgggcgcacggtttccagcgcatcgttgccgaagtaggtgtccttcagcggcgtgatggcggactgggcgtcggcgtaggcgtcaagctgatccttctgcatgaggaactcgacgagcttcatcgcttccttggggtgcttggtgttcgcaccgatggtgagcatcacgtcgtcgccggcggtgaggatctgctcgctggcgtcatcggtggccggcatctgggcgaaaccaagttcgatatcggggttgatcagcaggatctgcgggatggcgtaggtgccgagcgggatgatcgcggccttgccttgggcgaagttctgcgtgccctgctggtaggtgacgccggtgtccgcagtggagtaggtgaagagctcggattccttctcgactgcggtcttccacagttcctggaacgtggtcttgccttgcttgagctcggtgtacttcgattcgggaaccagcgtgccggccagggaggcgagcggtgcctgggtggtccaggcgtcggccacggaaccctgcagcgggttgatgccggcgtccttgaaggtgttgagcatatcggtgaactcgctccaggtggtcggcggattctccgggtcaaggccaaccttgcggaacagagccttgttgtagatgtagccggaggcgttacccgcgaagggcaggccatacaggcgcttcttggaggaatcggtggtctgcaccagattcttggcgatctgcaccatgccggggttgagggtgtccacaatgggttcatcggtgaagtcgtagaacacaccggaggcggcgaagttgccgaagctgatgtcgccgttgaaggtgatcacgtccggcacacgattcttgacgaaacgggtgcgcagatcggtctgggcgttggcggagttgttgatgttgaccttgatggtcgggttctgcttctcaaagtcggcgaccatggacttgaactggtcggcggcctcggacttgaactggaagaaatccagcgtgacggtgcctgcggtgctggagccgcagcctgccaggccgaacccgacggcgatcgcgcacatcacggcggcggtgcgcacggccagacgcctcagtctaggcgttgcatgtggggaatcggacagcataattgttgactcctttatctttcttttcctccggcttcggtgccggcggttcttccactttccaaggtaacggttcggccatttcattcccagcgccagcgagcccacttgcgcaagcaacaaaaagcgcggtattttgtgattaacgcaataaatacagcgaagggggcttgcatgtctgatgtcaacgcgattccacagtggttttccggatccgagcatacgcatcgcgtggcggcggcaattgcccaatacgggccgatagcccgcactacgttggcacagatgctgggactgagccaaggggccttgtcccgcatcaccagcgatctgatctacgccggggtgatcgaggagcttccggccgaggccggcccgtcaggcaagctgcccgagcgattcacgccaagggaaagttcggatcgtcgcggacgcccgcagacttcgctggtgttgtgttcgaacgcacgcaccttcattggtgtcaaggttcatgggatgtcgattgtggccgctgcggtgaacgcgcatggcgaggtggtgtccggccggcacgaggtgccgatcggggcggatcagtcggctgagtatgtggtgtcggccatcacgcggctggtgcgcgaatgttccgccgatatcgcctcttccggactgccctcccccactgcggtgggcgttgcggtaggtgggcatgtggtcgacgattcgattgtgacgttcgcgccgttcctgcattgggacggggccacggacttggggacgatggtcacagaggcgaccggcctgccgtgcggggtgttcaatgatatcgattctctgctggtggatgcctcctggttcgggccgggtgtcggcgtggatatgttcgccgtggtgaccatcggcgtgggtgttggttattcgctggccgtgaacggcaagccagtgcagtacccggataagagctatggtctggtgggccacgtgcttatcgatccggaggggccgcgctgcaccagcggacatatcggctgttcacaatgcttgactgacgattcgatcgccgaacagtactctgcgattgtgggtcgcgcggtcagttttgaggactttgcgcgcgatgccaagggacgcgtgccgcaggccacgcagttggtgaaccggacgtgtttccggttgggttcgctggtggctacggtggcgaacatcgcgatgcccggacatgtgatgattgccggggagtccgcgtttttggccaagctcggcaccgattcgctgcgcgatggcattcgtttctaccgtcacagccagacccagccggtcaagttcacgattatggaccacgactggcagctctgggccaaagccgccgccagtcgcgtaatcgtgaagcatattgggtaggccgttcttggctcccctcagagaggggagccaagaacgttgcttcgccacagttactccgccacgaccagcaattacggacttgcctatcggcaaggctcaatcccaccttcgctcagctgtcgcttcgctcaggccgtggctactgacagcctactaggctgtcagcttaacgccacagccttgagcaatactgcctgctgggggtggagggacgggggacggatgccgtaacgctgcagggcttcgccggtcaggactacgccttcctcgttccaccagccgagagtgctctggccgttggtcagaccggtcaaatccaagctcgggtcgagcgggctgacgcggtaggtgcgctcggggtcaagtccgggcaggtgcacgggcgcggccggataggtctggctggtggtcagctgggtgaagcggtagatggcggcgtcgcggttcggcatcaccatgccatccaagcgcacggccggatcgttggagtcggcgtgcacgcaggtgtcgatggcgaaccagtcgcggtgcttcttgaattcggccacccacacggccagcttggcgagcgcctcgtccggctccttcaacaggttccattcgatgcccatgtggccgaagaacgccatggccatgcgcagttcctggctggtggcacgctgggtggagtgcgcgggactggcacccacgtgctcgcccatcatcgccggcggcaccagcagcgaggtgtagcgctggatgtccgcgcgctcgaccgggtccacgcagtcggagacccagatacggtcagcgtgctctaggatgccgaggtccacgcggccaccgccggaggagcagctttcgatctcaaggcccggatgtgcggtcttgaggcccttgaagatgctgtagacggcgagggtctgcgcgtgcacggccgggcggccggagcggcgggaaccgggctcggtgacgagcttgttgtggtcccacttgatgtagtcgataccaagctcgccgacaagctggtccatgcagccgtagatgtagtcgaacgcatccggattggtcagatcgagcacctgctgagtgcggccctgcagcggcagtcggccggtggtgggcgaaagaatccaatcggggtggttgcgggccacgtcggaatcggggttgaccatttccggctcgaaccacaagccgaattccatacccttggcgtgcacgtagtcggcgagcgccttcagggacttcggaccatcgggccagacgtcctgcgcaatctgccagtcaccgaggccggaggtgtcgtcgcggcgggagccgaaccagccgtcgtccaccacgaatcgttccacgccggagtcggcggccttgtcggcgagcgccttcagcgtatcgaagttgtggtcgaagtacacggcttcccatgtgttgaggatcaccggacggccgtgcgagaacaggcgcgggtgcagggagcgcacgtaggagtggaagcgggcggcgatctcgttgagaccatcgccataggagccgaacagccacggggtgtcgtaggagttctggccttcgccagggccagcgagcgtcacttcgccgccgaacaggagttcgccgccgccgatcacgccggttgtgtagggcagacgttcggcggacagcacggagttaccgctccagcccacgtgcaccgaataggcgtcgccatgctcgaagccgaaaccgggcacgccggcggtcaggagcagggatgcgtcgaagtcagggcggccggcgagctgcggcttttcgaaacggccgacggtcagcggctggcgctgcggactgcgttcacgtagatggtgaccggtggtggtgaggatttcgcaggcggattcgggcagcgggaagccgagctcgatcttgccgatctcgagcggggctccggcgtctgcaccgaacaggttggttacggtggccttctgacggaccaggccgccggggagcagttcgaggtgccactcgacttccacgccctgctcctcatcgcgcgcggtgactatgacgccgggcacgcggaccggaccggtggcacgggcatggccggccacatcggtgtagctttcgccggacacggcatcgagggtggcttccagcacgccgccggtctcgatgttggtcacggtgaacttggggaagagctcgacgccggcgcggcgcagcaccacgcgctgctcgccgatccagctttcggcctgggtgggcaggatagacggccaggcggtgtcgtcgagcgcgccggacacgcgctgcggcttcagggcgtcataggcggccagcagggtgtcgggcttggccagcgggcggccccagtggacgatgtgcggcaggtcgctgccggcaaacaccagaccgatcgccacattggcggcgggctgagtcaggtagacggcggtgagtgcggtgccgtcagcggcggcgccggtgaaagtggaggtgttctcggccatattgtctccttcgacgtgtgtggatttgcattgcactactggtttcgatggtagaagaaatggaatatgttgccttggtgccgcgtgttggttgcgtgaggtaagtaatgcgtccgtgtctatcgccgctgggcgaagaaatcagtcaggatggactgacactcgccttccagcacgccgccgtgcacttcaggactatggccgatatgcggatcgcgcggaatatcccaaatcgaaccgcatgcaccgagcttgggatcccaggcaccgaacgcgatggtgccgatatgggtctggatgcaggcacccgcgcacatcgggcacggctcaagtgtgacggccagcgtgcaatcggcgagattccaagcgcccaaggcttgggccgcctgacgcatggcgatgatttcggcgtgggcaagcgggtcgccatcagcctcacgcgtgttgtatccgcgcccgacaatctggccggccgcatccagcaccaccgcaccaaccggtacgtcaccagcggctgcggcctgaccggccagttccagtgcacagcgcatcgcctcgtcatattccataccaacgagtgtatgcctttttctcatatcgtctcatgatgtgcataatcggccgcaatcttaacgttttcttcatggttcccatatacttttggtggagaaaaaatacgagaaggcggcaacatggcggtatttgagctcatcctatgcatcattgcggcggtggtggtgagctcgtttgccagtcgcttcgtaccgaaggtttccacaccgctggtccagattgtgctgggcgtgctggttacatatctgccgtttttcccggatgcaaagctcgacccggaactgttcatggtgctgtttatcgcgccgctgctgtatctggaagcgcacgaaatcgataagtcggcgttgctgaaaacgctggatctgagcctatcgctggctatcggactggctatcgtcacgatggcggcggtcggattcactttgcatgccgtctggccgtccatcaccttagcctcagccttagcactcggcgcggcactcggcccgaccgatgcggtggccgtcagctccctaggtaaagaagcctcgctgacgcagcgtcagcgcagcgtgctgaaaggcgaatcactcttcaatgacgcttccggcatcgtcggcttccagttcgctctggccgccgccttcactggcgaattcgccgtggggcaggccgccggcgaattcgtgatctccttctttggcggcaccttatttggcctggtgatagcagcagcggccaactggctattcgagaccgtgcgatccctcggttgggaaaccaccaccacacgtattctgatggaactgttcctgcccttcctgctgtatttgggcgcggaggaattcaatgtgtccggcattctgtcggtggtggccgctggcctgttcatccgattcgaccgtaccggcgtggggccgaatgtggcacgtacgaatatcgtttccacttcagtatggggtgtgctgagtttctcgctcaacggtgcggtgttcattctgctgggcatgcagctgccgcgcgccatgagggccagctggtctgacccgtatatcagcaataccgtgctgatcggcattattctgctggtcactctggtggtaatcgcgcttcgattcttctggattgcggccatgctgcgcgttgcgcgagatacaatcaccggccagcgccgcaaaatgacacccgaacgctggcgctcggccgcagtgatgacctttggcggccccaagggaaccatcacgctgtcattgatgtttaccatcccgtattacattgccggcggtgcgccgttcccgatgcgtgacgagctgattttcattgcgtcaggcgtgattatcgtgaccttgctgctggccaacttcctgttaccgctattggccccgaaccgtggcaaggatcccagcgcggaaatgattccggtgaccatcgatgtgttacgcgccacggtggaggaattgaccggacgcatcacgccagagaatcgccgtgcgattctgatggtaatcgaccaatacaccaagcgcatcggacgattgcagcagcgcatcggcgataccgatcctcagggattcgagcaattgcagatcgaagcgctgcattgggaaaaggaattcgtgcgcgaccgacttgccgacactaaggcgcatccggcggcggatacggccacgcaagagctgaacgtcgaagcctgcgagcgcatgcttgaccagattatgaatacgctgcgtcacacttccactgatccgacttcggggcatgcggtatcgcagattcgcggtcgcttacgcatgttccagcggcagatgagcaattacgccaaacgcacggtgtccaagattcgccataccacaccattggtgagcgaggatcagattttcgcgcgcacccgcgaactgcaggtcgaggcgattcatcatgttatcggccggcttattgacgagatgggccaggatacgtacaacaccgagcattgttcggcgctgttgctggattatcgtcgcgctgaggcttcattgcaggcacgtccgaatatgagcggcactacggaaaccatcacgcaggtcgaggacgtaaagcgcgagagctacggtatcgaactcggtgtgattcaggacatgtacgaagccggcgacatcaaccgagcccaagcccgctccctgaggcgcaacatctacgttatgcaggtcgatgccgattccggcatctagtttccttggctcccttctctgaggggagccaagttggggattgctatttccgtatgactctcttcagtatgtgcagtagtgcttgcagtgctcacttcgctcatgggagaacagtctatgaccgcgccggccacaagcgccctcgatgtccgattgctgtgacggccgcgccaattccagtgatggcggctgactacagcacgccagaggtaatgtcgttgtcgagcagccactggcgcaaatcggcgaactcctcaagactcacattgtgatccagaccgtggtagctcttggttttcagccacgtatgctcttccaaccaagcggcggtggcgaacagttcgtatttcgggattacgccatcgttcttgccgtacgtatagaacacggggatatcgtaatcggccaggcgagagtcggcgggggccgtgccgggcacctgaccgggtgtgttgaagccggacagggagacgacggcccggtaccgctcggggttgatgcgcaacaaatgcacggcgaccagtccaccttgcgaaaacccaagcggcaccacgtcacggtcggcgggaatgttgtcggccacccatcggtcgactgctgtggcggcggcatacgcgtcgtagtcacgatcatcgccgataggcagggcatcgtggaaccacgcgtagttgccggggtcgggactgccttcacgggccggcgcgagtgtcagcggcccgcgcaatgccacgaagtcgttatatggagcgatgaggcgcatgatgtccgccatgtcttcttcgctggatccccatccgtgcaggcacaggaacagcggatgcgcggcatgctggtcgaagccgccgcgcgaggtgacgctgtgttccacggtgagtggctcgccaaaacgtccgggcacagtggtggattcgcggccgatcagaggctggctggcattcgcttctttgctcataccaatccaatatagaggtcttgcgcgctgtgcggaaaacgatggaccatgatttcagtcacattgggtaatccgcgccgaatcgccttgggactttccaggggataccggcaatctgtcaggcattaccgttgtttgcggctgcggtgtctgtggctgcggtgattgtctcaagttcgccgccccactgctgctgcagtgcggtcatcttgctgccctcgccgaacaccatccagcgtttgccgttcagcaatcgccaatcgcctttcgtttgctcattatcagcgtattggctcagcagttcggaaatcttgctttcgataggtgcccggctgatggctgcggacgattccgattcaaaggacacgaaggccactctcggatcagtgcacatttgtacggtggtgatgcctggcaaaccgcccgtatcaagcccctgccatccttctttgcacgcgccggcagcttgttctatgccttgctccatctgtgcggtatcttcgacgggtgccttgtcgttcgactgctgaatcagtccttccgggaacaatacgcccatggccacgccgataaccaagcaaactatggcgcacaccagtgcgatgatgccgcccgcgcccactcccccgtgagtggcgtaccgaggcatggtgactcgcgcagcgatgaccagaatcagggtgatgctgataagcaccgccgccgtcaacgcaatgtatcgtcctggcactgccgtcataaaggaaatggcgtaaggcgcgatttcatgaaccgccgaggtggccgataccacgacggctagcagtccgctgacaacggcaagtctgcggcacaatatcgacgttgggctgctggcttttgtagcggcgaatcgccggccggcattccgcctggatgggcgtcgattctgtgcacgacgtgagctgcgcgaatcgtcatactgaccatcgccgaagaaatcgtagtcctcatcgttgcgggccatcggtgcccccttcctgccgattacacagccagtgtaccgctatggcttgggaatggcggtcattcgggggaatgattcagggcaaaaaagaaccccggcggttgcccgccggggagagaaaggagagagaagaagaaagggggttcaattgtcgggaactgctgcggctcctgatcagctttccgctgacatcatttatataaccactgctttctgggtctacctctaagtttctctgagaaaaacctgagaatacttgcgattgatggaccgcggaagcgtgaggagcctctcacgtttccgcccaaggcgctagacttgaaggcagtatttatttgcccaaggagtttttcacatgctgctgtccgatcgcgacattctcgccgcacagtccgcaggtcatatctcacttgatccgtggacccccgaaatggtgcagcccgcctccatcgacgtacgactggatcggtacttccgtttgttcaataaccacgcctacacctatgtcgatccggcggaaaaccagggcgcgctcaccgaacagttcgaggtggatcccgacgaaccgtggattttgcaccccggcgagttcgcactgggttccacgtgggaatacgtcaagttggacccgtccattgccgcccgcttggaaggcaagagctcactgggtcgattgggtattctgacccattcgactgcgggcttcattgaccccggtttcgaggggcatattacgcttgagctgtctaatgtgtcgacgctgccggtcaaactatggcctggcatgaagatcggccagatgtgcttcttccagctgagctcgcccgctgagcacccttatggctccaagggcaccggctcgcattatcagggccagcggggtccgacgccgagccgttcctacgagaatttctaccgcgcgcacatcgacgactgagcgttgcgacgtaccattcggccggcggatgccggccatttgcttaatcccaaggagatgtcatgaccaacagcgatggtgggttccagttcgacttccagcagcacgaaaagccggtcaggccaacggtccctccgattcccgggcaagagacggcagcatatggcgcggagccagcgacacaggccacaccggctctgcagttcccgcagtctgtgcagtctgtgcagccgacgcagtttgcacagcccgcacagccgacgcagcccatcgatccggccatgacgcaaccgttctcgccgcaattcccggctgcggttgccgcacaagcaccacagccggcggcagccacgcagccagtagtatccgaaacaccaatcgccgctgcgcccggccagcagcaatacgtttgggatcagacgacgcaaagcttccatccggtggaaccgacagtgccggtgacgccagccgcaccagcggcaccggcgacatcgcctgtttcggcagcttcaaacgccgcgacacaggcgttccagcccagtcaggccgagcagcctgcggtagatgccgaggcaacacaagcattccggcctgatcaggtcatggcaacacagcttttcgaagctcaggccatgccgaatgccgaaaccgcggccacacaggcattccagcctaattcagctgcggccacacaggcatatggcgcatcatccaccgtatccggtgagaccgttgccatgcctgcaacgcaagtagcgtctgccgatgatgctgcagccacacaggtgttccaaccggccgccctggccgcttcggcacaggctcagcctgctgtgatgcctccctccattccgttggctcaggtctccgatgaggacgattccgatggcgccgagcctcgtcacggcggtagcggcaaaaagaacaccctcaaaatcgtcggcattgccgtagcggtagtcgccgtgatagcgctggttgtcgccggcctgctctggtggcattccaacagcagcaaggcgagccaagccgtggcactggccgagtgcaaggtagcggccaagcagtacacgaatgcgcagaagaagctcaccaccgccatatccaatggccaaaccagcgcgcaaacatccaccagcgatgtggccgatgccaatacgctcaccacgctgaatcaggcgttgcaagacgccggcaatccggctgacaccgccaagtgcgattccagcctcaacgccactgagctgaagtctcacactaaagagctgcagaatgatgccagcgacatggctgacaagacggatgccatcaacaatgcgatcaaggccgttaatacttcaaaggcgacggccgataccgacacactgaaatcgaacctgagctcggctatttcgcaggcgcagggcacactggataattccgcgggcagtgtggccgatgagaacacccgcaccgcgctgcaaaacgccatcaccgaagccaatacggtgatgaacgggaccagtccgtccgaatccgacgtcaacaatgcgatttctagactgcagaaggccgagtccgacatcaccgcctcgatgcaggccaagcagcaggcagatgccgccaagcaagctcaggaagaggctcagcggaaggccgaccaagaggcacagcagaaggccaagcagcaggcgcagcagaagtctcaagacgggtccacctctactgacggcaccgacggcagcaacaactgaggtctgcagcgttctcccgtttcccatggggcggtaacttccccatggggcggttagcacattttcctttttcgcggaataacgccgttttcagcgaccgccccatgaggaaattaccgccccatgggataattaccgccccatgaggagccgtttggatatagcagtgggccgggccctgaataccagagcccggcccactgctatatgcccacaatcagggctattgcgatggcttaacgcttggctatcgcacgtagcacaatcttgcgtagctcggaggcaatcagcacgattgcggccaggcagatgcattccacccaagccatcgggctcaatgccacggtgccgaacggaccgttaaggaacggcacgtaaatcaccacgagctgcagcgccacggacaaaccaatcgcaccccatagccacttgttggagaacagacccacgaatgcggactgcagatgcgaacgggaggccagcgcgttgaacagctgggcaaacaccagaatcgtgaagcccatcgtacgggcctcggtcatctgcgcttcatggccgatggcatccaccgagcggtcggtgaacaagccgccggataggtgcatgtccataccaatcagcgtgacgatggccataatgacgccgacgaagatgatgtcgccccacatggaggcgtcaatcacgcggtccgtcaccttacgcggtttacgacccatcacatcgtcggtctgcgggtccacgcccatagccaacgccggcgcggcatcggtcagcaggttgatccacagcaactgtgtggcgagcagcggcacggtgacgcccacggtttccggctggcggatgccgaggaagccagcaaacaccacaccgaggaacacggtgaacacctcacccacattggaactcagcaggtagcgcaggaacttgcggatgttgtcgaagatcacgcgaccctcgcgtacggcggccacaatggtggagaagttgtcgtccgccagaatcatcttggcgctctgcttggtcacttcggtgccggtgatgcccatggccacgccgatgtccgcggacttgactgccggggcgtcgttcacaccgtcgccggtcatggccacgatgttgccttgacgctgcaaggattcgacgatcttgagcttgtgctcgggggccacgcgcgcgtacacggacacttcggacgtggccttgtcgagtgcggcctcatcgggcagctggtcgagctggtcgccggtcagggccttgccgtccttggcgatgatgccaaggtcggaggcgatgcgggcggcggtcagcgggtggtcgccggtgatcatcaccgtgcggatgccggcacgatgggcctcggtcacggagtcgcgcacctcagtacgcggcggatcgataatgccgaccatgccattccagatgagatcggtttcgatggcttcggcctgatcggcgatgtcggacacctggcctgcggcgttgacgcttacaccgggcacatcagccaaagaactggtttccagcggacggcaggcctcgccaagcgtacggtaggcctcggaggagagacgttcgacggtggcgagaatcgactggcgatcgccttcggtgagcttacggacctgaccacccacgcggatgcgcgtgcagtagctcaacagcacgtcgggcgcgcccttggcgaacacggtgagcttgtctgaatcggtgctgtccttggcgatgatggacatgcgcttgcgttcggaggtgaacggaatctcgccaacgcgcgtgtatcgcgtgatcttgcgatcggccttgaccttgcgtgcggccacgatcagcgagacttcggtggggtcgcccacgatctcccagcggccgttctcctcgcgtagttcgccgtcgttcgcgagcgtgccggccacaagcgtggcgacgacttcatcggccacaatctgggcctgctcggattcaggactgacgccaccggtcataaccatgcggccttccggcgcgtaaccggtgccggtgatctgcactgcgccggacggggtgaccacgcgctccacggtcatctcgttgcgggtcagcgtaccggtcttatccgagcagatcacggaagcggagcccaaggtctccaccgaatgcagtttcttgacgatggcgttgtgcgcggccatacgctgcacaccaagcgccagcaccacggtcaggatggcggccaagccttccggcacggcggccacagccagcgagacggccaacagcaaggaatcaatcacgtcatggacgtcgtcgaagccttccagcacggcgagcgccaccagcaccacgacggcgatgacgcacaccgcaatgccgaggatcttggagacgtaatccatctccttttgcagcggggttttctcatcttcggtggcggagagcatgtcagcgatcttgccgacctgcgtgttcataccggtgccggtcacgattgcgcggccggtgccttgcgtcacggaagtgccgttgaagatcatgttggcacggtcgcccagcgccttggcttcggtgagtgtgtccggcttcttaccgaccggcacggattcgccggtcagggaggcctcggcgatgcgcaggctggccgcgttgaccagtcggccatcggcggagactgagtcgccttccgcaaggacgatgatgtcgccggggaccacgtcggcggtgttgatgcgcatgactttgccgccgcgcagcaccgaggtctgcggggccgtcatttgggcgagcgcctcgaccgcggcctccgccttggcctcctgcatgtagccgagcacggcattgacgatcagaatcaaaatgatcacgatggcgtcgaacggcagcacttcaccgccttccgcgccgggctgcgcattggccttttcgatgaaccatgcgatcaccgagatgatggtggccgcgatcagcaggtagaccagcgggtcctggaactgggccaggaatttcttccatttcggtacgggcggggcggtggcgagctcattcgggccgaatttggccagtcgacgcttggcttcttcctcgctcaggccctgggatgggtcgacattcagggctttggccacgtcgtcggcactggtcagacttggatcagcttcccccaatagcgcttcctgcgcgcgcacttcttccgattccacgacctcgttcgttgcggtcgcggacactgcggattgatctttgagatcatccataatgttctccttggtattgccgcggagtagtcagccttgcggccgctgccgggttttctctcccggctggacgcacaggactgcgcggttatggacaccggcgcaactgctgccgatgcatacgattgctattattccataactgcgtggcgcacttggcgcacagcgtaatagcgttttgcctagaacaggcgacgcaaccaggcttcagccaaatcaggccaacactgcacgcattcgacgatgtgcgcatagaagccgttgccagcggtttccgcattggccagggacaggccgtggctgccttcggggaacaggtgtgcttcgatgctcacgccggcggcccggcaggcctggatgagcattagcgtattctccacgggctcggcttcgcggtcggaggtcatggcgtagccgccaccaggcaaaatcaggatggccgggcgtatgcggtccggttccatctcctcgctgttgtcggccacatagccaaagaatcgcgcctcgttatataacttaagaatcgtgagaatcaaagcaattcataacctaggaatagtgagttttacggcattatataacttaggaatcgtgatataatagctcataaatccttgaaaatactaggaatatgagcttaacatgtataagagaaaagtatacgaccatctacggcgatggaaagcagcgagcaagggtactactgcgttaatgattgaaggagcccgccgcgtcggcaaaagcaccgtcgccgaggaattcgcgaagaacgaataccgctcatacatccttatcgactggcagaaggctccgcaggcggtacgagactcgttccgcaacaatctggatcatttggacacgctgttcatggacctttccgtctattacggcgtacgcctgcatgagcgtgacaccctctttattttcgacgaagtacagctcttcccctttgcccgcagcgcggttaaacaactcgttgcggatggtcgatatgacttcatggagattggctccctgatctccattaagaagaatgtcgaaaacatcttgattccctccgaggaagaatcggtgagcatgtttcccatggattttgaggaatttctatgggccagaggagaagaactactcgccgatgcgatacggcaatcttttgcggacaggcgagcaatgtctccgctgctggacaacaaggcggaacgcctgttccgtgaatacatgctggtgggaggtatgccgcaggccgtagagcgttatctgggaacatccgatatgggcaatgtcgatcgagcgaaacgccaaattttgcacctgtacgctcagggcatagagaaatacggcggagattcgaaagaacgggtcaaacgtatcttcgatgaaattccaaggcaactttccaagcatgaaaagaagttcacactgtcgtctttaggcgaaaacgcacgcgaacgtgaatatggcgatgctttcttctggttggatgaatcgttcctaatcaaccgctgcatgaatgccacggatccgcatgtgggcctgcgcctacaccaagaggactccacgatgaaatgctatatgggagacaccggcttgttagtaacgcaagtgtttgccgaccgcgcatacacgtcgaatgagttgtaccgcgatatcctgttcggcaagctggaagtgaatgaaggcatgctggtggagaatgtcgttgcgcagcagctccgggcctcaggccatcgcctgttcttctattcccgatattcccgtcaggcgaaggaccgcatggaaattgattttctccttatcggggagtattcaaatgccgccatgaaggccagggtctgccccgtggaggtcaaatcgacaaagagatacaaaacctcatcgctcgataagttcaagaataaattcgacagccgggtcggcatgcaatatgtgctgcatcctagaccaatgcgcgttgaaggagaccgcctatatctgccgttgtatatggcgcattgcttgtgatgattctagaacgtatcgcagagaatgattctcaataagaaaagcgtgaggattacgatgcctcaatcgcacatgcagagcgtcatatcagtgagatcccgccgttgcggaccatgtttaattgtgcggaaaagttcggatgcctcacacttttcttgacgggaattatttactgtgaggcattgcgcaggttggcggccatggcgcggtcgcgcaagcctttggtgagcttgagaccgagggttacggcgatcaggactatcgtgcaggcgatccacagcgttcgaccgccgaagttgctgatggtccagccaccaatcagcggcgccagcgcaatcgataccgaccacactacgttgtagacgccctggtacgtgccgcgtgccgacgcgggtgccatggcggcaaccgtagtggtggcgatagggaatgtgcccagctcacccagtgtccacagcactacggcaagcgcgaatccgccccaggaatgggccgcggcctgcaccgcatagccgatgacggttacggcgaggcccatcaccagcacgcgtgaattgcccatgcgcgagaacagtttcatcgcgggaatctgcagcaggcacaacataccgccattgatggtgagcagcaccgaatactcgcccagccctagaccaaggtccgtcatggcaatgggcaggccggaggtgctttggaagtacacaaggaagtagccgaacatcagcagggagaagccgaggaatggcgtatcagtgagcacgcgccgccaattgcgagacatggagcccttggcactggcagccggtgcggcatccgagtgattcggcccctcgacgccggcgaattccgcatgcgtaacactgcgttcgtcttcatggcgcaccgcacttggcaccgatacagtaatccccaaatgccgcacctcgcggaagaacgcaatcagcaatatcgtgacggctatcatcaccgccgcttcaacgtagaacatcagcgaatacgagatcttgaccagctggttggccacaatcggcccaatcgcgtacccaaaattaatcgcccacgattgcagtacgtacgcacgttgctgacgttcggcgggcaccacatccgcgatatacgcggcgatgaccgggctgggcagtgaggcgaacgcaccatagacaaacagggccgcgcctaaagccacggggtcagtgagcacggaaacgaccagcagggcagccgctgcgccgatttcgccgatgataatcatggattggcggccgaatctgtcggacaaggtaccgccgaacaggcagccgatgattgcgccgaagccgtacatggccacgactgtgcccaccacaccctcatcgaggcgcagcgcggaaaccaaatatatcgacaagaatgaggtcacgaagcgacccatccacagaatcagaatcgccaaccataatccccaatacagcagggacagtccgaatatcatgcgctgcttcttcactctcaataccttaccggctaccgacggcggaatagccgcgttttggcgcggggtgctgggacaatagcacctatggctatcaaaaaaggaccgaccaaggggtcgggtggcaagcatcgcaacaaactgaagggttacggccccactcccaaagccgaggaccgcgtctatcacaaggcgtataaggccaagaaagcggccgaacgtcggcagatggccgacccgcgtctggcagcccgccgtcgagtggacaagttcgcttcggcggatacttcggatctggtgtacggccgtaattccgtgctggaagcactgcgcgtaggcgtaccttcttccacgctgtacatcatgtctcgtattgaacatgacgatcgtactcgcgaaatcgtgaaaatcgctggtatgaacggcctgcacatgctggaggccgatcgtctggagatggatcgtatcgcccgctccggcaaccatcagggcgtgattctgaaggtcgatccgttccagtactcctcgctgaacgagctggccgatcgtgctgagaagaaggccaaggcaatggaggccgcgaattcggcggccgcccgtattgctgcgcgaccgctgttcattgcattggacggcgtgaccgatccgcagaacctgggtgccgtgattcgttcggcggccgcattcggtgccaatggtgtgattctgccggaacgccgttccgcttcagtgaacgccgccgcttggaaggtgtctgccggtgcggccgcgcatatgccggtggcgcgcgtggtgaacctgactaaggcacttgagggcttgaaggagcgtggatactacgttgtcggccttgacggtggcggcgataagctcgtcggcgagactggctttgaatccgatccgctcgttgtagtgctcggttcggaaggcagcggtttgggccgactggtgcgcgaaacctgcgacgcgattgccggcatcccgatcagctcgtctgttgagtcgctgaacgcttcagtggcggcgggtatcagcctgtacgcggtgtccaacgcacggcgcaaggctgcggcggagtgattgtcgcttgaggccgtaataggttgtacacaaagaagcccctctatttgaggggcttctttgtgtgatgggctcacctacagacagtccaccggattgtccgcttaatgactccacactgccgcatccggatcgtcatcggggttgtagccgtcgtcgtccgggtcgctgtaggtggattcgtcgtcaatgacgccggaatcggcctcttcgttaagttcggcgagtgccttggaatcaaggttgtagctcggcagaacgttgtcgatgtagctggtcacggcctcgcccatcggcacgtcgtggccggccttctccgccaggaaccagcgatggtcaagcacctcatggaagaactgagcaggctcgatctgggagcgatattcgcgcggaatcatacgcacggtcggctcgaatacctcgcgcatccaatcggtggccacgatttccagatcctcgccctcacgccacgtggaggcacggtaggcgtcaaggtcgttgagcagacgacgggcctggttctcctgcacgtcaaggccggtgaggcgcagcagcttgcggttggcgtagccggcgtccaccacgcgcgggcggaccagcacacgcttgccgtcctcggcggtcttcatttccagctcgtccacgtcgaagcccagatcgttgagcttgttgacacgctgctcgatcttccacatctcgtccgggttgaacttgtcggtgtcggtcaaggcgctccacaacgagtggtagcgttcgaccagccggttgcccacctcgatctcatccacgtcgccgggcagcagcttgccggacgccaaatccataagttcgccgatgatgttggtgcgggccaagtcgatatcgtattcgcgctggccgtcggtgagctggacttgcaggtcaccggtctcggcgtccaccaggaaggcggagaaagcgtcggcgtcgcgcaggaacaggacgttcgacagggacacatcgccccagtagaagccggccaggtgcaggcgcaccagcagcacggcgagggcgtcgatcagtcgttcggcggtgtccgggcgcaggttgcgggcgaacagcgcacggtacggcagtgagaacttcaagtgccgggtgaccagaatcgcctccagcggctccccttcacgggtgtgacggccggtgaccacggcgatcggggtgacggtcggcagttcgagcttctgcagtcgacgcaggatctcgtactctcgctcggccacctggcgcgtgatctccttcatggcgtacacctcgtcgcccacgtgcacgaatcgcacgacgtggcgggagatgcctcgcggcaggttggccagcaggtcctcaggccaggtggccaagggcttgtgccagggcagcgtgaacatctttgggttcgagctggcggcggtgattttcagtgcttgcggttcggctgaattggcgtgttcgtcttcggctttgacagacgtggccttcagcgcacgcggatccatctggggcaattcgttcaactccatgtgttcgattttacgtgtcgttcgcgatgtgtgctccttggccacgacttcggcgcgttatgtttacgggaaaacaccgtttggtctctccctcagaccgtctagaaggcaaaaagaaaagccccgcagctatgcagggcttttccaacgaggccataagagaggaagagaataacctcgtttaatggttgacgaagcgattagacctcgccaagtatctattagttcagacgcagctcagtcgacggagcgaacaggtgcatcttggccgggtcgatcttgatcttgacggtcgcgccaaccttcggcagcgcacgcggattcacacgaatcgtggtgagcttgttctggtcggacatgacctgggaggcctcagcggcggagccatcggtgacgatgttgccgtagatgtagccatcggagcccagatcctcgacgttcacaaccttcagggagaaggcgttcgggtcgtcagccggggccaggccagcgtcctcaggacggaagccgaccacgatctggccgttgtcttcggcggtgagcttgttgacggcctcagccggcaggtccacggtgtcctcaccgatcttcgccttgccgttgaccaccgggtgggtgttcaggttcatcgacggggagccgatgaagccggcgacgaagacgttggccggacgatcatacagctcggtcggggcgccgacctgctgcaggataccgagcttgatgacggcgatgcgatcgcccatcgtcagggcctcggtctgatcgtgggtcacgtacagggtggtgacacccagctggcgctgcagggcagcgatctgggtacgggtctggacacggagcttggcgtcgaggttggacagcggctcatc

SEQ ID NO: 1137 - DNA, 34206 bp, Unknown
  R81_24m  MAG No. k141_5549
acgcttgatggacttgaagtcgccgagcagctcgttggcgcgagcggcgatggcgttggtggtctcggccggggccgggccgccggtgacggggtggtacttaaagccaccgtcggtgggcgggttgtgggacggcgtgacgacgatgccgtcggcgaggccctcgccctcgaagcgctgggtgccgtcgaccgcacggttgtgggtcaggatggcctgggagaccaccggggtgggcacgaagtcgtcacgggagtcgacgcgcacgtgcacgccgttggcgacgagcacctcgatggcggtcttcttggccgggccggacagcgcgtgggtgtcggagccgaggtacagcgggccggtgacgccggccttcttgcggtattcggcgatggcctgggagatggcgatgatgtgggcctcgttgaacgaggtcttcagggacgatccgcggtgaccggaggtgccgaagatgacacgctgctcggggacttcgggatcggggacgaggtcatagtacttgccgataacctcatcgacattaatcagatctgctggggtggcgggctgacccgcattgtttgctaccatgttccctattctgccacgtttttcgccactttgggtactcttatgttaagagttgtcaacttttgtgcgaatcgtgtgccggttgtctagcgcttggtcatttccttctcgatttcctccagcgacttgcccttggtctcgggcaccaagcgcagcacgaacgggatggacagggccgagaacacgccgaaaatcgcgaacgggccgcccacattgttgccgaacgcatcgagcagcacgaggaagaactgggagacgatgaagttgcccagccagttcgccgccgagccgaaggatgagccgatgccgcgcacgctcagcgggaagatctcgccgataagcacccaggcgatcgggccccacgagaccgcaaagccgaggatatagaaagcgatgagaatcatcgtcggcactgccagcacggccacgtcgcccacgaagttcatcacggcgagcaccgcgagcgaaacggtcatcacgatggaaccgaagatcagcatgcccttgcgcgggaaacgatccatgataagcgtggccacgatggtgctcacgaagttcaccacgccgatgcccaccgacacccagatcgcgtcgccttcagggaagccgaagcccttgatgaacacctgcggcaggaagtagatcaccgagttgatgcccacgagctgctggaacagcatgataccgatggcggccaccagcgccggacgagcgatacggaacagttcgcgcacaccacccttggtgtcctgtgcggccacggccttgatttcgtccagctcaatctgcacctgggtctgatccacgtccttgcgaatcagcgtaagcactttgaaggcgttgcgggtgtcgcccttgttcaccagataacgcggggattcgggcagcaacaggccgccgagcagcaacaaggcggccggcaccagcgccgaaccgagcatccagcgccagtcgcggatgccgaagaggttgtggttcaggaatccgaggttggaggcgtaggccagcagaatgccgaaggtgaccatgagctggaacagcgtggacagtgagccgcgacgctccttcggcgccagttcggccaagtacgccggggtcagggcggaggccgcgccgacggcgagacccaggatgatgcgggcgcacaccatcatcgcgaatccggtggaggaggcgcacaggcctgagccgagcaggaacagcagcgcggagacgatgagcagcttcttgcggccgaaccggtcagacagtgcgccgatcgacagcgcgcctgcgcacgagccgatcagcaccgaggaggtgatgaagccggtctgagagacgctcaggccgaagtccgattcgataagcggggaggcgccggagatgatgccggtgtcgaaaccgaacagcatgccgccgagcgcgccgaaggtgaagatgaatgcgctgttgagcgggaagcgcgtggagaagccgtgcgattcggcggcttcgaggtcctcgattgcgttggctgccgcgtttgtggccgcgcccgccactccggccacgccggtttcgatggtttcgattgcggtggccgccgcaccggttgcgctggtttcctgcgccgcggatgccgtctgtttcgatacgggtgatgccgttgtcgtcgtcattgccttgtcctttcgccgttgacggaccgcgcctgttgcgtggcccctctgccgcgtgcaaggtcaggcttcgattgtctgcagtcgcccgaaaacaaaaaaagacctggaacaacgtggaattcgcatatcacgatacgcaaattccacgtcgctccaggtcttgcctcgttttgagtaacaaccctgctacgcaacgtgtgtgaaagatagaatacgacttccgcagtcgcgacactccgaataggcggcaaaaaacgatgatttttgacaacgattgcaggattctgcatggtggaatgatgtcggaatgggcgctgcggcaaatacggagaacgggtgtggcgaagcatcatcgcggaacattatggcgggacaccatcgcggagcaccgtagcgcatagttgccgtttcgcgatgctttgccggcattgccgtgcttttggggcacccagcgccgataatggaacacagtggcatacggcagcaaggaggaaccgtggcgaacgcatcgaacgcaacgcctgcagtgattgcggcgcgcatcgtcgatgccgtcggcggccccgcgaacattaccagcctgacccattgcgccacgcgactgcacttcgaactggccgatgccggccatgtcaaccagcacggtcttgaatccgtccccggagtcctcggtgcattcccgcgagccggcaatcgttatcaggtcatcatcggcggagcggtcgcctcggtgtacgagcagatcgttcggctgcggacggcgcgattgatgccggcagcgcaattgccatcggcagtgatgcagtcagcgtcgcagtcaacgcaacccactcagtcaatgcagcccactcagtcaatgcagcccactcagccagcgcagcccgcgcagtcagcgcaatccacacagcccacgcaacccgcgcagtccgcgccgtacctttccgacgatgccgcaccatcgcgcgatactgccaccgacgccgaacaaagttgcggcccatccaatacatcccgtcacttcacgcctcgtaccgtccgcgagtggggcagtgccgcccgcgcttgggctgccgcgtttttcgactacctgtctgactcgttccgcccgattctgggtgtactgctcggtgcctcgctggtcatcgccatcgtcaacgtgatcgttgcactcggcatcgtgcctgacggcgagacctccgccggctggatactactcaaggcgatttgggagggtgtgttcaccgttctgccgattatgatcgcctacaatgcggccaagaaactggacgtcgacccctggctcggcggcgcgattatggccgcgctgatgaccccgcagtttactggcgtgatgtccggaatgtccggaatgtccgggacgtccgtatccagcgccctctccggggcgattcaatgctcggccaacgccgtattcggcgccgaaacctgcaccgtgtcggcgttcggcataccgattcaactcaacgactacggcggcaacgtcttcgtgccgttgctcatggctgccgtgctcgccgtggtctaccacgggttgaagcgcgtcattcccgacagcgtacagctggtgttcgtgccattcctctcactggtcgtcgtttttgcgctcaccatactggtcatcgggcctctgggaatatggctcggcggtgggctgggagcggccacagcatggcttaacgcgcacgtgccgttcctattcgcgctcatcatcccgatgctctacccgtttctcgtgccgctcggtctgcactggccgttgaatgccctgatgctgatgaacattcaggcgctcggctacgatttcgtccaaggtccgatgggtgtatggaactttgcctgcttcggtgccaccgctggcgtgctcgtgctggccgtacgcggcaaggattcggccatgcggcagaccgcggtgggggcgttgctcgcgggattgctgggtggcgtttcggaactgagcctgtacggcatccatctgcatcaccgccgcgtctaccgctggctgctcgccggctgcgcggccggcggcgtgaccagcgcggtgcttggctggctgttcccgtccgtgctgccatccggtcagatggtccggggcgtcacgaccacggcgttcgccttctcctcgttgctgacgattccggtgtttgacagaatgtgggtgtacgcgctgtccatcgccgttgcgtttgtaatggcgatggtgctgacggtgctgttcgggtaccgtacgccgccgcgcgccacggaggcgcagatggtctcggcgggcgagaacgtacgctcgcaggatgcggtgagagggattggcgcgacatcgtcggatgcggagtctgcggaagattccccatcgcggcctgcctccgatcggactcctgactccaacgccatcctgtcgccggtcgccggccggttgatgaatctggaagcgactggtgatccggtgttcgcctcccgcgcgctgggggagggtgtaggcgtcgtgccggagacggccggcgagacggccgtgctagcaccggtcagtggcacgctgaaaaccgtggcccggaccggccatgccttcggcattaaaaccgatgacggcatcgaagtgctggttcatgtcggcattgacaccgtcaatatggatggcgagggattcgtcgtggccgtgggcaaaggcgagcggatcgcggcgggagagccactggccaccgtggatttcggcaaagtcgcggcggccgggcacagcgttgtggtggtggtgacggtggtcaacgccgctgaactgaccgtggtcacgccgttgatcggcgacggtagcagcgacgacaacggcggcgactgcaaaaccgtatcagccggcagcccgatcatcgatgtggaacaatgacgttgcgaaaggatgccatggaaatactgcgagtgttcaacaacaacgtcgtgctcgccaaaggcggcgacggcggtgaggtgattctcaccggccgcggactggggttccaggccaagccggggcagacggtcgacgagtcgaaagttgtgcgcaccttcgtgccatcggacgggcgcgaccctgaccatctggcgcagatgctggcggacattccgcccgaaatcatccgcgtggtcgtcgaatccatgcaggagaccggactgggggagcgcgagaccggcagcaccacgctggtcatggccctgtcggaccacgtggcgaatgcggtggagcgggtgcggcgcggcatcgacatcacctacccgctgctcggcgaggtgagcaacctgtacccgcaggaatacgcgcaggggcgtgcgatgctcgcatcgctcaatgcacggctcgacgtcacgctgccggacggcgaggccaccgcgcttgccatgcatctggtcaacgccggcttcgccaccggcgacctgtcctatacgtacacgatgacgggcgtgatccagcaactgcttgacatcatcgaccacagctacggcatcacgttggaccgcagttccgtgaacgtgggccggttcatcacccacctgcgctacctgttcgtacgcatccaccagcaccagcaactgacggacgagccggcaccggtgatgaaggtgattcgtgagtcctaccccgctgcgctgcgatgcgcgcgaaccatcgcctccctgctcgaactgcgcctcgacacggatatcagcgacgacgaaatcgcttatttggcgatgcatgtcgcccgagtcaccggccacgcatcgtagtaacggattagcggattggcgaatcagcgaatcggctcgagtgtaccggtcatttcggcgaaattcgaggtggcatttgaagcagcggcctgcgcggtcttttccagcgcggaggcgtcgggcacgcgcacgatcagcgcgcggtgatccaccgagaaacggatgtggcgggtttccggcagcatgtcaccgtccacctgcgctttggccggcttttccaatgtgatttcggcactgacaccctggacctgttcgatggtcgagttcgtggacagcgggttctgttcgggcttgccgatgatcgtctggtgcaccacgtcgccgaacaggttggcccagccgaggatgccgccggtggtgtcgatgatttcgaagtccagcagaccatcgtcataggatgccgccggcatcagcgagaacatgggaatctggccgcagttgccggccatcaccgtgcggaaatcgagattcttgatggtgtgggtcgagccgtcggcgctggtgactgtcagcgtgccgcggaacttcggcgcgaacaggttcttcacgccgcccacgaagtaggcgagccagctgatgttcgccttgagctcggggttggtgtcgtcgatcatggccgcatcgaagccgatgccggcgatgatgaggaaggcgtggccgtggtcgtcctccgggtggtcgagcagggtgagacggcccatgtccaccaggcgggagccgtgggaggtggccacggtcagcgcggcgtcgatatcgtccacgggaacgcccatattgcgggcaaacaggttgccggtgccgatggggatgatgcccagcgcatggccggtgccggagacggcgctcgccaccgtgcgcaccgtgccgtcgccgccgaccgcgatcaccacgtcggcgccgtcctccagcgcctcaagcgcgcagaccctgccgtccttgtcaagctgggtgtcgtagaagcggatgcgattgagccccttggcctcgcagaacctctggatatgcagccggcgggcttcggcctgcggtttggacggattcacgatgaaggcgtactgcacctcgtcgtcccggcgcttctccagcgtctgagccagcttgcggcggcgctgcgcgcgcagggcgatgacgatgacggcgatgagcaccaccacaatggcgattgcggcgatgatcagaaacacggtgagggcaggctgaggcatggctcctattgttatcggtggggaggtcgtttgcggccatggtgcgccgtacgtgaacatttcctgcacgcaacagccccgtggggcgcgattatggttcaatcgcgtctcatctgacgaaattggccgggtggacccgtccgcggactttcccgggcttccctgtgatttccgcgtgactcccgcgcattcggccattgtcggtgtctgcttacgcggctagtctggtgcccatgcttgatattcaattcatccgtgaacacaccgatatcgtcaaggaatcccagcgcaagcgcggcgagtccgtggaactcgtcgacgaagtgctctcctccgacaccgcacgtcgtgaggcgctgaaggccttcgaagaggctcgcgcccagcagaaggaaatcggcaagaaggtcgcctccgccccggcggacgagaaggccaagctcatcgccgagaccaaggaactgtcccagaaggtctccgaatacaagtccaaggccgattccgccgccgaggaatacaccaccgccatgtggaagctctccaacatcgtggagcccgaagctcccgaaggcggcgaggacgactacgtggtcgtcaagaaggttggccagattcgcgacttcgcggccgaaggcttcgagcccaaggaccacctgaccctcggcaccggcgtggccggcatcgacatgcgccgtggcgtcaaggttggcggctcccgcttctacttcctgcgtggccaggtggcccgtatgcagatcgccatgctcaccatggccgtggaccaggccgaggagcacggcttcacgctggccatcaccccgacgctggtgcgccccgaggtcatgcgcggcaccggcttcctgaactcccacgccgacgagatctaccgtctgcgcgagcccgacgaccagtacctggtcggcacttccgaagtggcgctcgccggcatgcacgagaacgagatcctcgacctcggcaacggcccgctgcgctactgcggttggtcctcctgctaccgccgcgaggccggcgccgcaggcaaggacacttccggcatcatccgcgtccaccagttcgacaaggtggagatgttcgtctacgccaagcaggaggactcctacaaggagcacgagcacctgctggccatggagcaggagatgctcgccaaggtcgaagtgccctaccgcatcatcgacaccgcagccggcgacctcggctcctccgccgcccgcaagttcgactgcgaggcctgggtcccgacccagggccgctaccgcgagctcacctccacctcgaactgcaccgagtaccaggctcgccgtctgaacatccgcgagcgtatggaagatggcggcacccgtccggtctccacgctcaacggcacgctggccaccacccgttggctggtcgccatcatggagaaccaccagcagaaggacggctccatcgagattccgcaggccatgcgcgcctacatgggcggcaaggaagtcatcgagcccactaagtgggaggcctgagtctcatcgtgctttagctccctttaatgggggagctgtcagcgtagctgactgagggagagatcgctaatagccagcaggcgaatccaagaccgaccgcactgccgaatatcaacatccctcccttctgtataatgaatacttgcgcgtgtgaacgcgcatcaggacaggtgtctgagcggcctaaagagacggtcttgaaaaccgttgaggggcaaccctccgcgagttcgaatctcgccctgtccgcgaaccgaggcctgggcaacatgcccaggccctttttctttttctggaacctgtcttcttgatcgccaccggggtgctgatatattggtttgtaatgccgtaacatgcggtgtccccgttgatatgacgggccaatcggcgtgagccgataagaaaaggcccgacgtttgcggcatcgggcctttgcgttgattaccggcttgcgcctttaatcaacaaggttgcaagatgaatcatatcacgatgcacggtagtctgaccgtgaacgggcgcaccgtgatcgtccatgtgggcgatggcgaggcgaacgccacggttgacggcacgcacttcaacgtgcgtagcctgtggcagctctaccagttgctgagactgctcgtgtagcgtctcattaaggcgcggtgccccccctagtcgggtatcgcgccggcaacctgaaaaccgataatgttggcaagtgcttgcaatttgtggtggacgattgcaagctaacgccttggattgttgccgctatccaatatctcattaggtctaccggtggaccaaaagtacgttgctttgtaaggggagttaatgaaatgaacaaacccgcacaatcgagcatcgaatcggtttaatgccactcacctcaacgggacgcgcggtaattgttagctaagttgacaataaaagagcaaaggcctaaattagcaatcagtcatcacgctgaggtgatgatttcactaggaaggagtagagatatggtatcgcacaacaagcgcatcgtggctgctcttgccgcggtagcagcaatgggtattggtttggccggttgcggcggcagcgacactgccggcgacacgaagtccggcagcgatggcggtgtggtcaacatcacctatatgcatcgtctgcccgattccgaaggcatgaccttggtcaacgacattgtggccaagtggaacaaggagcacccgaacattcaggtcaaggccaccaagttcgatggcaatgccgccgacatgatcaagaagctcgagaccgacgtcaaggctggcaatgcgccggatctggctcaggtcggttactccgaggttcctgaggtcttcaccaagggccttctgcaggatgtcaccgatgaggccgccaagtacaaggacgatttcgcttccggcccgttcgcactgatgcaggtggacggcaagacctacggtctgccgcaggacaccggcccgctgacttacttctacaacgccgctgaatttgagaagctcggcatcaccgtgccgaagaccgctgacgagctcattgagaccgccaagaagaccgctgcccaaggcaagtacatcatgaccttccaacctgatgaggccatgatgatgatgtccggccaggccggcgcttccggtccgtggtacaaggtcgacggcaactcctgggttgtcaacacccagactaagggctccaaggccgtggccgatgtctaccagcagctgatcgacaacaaggccgccctcaccaacccgcgttgggatgcatcgtttgataactccatccagtccggtcagctgatcggcaccgtggccgccgcttgggaagccccactgttcatcgattccgccggtggcactggtgctggtgagtggaaggtcacccagctcggtgactggttcggcaatggcaccaagaccggcgccgatggtggttccggtgtggccgtgctcaagggttccaagcacccggccgaagccatggagttccttgactggttcaacacccaggttgatgaccttgtctcccagggccttgtcgtggccgccaccaccgcggatgccaagaccccgcagaagtggtccgactacttcagcggacaggatgtcatggctgagttcaagaccgcgaacgacaacatgggtgacttcacctacatgcctggcttctccgcagtcggcgctgcaatgaaacagaccgccgccaaggctgccgatggttctgccaaggtttcggatgtgttcgacaccgctcagaagacctcggtggatacgctgaagaacctcggtctgtccgtcaaggagtgacctcactaggtcttgtcaacgggccggcttgaaatagccggccgtccaagacctccgatgcctcgcatcaccatagcgaaaggccggggcacatactccggccttccgtattgtttgggggtattgctgcaggggtgctgtggcccttgtcatttgttttactgttctttgcgaagacaggttttgtattatgactgcatccactactcaggcgaagggcaaagcacctaggcgtgccgccgccaagccgaagcggtccggcgctcagaagcgcgagaaccgcaccggctgggcgttcatggcaccgttcgccgtcctgttcactttcgtgttcatcttgcccatcatctgggccatctattccagcttcttccgtcaggtcaccgagggcggtggcgcatacggcggtggcgagctggtcaataaattcgtaggattccagaacttccagtatgctattacttccggcaacttctggtccggcgtcggcagggtgctgctctacaccctgattcaggtgccgatcatgatcatcgccgcactggcgttggccatcgtcatcgactcgttcgtggtcaagcatgtcaccggtttccgtctgggctacttcctgccctacgccatccccggcgtcgtggcctcgattatctgggtctacctgtacaacggccaaatctcgccgatcgtcaagggacttgccgccatcggcgtcaatgtggacttcttcaacaagaacatcgtgctcggctcgatggccaacatcaccacatggaccttcaccggctacaacatgctgattttccttgccgcactgcaggccatcccgcatgacctctatgaggccgcccgtatcgacggcgccaatggttggcagattgccacgaagatcaagctgccgaacgtgcgtggcgcggccctgctggccatgctgctttccatcgtcggcaccattcagctgttcaacgaaccgcagatcatgtctacggctgatccgggtatttccaagtcgtatacaccgatgatgatggccatgaacacttctcagggcaccattaccccgtctggtgacggtccggcctcggccatcgccattgtcatggctctgatcgcaggtgtgcttgccgtgctgtacaccttggccgaaaggaaggtgaacgagtaatgagctccgcaaccgttgaagaacgcgcccgcaaaaaggccgagcgcaagctcgaaaagcagcgtcaggctgcgcaacacgatttgcctcgctccatgcgaccgtccgcggccgtgaagaccctcaccgtggtgctgctggtactggtgttgatctacttcctgttcccgatttactgggccatcatcgcgtccaccaagacgccggcccagatgaccggtagcaacggcatgtggtttgctgtgccgcttgaccagctgcccaatgccatcgccactaactattccaagctgcttggctggactcgtggcaacttctggcgctgggtgctgaactccctgatctactcgggcgtctcggcattgatcggcaccatcgtgtctgtgatggctggctacgccaccgcaaaattcaacttccgcggcaagaacgcggccatcggcatcattatggcctgcatgctcatgccgtccgccctgctgaccatcccgatgtactcgatcttccacacgttgcacctgaccaacactatgctctcgatcatcatcccgtgctgcgtttcgccgttcggcttcttcctgggccgcacgtacgcacagagttcggtgccggacgaactgcttgaagccgcccgcatcgacggcgcgagcgaggcgaggatcttcttcaccatcgtgctgaggctcctggccccggccatggtgacgattttcctgttcctgttcgtggccacgtggaacaacttcctgctgccgttgatgatggtgtcttccgacaccttgaagcccgtgaccctcggtctgtacggcatggtctcgctggccacgttcaccgatcgcggcgccctgatgatgggtgcgttgctcggcgtgctgcccgtgatcgtgctgttcctcggcctccagcgctactggcagtccggcctcgccgccggtgccgtcaagggctaaccaatccgctgcccggcatgtcgtgtcactccttccggtgccgggcaacgtccctcccatattcagtgacacgattccaatcgtccggcgtcaccgtaagcgtcaaggatctacgcagtcagggtcccagggcccgcgatgacgccggtcattttgtatgcgacgaattcgtcgctttgtagttttttgatgaccaaccccacaaaggagcactcatgaccagcaccggccgcttcacgctgcccagtgaagagaattttgccgaaaagaccaaggaactcgccgaattgtggggtgcggacgccatccgcaactccgacggcacgcatctggacgaggcagtgctcgctcttggcaagaaaatctacagcgcctacttcccgacccgcgcccacaacgagtggatcaccctgcacatggacgagaccccgcaggtctacctgctgaccgcccgtatcctggccgagtccaacgcggtggatgtgccgctgatggacggtttcttcgaggaacagctcaagcctaaccgtgacgccgaccctcataagtactgggaagtcgtggaccgcaccacgggcgaggtcgtggacccgtccggctggacgctcgacccgggcgaggacaccgtgcacgtgaccgctgccgtgccgatgcacgaatacacggtgagtttcctggcctacatcatctgggacccggtcgagatgtacaaccacctgaccaatgattggggagacaaggaacacgagattccgttcgacatctaccatccggccacccgcaagttcgtgttcgatacattcgagcagtggctgaaggacagcccgcaggtggatgtggtgcgtttcaccacgttcttctaccagttcacgctcctgttcgatgccaagcgtcgcgaaaaggtggtcgactggttcggttgcgcctgcaccgtgagcccgcgcgcattggacgatttcgagaaggagtacggttaccgtctgcgtccggaggatttcgtggatggcggtgcctacaactccgcgtggcgcgtgccccgcaaggcgcaacgcgactggattgacttcctctccggattcgtgcgcgagaacgtcaagcggcttgccgacatgtcgcacgcggcaggcaaggaagccatgatgttccttggcgaccagtggatcggtaccgaaccgtataaggacgggttcgaaaagctgggtttggatgcggtcgtcggctccatcggagacggcaccaccacccgcatgatcgcggacattccgggcgtcaaatacacggaaggacgcttcctgccgtacttcttccccgacacgttctacgagggcaacgacccgagcatcgaaggcctcgacaactggcgtaaggcccgccgcgcgatcctgcgttcgccgatcggccgtatgggctacggtggctacctctccttggccgccaagttcccgaagttcgtggacacggtgacccatatcgccgacgaattccgcgacatccacgaccgcaccggtggggtggccgccgaaggcgagctcaacgtggcgattctgaattcctggggcaagatgcgttcctggatggcgttcaccgtggcacacgccctgcccaacaagcagacctactcctactacggcattctggaatccctgtccggcatgcgcgtgaacgtgcggttcatcagcttcgacgacgtactcgcgcatggcatcgatagtgatatcgacgtaatcatcaacggcggcccggtcgacaccgcattcaccggcggcgacgtgtggaccaacccgaagctcgtggaaaccgtgcgcgcctgggtgcgtggtggcggcgcgttcgtgggcgtgggcgagccgagctcggcaccgcgcttccaagcgggccggttcttccagctggccgacgtgattggcgtggacgaggagcgctatcagaccctctccgtggacaagtacttcccaccggtggtgccggaccacttcatcaccgccgatgtgccggtcgacccggcggcccgcgaggcttgggaacaggccggctaccgcatcccgctgagcggttgcggcggtggccagtccatcaagccgttgggcggcatcgacttcggcgaacccgtgctcaacacgtatccggtcaatgaaaacgtgaccctgctgcgcgcggacggcgggcaggtgcagctcgcgaccaatgattatggcgaaggccgcggtgtgtacatctccggtctgccctattcggcggccaacgcccgactgctggaacgcgtgctgttctacgcctcccacaacgaagacaagtatgcggcttggagctcgtccaacccggagtgcgaggtggcgcacttccccgagcaagggttgtactgcgtaatcaacaacaccgatcagccgcagcggaccacggtgactctggccgatggcaccaccgaggacttcgacctgcccgacagcggcatcgcatggcgtgaagcctgattcccgcgttttggagaacggacccatcatgaccgaaagcaatgaagttttattcggcatcgcctcgcattttgcgctggaaggtgccgtgaccggcatcgaaccttacggagacggccatatcaacaccacctatctggtgaccacggacggcccccgctacatcctccaacagatgaacaccagcatcttccccgatacggtgaatctgatgcgcaatgtcgaactggtcacctccgctctcaaggctcagggcaaagagacgctggacattgtgcccaccacctccggcgccacctgggccgagatcgatggcggcgcatggcgcgtctacaagttcatcgaacacaccgtgtcgtacaacctcgtgccgaacccggacgtgttccgcgaggccggcagcgcattcggcgacttccagaacttcctgtccgaattcgacgccagccagctgaccgaaaccatcgcccgcttccacgacaccccgcatcgtttcgaggacttcaaggccgccctcgccgcggacaagctcggccgcgccgccgcatgccagccggaaatcgacttctatctgagccacgccgaccagtatgccgtcgtgatggatgggctcagggacggttcgattccgttgcgcgtgacccacaacgacaccaagctcaacaacatcctcatggacgccaccaccggcaaggcgcgtgcggtcatcgatctcgacaccatcatgcccggctccatgctgttcgacttcggcgattccatacgctttggtgcgtccactgctctggaagacgaaaaggacctcagcaaggtgcatttcagcaccgagctgttccgtgcctacacggaaggattcgtgggcgaactacgtggcagcatcaccgcgcgcgaggccgaactgctgccgttcagcggcaacctgctcaccatggaatgcggcatgcgctttctcgccgactacttggaaggcgatatctactttgccaccaagtaccccgagcacaatctggtgcgcacccgcacccagatcaaactcgtgcaggagatggagcagaaggccagtgaaacccacgccatcgtagccgacatcatggaggctgccaagtgagccgtcagtcgaaccatacccgaaccagcatgatgggggccgagcaatgagcgatcagctgaccgaggtatacgccagcatcgacgccctagtcgattacgccttggatcatctcgacctcgatccacgcaacgcagactggacccgcaaccaaatcttcgccctcttccacctggattcctaccccggacccaaaaccacaacgtcggcggcgtcagtgtcagacgcagtccaagacattgtcggcagccgaagccaggccccctctgacgaaaagacccccgaccccctactcgccgccttccgcgccgccgccacaaccgccggcctcttcgatccggaggaaggcccggcctacgccgacaccatcatgggcatcctctccgccaaccccgccgatctcgacgaccggttcctgctcatcgagcacagggacggcggcatggccgccatgcaatggttctacgactactgtgtggccaacaattatgtcaagcgtgcccagctcgaccggaacccgcgcttcgactcgcacgggctgacggtgaccatcaacctcgccaaacccgaattcaagaacatgaagaaggcggcggccggcaacgccgtgtccggcggctacccgaagtgcacgatctgccatgagaacgagggcttcgccggacgtgacaagcgcacgctgcgcaccctgccggtcacgctcggcggtgagtcatggttctggcagttctcgccctacggctacttcgaccagcacggcatctgcgtgaacaccgaccacacgccgatgcatgtggaccgcgacaccttcggccatctgctcgacttcgtggaccgcttccccggatacttcctcggatgcaacgccgcgctgcctcgcatcggcggctcggtgctcgcccacgaccactaccagggcggcggcgaactgctgccgatgcacaaggccgccacttgggccgccttcacgctcgccgactatccggacgccgtggtcgaaatcctcgactggcccggtaccgccgtgcgtgtggtgtcgaaaaaccgccagagcatcatcgacgtatccgacatcatccgcgaggcatgggtcggttatgacgacgcggcgaacggcatcgccagccatgacgcggacagcaaccgccaatccgccctctcgcccagcgcgatcatcaccgaacgtggctatgagatgagtctcatcttccgcaacaatgcgatcagcgacgagtacccggaaggtattttccatgcacaccccgaatactggccggtcaagcaggagccgattggactgatcgaagcccaaggcctgttcatcctgcccggacggctcgtcgaccagctcggcatcgtcgaggaggcgctcgccgaaggccgcgatttgcccgatgaagtcagcgaattcagtctcgaatggggcgaactcgctgaaacattggccggaaaccgcgaccgcgaggccatccaccaagccgtacgtgacgagctcggcagcgtctgctaccgcatcctcggcaacacggccgtcttcaagcagaaagccaccacgcaaacattcctcgaaagtcttggttttgccgctaggtgaaacaggtcaagtgaagtaagctcaatactgaaggaaaaccgaaggcaagtccttccaaaggaggagatatgactactgttctggttacgggcggtgctggattcatcgccacccacaccgacatcgaactgctcgacaagggctacgacgttatttccatagataactacggcaactcgtctcccgtggcgcttgagcgcgtcgagcagatcaccggcaagccggtcaagcgttacgacggtgacgtgcgcgatgaggcgcttatggaacgcgtcttcaccgaaaacaacatcgattgggtcattcacttcgccggtctcaaggccgtgggcgagtccgtggccaagccgatcgaatactacgacaacaacctgtactccacgcttgtgctgctcaaggtgatgaagaagcacaacgtcaagaagatcatcttctcctcctccgccaccgtgtacggcacgccgaaggaactgccgattaccgaggagacgccgaccggcggcaccaccaacccgtacggcacctccaagctgttccaggagcagattctgcgcgacgtacatgtggccgatccgtcctggaccatcgtgctgctgcgctacttcaacccggtcggcgcacacgagtccggcctgctgggcgaagatccgaagggtattccggcgaacctcaccccgtacgtggccaaggtcgcggtcggcgagctcaaggaagtccaggtctacggcgacgactacgacacgcccgacggcactggtgtgcgtgactacatccacgtggtcgacctggccaagggtcacgtggccgtcattgaccacatcgacaaggaaggcgtgttcgtctacaacctgggtaccggccacggctactccgtgcttgaggtcatcaaggcttacgagaaggccgccggtcatccgattccgtacacgatcaagccgcgtcgccccggtgacatcgccgcctgctacgccgacgcttccaaggcggagaaggagcttggctggaaggccgagctgaccatcgacgacatggccgcctcctccctcaactggcagaccaagaaccccaacggtttccgcgacgccgagtgatatgagcagatgagctccctctgatgagggagctcatctgtcgtttatcacacaatgcgcctatcggcggcccagcgggtgagctcggtgcgattcgaaagctgaagctttcgcagcaccgagctcacgtgcgtttcgaccgtcttgatcgagatgaacagttcggccgccacctctttatacgtgtatccgcgtgcgatcagccgcatgacctcctgctcgcgggcggacagccggtccagctcctcatcatgagcccgtgccgcaccatcagcgccgccatcagaccccgccgccggcacaccctggaaggccgaaagcacaaaaccggccagttttggcgagaacacggcatagccctcatgcacctgcttgatggatgaaatcaaatcagcgccggtaatcgtcttggtcacatagccctgggcgccggcgcgaatcaccgcccccacatcctgcggcgcatccgaaaccgacaatgccagaaacacggtagtgggggagtagggccgcgatttggcgaggatctcggcaccgccgccaccttcaccgccgggcacgtgcacatccagcaacaccacctgcggcttggtctgtgcgatcatcgccaccgaaccgggcacgtccgccgcttggccgacgatatcgaaggaatcacgcaacgtggcgattacacccgcacggaacatctcatggtcatcgaccacggccacacgaatcttggctgtctcgttctcgctcatcgatgttctccctgcgccgctttcagcgcgatcggcatatgcattctgacctcggtgccccagccggccctggacactatctccactgtaccgccgcgccgtttgacgcggccgataatcgattcgcggatgcccagccggtcgggcggaatggcgtccatatcgaagccttcgccatggtcgcgcacgaacacttcaaccatcgtgtcgctggcctcgcaatacaaagacaccggctcgccgccatgcgtgaccgcattgaccaacgcctgacgggtggcgtccagcagcgcatcggtctgggcgctcggccgcgcgtcgcccacggtgaccacctcaatcggcttgccgtgctcgtcctccacctcggcggcgatctgcttcaatccggctcccaccgaacgatccgatgtggaacgttcctgatacagccattcgcgcagctcgcgctcttggctacgcgccagggcgaatacggtggtcggttcctcggagtgcagctgaatcagcgccaacgtttgcagcacgccatcatgcagatgggcggtcatgtccgcgcgctcctcttcgcgctccttcaatgcctgctcgtgggtgagtcgttgcagcatcgcgttcgcccacggcatcaccgccaccacgataccgacgatcatcatgaatccgctggcaacaatgcgtcgaggagaggtgccccacccgggaatgctgacattatgcacatacaatgcccatcccatgaaaatcagtgcgatgccgcccaacatagacaacagctgcgtgcctcgcggactaagattcatccatgccagtgcgatgccgcccaaccctaccagcagcggaagcacaatctgggcatccgcaccggtgctggtgagcagcagtccggtggccatcaacgcgaaaccggccaatgccacgacggccggtttcggagcacgttggatggcctcggacaatgattccggtgcggcagccgattcgtcgtcatgagcggcaagtggctgattgcctcgcgcaagcggcgcctgatcaacgggcactgtgcgagccgcagccgccaccgggtctccggcgggcatgaacacccacaggaatacataagcgatgatgcctgcgccgtagaggaaggtcagagcgatgaacgcaatccgaacccatgccacgccgatgcccaagtgcagggcgatgcccttgcacacaccggtgagccaacggccctgccgggggcgcatcaacggcatgcgcgcaggcagcaatggttcgggagatgacgtcatactcctattgtgccgcgctcagggcgttgcggccggggttttacccggtgttcagggaacaatcagggtgttccccgagcgttgtggcagtggtcgggcggtgtaatggaatcatgagcaatccaaacgcgaatccgtatcagccacagccgcagcctggtccgcaaaaaaacaagacatcgcgacgcttcttcacttgggtgcgatccagtggactggttcgcggcgacgaccggtggatcggtggcgtatgcagcggcatcgctttacggcttggctggagccccacactagtacgtgcgttggtgattgtatgtacattgttcttcggcttcggcgcagctctgtacgcactcggctggtttctgatgccggatgtacgcgatgggcacatcttggccgaggacctcattgccggccaatgggactggaattgtcttggatgcttcctgttcctagccgtggcaatcgtgattccaggtgcggggtgggtttgtattgcgctcgccgccttagcgctatggttgttggccaaaagcggcattcgccagcaggaagggtacggattcggggcatctgcgccgcgaccggtttcacagcctgtgtcgtatccagctccacagcctgcctcatatccagccgcgcaaccggtccctctatctcctttgtattcagctccgcaacctgtttcacaatctgtttcacgaaccgcgcctagtgtttcacaacctgtttcacagcctgtctatcagtcgatgcccagcgtgatgccgggcacagtgcccagcgcgatgcccggcacagtacccaacgggccgtttgcccccgaccgtatgaatgcgacggcttatgcccccaccgagtccaagcgccgcaagccggcgggcccaatcgtggtcttgagcatactgggccttaccttcctctcctttgccggtctgatgggactgatttgggtaaacgacatgggcattatcggcattatgcgtctgagcaccatctggattgccgcagtatgcatagtgatggggctggtggtcatcattctcggattcagagggcggcgtaccggtggtctgattcctctcggactggttgccggtggatgcgcgctctgcatgaccatcgtttcaggcacgtatggcgtgcactaccgtgatcttggtgccagcggcatcaatactgttgtttcactgagccaatctgtcagtgcgagaaacagcgacggcatgaatgatgtgcaaaaggatggcatcttcgttgccgatgccagcgatgccacgttcgaaacattgcagcaaggtgtggcgttcaacggtgaaaactacaacaccgatcaggcaatcattgattggtccgattgggacaagacacatggaccgcacacggtgaagatgctggatggcaaaacctccatcagtaattgcccggtcggtaccatcaccatagccgcaacacaggcgcaagtgcatatcgttctgccggattcctgcacttacgccttcggcaccgccgactcctactccacttcgagtgacgtcggcggcaaatacgagatggtatacaacaactacatgggtctaagctttgttttcttcggagctgaaagcgccaccaatcccatgaatgggcctgattacgaatggttggataagggatccgccatgccggacaacggcccagaattaaaaatcaatattccctatgcagtggaagcacgcgtcaacgtggtgtacgcctccgattggaaaggctccacgttccagccgcttgccgatatatacgacggcaacagcacaagcaagaacacaaccgggcaatcggaatgatcaagccgttacaaccaggagatggaatcatgactgatgaaaccaaggaattcgcctccatcgaggatgcgacaccgaccacggccataccttccgaaaccgacgagaccaccgagaccacaaccaaggtgaccgtcgatgaccgaaccgataccacggtgctgccatccgcagcggatgatgacgaaacggctgtgctacccgtccccgacgatcatgcggatgcgtcggtctcggatgtggatacgcaggcaacagctgcctctccatcgcccatcgaaccatccacagatcggattgccctggaagcagttgccgatgccgtggagggggatggtgggccgattccatctgccgatgatgtaccgatgtacgcagcatcttcagcgcaaccttcctatgagcagtctcagaccgccggcaaaccatgccagcctggggggagcgccaagaacgtccagaatgctaaggatgtcaagagtgccaagaacatccagaaacagagcatcagcgcgcttactgtggtattcggactattaggcgtgattatcggcgtgatcgcgctggttttcgggtgcatatctccggatcggatgatttcgctgttctcgccgaatccgcaattgctgacggctattatctgcgccgtagtgggacttattctggtaatagtggccgttgtatgggccatagtcggtgccgtcaagaagagaaaatagcgttacaaccattgcattacggtcccagtagaagcacattatgacgggagccgaccgataagagccgaccgttctatgctgatggggggaggcatagtaactatgaaacggatttcggcgcggcgggtagcgagcgtcatcgccaccgcgatggcgatgacgctggtattcgccacacttggctgggcgatgatgccgcaatggaacacacggccctacaccaagcacatcgctatcgcttctgccgacaccaccatcacccctgcccatgcgaacattccccacgaggggcgatatagtacgcgtgaaacccgactatccatcaagaccggcgacggcgtcacgctacccgccgtactacgtgaaccggtcgacgctcccgggccacgcccggcttgtctgttcattcacgggtccggtaccagcggtgccgaggatttcggcgatatcgccaacgccatggcctctgccggcatcgtgaccttggtgccggccaagcgcaacgacaactacaccgtgctgcatcgcgactacccgcgttttgctcgcgaatacgggcgttcgctcgacgtgctgcgtggcataagcggcgtggaccccgccaaaaccggcatctacgccgaatccgaaggcacctggatcgccacgattctaacctcgaaacggcaagacattgcctttgccatacttacatccgcaccggtgttcaatggacgtgagcaaatggccatggctgtcagcgcctatacgcatgaggccggcgcgcccaagcccgtggtcaaagacatggccaaattgatgtcgctggactacgcgccattcgatctggcctatgccgactttgatgccgaccggtatctgaaatccctcaccatgccggtgctggtgaactacggcacctacgatacggccatgcccatcgaacagggggcgcagcggatcatcgccacggccaacaagtccggcaacgagaacgtcaccgtacgctatttcgccggcaaccatcagatgcgggctggtgagggcttattcaccccgaacctgccattggccgaaggctatacgcaagcgctggaaaattgggtgaacggtgtgactgccggaaccaaagccgatggatgggcaacgccccaagtcgccggtgcgacacctcaccagcgcttcgccgcgccgcaacgtaccagatccggtatcgtcggctcgctcggcgtgctggccggtctgatggtggcagggcccgtgctgatcgtgatggcggcgatattaggtattggcttgactgtgttttcttggctacagacgttgctggccgggcgacgtagtgtggcgactgtgcgggccatgcatgcgacgccgagtgggctgggagccgcccaacagcgtacgttgcacggcattgccggcttatctgccggtatcggcacagcggtgatggtgattactgggctgttgtatggctatatgagcgccgtaggcgtatcggctgtattggttatgcctcaaccgcagttgttttcccttgggtggagggcattgcaggtgctgaccgtgctgttggtcgtgctgttcgcgtgggaactggaacgtatgtggcggtatcgcgccagcattatcggcgtgcgtcgtgtcatttgcgtgatggtgacactggctgcacttgtcacattgacgatattgtctttctgggggttgttcagtctgtgatattcacggtcgttaccggctccttcccgaatatgtgccactgagtcgccgtgagcgtcacaaattcgggaaggtggatggggcgtgacggcgtggaggcactgtcgtcagcgctgagcggcttcagcctcatccaaagtgtcgaaaccgccgagctggactgtgtgcaacaaggtttcctcagtgatattgcgttgcgggctggctgcggcgcgctcgctaatcatcacctcgtagagctggaaggtccgttcggaatacgtaccaagctcgccgcgcagataggtttcgaatgaggtggcagatggtgtgtcttcggtggtggtgagtacgcgcatcgcctcgccgagcttggggtagcgctcgcggaaatccttggcccaggcgacctgctgggcgatgacctgttcctgacgggccacgcgctcttcagagggacgcggaatatacggctctatgttcttcgtgaaatcttccggcgcggtggaggccatcatgcggccgtacttttcggtcacgaggttgcggcccacgtggtcggccgcgtcaagatcagcggcatagctggtgagtaatggccgctcccatgtgaggaactgggccagccgcatctggtggaacaccggccagttgccttggcatgccgcgcgtccaccctcattgttggtgcgctggaactgatcccattcatggcgcacaatagcctcgcgcagttcatcatcagtcagttcgttggtcatcgacgttcctttcactaatatctccctctgatgagggagatggcacggcgaagccgtgacagagggagcttgaatctacaaacttttaagcaccggatcatcagaggcgatgtggtcctcgacatacgggcgctgccattcgaggaaggtctcgccggacgtggtcaggtgttcgcgtttgagttccctgacgatatccgccgcaatctgctccacaacatcgttgattttctcgattgctgtagccgcgcccttgccgccttcgccgaatccggcccctccatagcaggctgccgaactcaatcgcatcacggtttccaactgttcgcccacgttcggcaacagcgcgaacatcgagccagacagcttgcgcaatgctgcgaactgccacttgtaatacggcatatagcccaccaccatcggcacgttaaccaggaacaccaacgaggcggtggcctgcacgaactcgtggatggacagccatgcggccgcgccgtcgccgcgcttcaacgaacgcggcagattatattgaccggcctgggcgatcatgccgagtcgcttggagatcagcgcgagccgcacatcgtctggcatgtttttgaacccttggcgcgtcttggaaaacagaccggtgggatcggcgaacacctcgccattggtggcggcggccaaggtcgattcctgaagcatcagccactcgtgcggcgcggtttgcgcgggcgcagtgcgatacccggtgatcgactcaaagaagtcaccgatgcggaacacgccgtcacggcggttggcaccttgtgcgcggggcgtgacggggaagagcggtgcatcaatcggagtcgtcatcgcttccgccacatcagaggacgccgcgcctgacttggcagtggcggcatcgtccgtagcggtaccgggggtgggtgcgtttgccgcatcgggtatgatggtggagcctgcacctgcggaggggaatgccccggaagcatcggacctggcatgcgcctcgaacgtcacgcggccttgcgcatccacgctgaacttgcgcggcagcgcctcgtaatcggcctcaagttgctcgccgatggccgcgtaatcctcatccgtaagccacaggcagaagcgcgggccgaaatcgtggtcctgcgaatacgcatcatcgaatccgtagcattccgagccatgacccaccagaccggaggcgatacgcccggcatactgcggatacttcgccgcaatcatcggcttgcccatctgcgtccagaacgcgcgggccagcttcagtccggacaccgggcatgcggaaacggcctcggccgcgcccgcagaaccggtcgacaccgaaacggtggatggggaagatgtcgcgtccgcaccggtcttgccctgtgccgggctgtccggcagccgtgatccggactggggcagcgcgcctgcatcgccggcaacacccgcattgtcaaccgtcaccccggccttcgccgcctcttcctcggcctgccgcagattgtcggcggtgatacgccagtagtcggtgtccttgccgtaacattcctcgatcacggccagcgcatgccggtatccagtaaccgcatccgcatgccgtctctcggcaaagcacacctgcgcgaagcccgccagtgcggaggcataatgcgcggaatgttccagatggccggtgcgatagatttccagtgccttggctgcatgccaatgcgcgccctccaacttgtgttcggtcagcagggtcaacgccagattcgtgtgcgagctggccacgtcgatatccgcgtccgggttcacgctcgaggcttcgataatgcgcagcgcttcacgcaactccagttccgccttgtcgggccgattcgtctcgctgtagagcatcgatagattgttgtgcagtgctgcgagcctacggtcggtgggtgccagcgaatgccggcagacactctgcgcctgatgatacaaatcctcggcctgatcgtattgttgggccgcgcgcatcgcggcagcgcaattgattagcgtggtggcccacgcctcggatgtgccggtggtcaagcccatacgagcggccagttccagcgcccgctgcacaatccactgattctccttgtgccggccctgcgagcgatagaagcccatcgtttcgttgagtacggtgagcagtccggcctcgtcgccggcgttttccgcgtccaccatcgcctgttccaagtacggaccggcttcggtggctgccgcgtggcgatcgaaaatcgcgtccagtccgttcaggaattgttgggtatcaaaggttgcgggcgattgatcggcatcgtccgtggcctggttcgcagtagaatcggcaccttgcgctgcggccgccgcatcggtgtcgtcggcatcgtctggaccatgcgcgaattgtgcggcgaattgtttgagcagtgcttcctcgtccataccgccagacctccctgaatcgtgtctgatttcagtctattaatactgtaaacaaacgcgtcagggagtttgctgtgagcttggtctcagtccaccttgatttcgcgcatgcggtgaatggcgtcggtatcggtttcgcagcgccacgagtagaaggccagcagccctacggcaagcagagccagcggcataccgcccagaccggtatagcgatagttcatcgagaaggtggtgagcatcgcgccgccgacaatcgagccgatggcattgccgaagttgaaggccacctgcacggctgcgccggcgatgagctcgccgccgccttggccggcttcggtcatcagcaattgctgtggagcggagatgaagaacaggccgaaggcgatccagaaggtcagcaaagcagtagtgccctggtttcccggcagtagcaaaaccatcagcaagccgatgcaggaaatcgtctgacccagcgcggcagtgccggcgtggcgccatttatctgtgatgcgaccgccgataagaccgcctatcaccatgccgaagccggcaagcatcatcaatagcggtaccaggttagacgaccagccaccggtcttctgcagccaaggggagacgtagctccaccagcagaacacgcctgcgttgccggtgaatacggcggccagaatcacccacggtccacgacgagtaaggaatttgaactgaccggcgatgccggcgtccttaatcggcgcaacgaaggggatccatgccagaactagcacgatggtcattgccgcccatgcagccagaataccgaatgcgaggcgccaggataggaactcagccatcaaggtgcccgccggtacgccgagcatattggctacggtttggccggtgaccattaccgatacggcttgtgcttctttgcccttgtcggccaaggttttggcgatgagtgtggcggtgccgaaaaatgcgccgtgcggcaggccggcaatgaagcgcgcgacaatcagcgtggcggcattgaccgagaacgcggaggccagattaccgataagcgcaatcgccataaacaatatgatgaggttcttcggcggcaccttgcggccgaacaccagaatcagtgtgccgaagcacacgccgatcgcatacgcggaaatgtaatggcctgcggtggggatgtccacgccggtggcggccgcggcctgcggcagaatacccatcatcacgaactcggcggcaccgagaatgaacgcgcccgaagccagtgcaagcagactcttcttcatggttcctctaattacttcagtattacttacaaaaacagtgcggcaatcgattgattcgagcgatatattacggtggtccgccaacaaatacgggccttgccgcgacgcggtttgtcgctgtgcgcggcgggttgtttaccgctgtccgatcgcttggtctgattgttgggttaggaaacgaaaaaccggattgctgatttctcaacaatccggtccagttgtcgggctggcgggatttgaacccgcggcctcttcgtcccgaacgaagcgcgctaccaagctgcgctacagcccgtttggcaacagacgtagatattacattgtggtggtggacaatgcaaatcggcatgtcgcgagtgttgcgtgatggtggattcgccgtgtgtacaggtctctcaagccttgtgcagagccggttttgcgtcatgtgagcgggtgttcagatggccgtacggtctgccgggctcataatcgccggccttgcgtacactgatgaatcatggctgaagttgtcgaaaataccgaaaacactgagaatgaaaccccggccgtcccgcagatgagcaccgtcgaacgtgcggaaatgctgctcgagcaggacgccaccatccgcgagaagatcaagtccggtgccacgctggacgaagccgtggacccctccaacaaggagttcggcccgctggctcaccccgagcaggtgcagatgcgcgtggccaagcgcgcgatgatgcttgaggccggcatcgccccctacccggtgcacttggacgtcaccgacaccatcgaggcggtccgcgccaagtatgacggcaagctcgaggctggcgaagagaccgaagacatggtcggcattgctggccgcgtgctgttcctgcgcaacgcgggcggcctgtgcttcgtgcagctgtccgccggtgacggtaccaagattcagggcatgatctccaagaaggagattggcgccgactcgctcaagcagttcaagcagctcgtcgaccttggcgatcacctgtacctcaagggccgcgtcattgcctccaagaccggcgagctgtccgtattcgccactgagtgggctatcgcctccaaggccctgcagccgctgccggccctgcacaaggacctgaacgaagacacccgcacccgcaagccgtacatcggcatgatcgcggacgagaacatccgcaacatggtgcgcaaccgctccaaggccgtggcctccctgcgccgcacctttgacgaccacgacttcctcgaggtcgaaaccccgatgctgcagaccctgcacggtggcgcggccgcccgcccgttcaccacgcacatgaacgccttcgaccttgacctgtaccttcgcatcgccccggaactgttcctcaagcgctgcctggtcggcggcatcgatcgcgtgttcgaaatcaaccgcgacttccgcaatgagggcgtcgacgccacgcacgcccccgaattcaccatggtcgaggcctaccaggcctatggcacctatgattccatcggccagctggtcaaggagctcgtgcagaagaccgccatggacgtctacggctcgcacaaggtcaccctgctcgacggcaccgaatacgacttcggcggcgaatggaagaccatcagcatgtacgattcgctgtccgaggcattgggcgaggaaatcgtgccgaacggcggccctgagcatcccggcacctccgttgagcatttgggcgccatcgccgacaagctcggcgtggagcgcgacgacgtggagaaccacggcaagctcgtcgaacacctgtgggagcacttctacgaggacaagctttacgagcccaccttcgtgcgtgacttcccggtcgaaacctccccgctggtcaagggccaccgcaccaagcccggcgtggtggagaagtgggatctctacgtgcgcggcttcgagctggctaccggctactccgagctcaacgacccgatcgtgcagcgtgagcgtttcgtggcccaggccaaggacgcactcgccggcgacgaagaggcctgcgacatcgatgaggacttccttgaggctctcggcgtgggcatgcctccggccggcggtatgggtatgggcattgatcgactgcttatcgccttgaccggtgccacgattcgcgagaccatcaccttcccgctggtcaagccgctcgttggctgattaggcatactctggctcccctcagagaggggagccagagttatatatgaaagggattgcttatgtctatcggcttgtgggttcggggcgcgcgtcccaagaccttggccacttccatcgcgtcggtgatggttggggcggtgatggcgtacgtgcatatcgagcggtcgggcacctgcatcgcaatatatccagaaccggcctcctgcgccacggcccgtgaacagcagaccctgctgatggaccgattctggccggtgaccatcctgtgcctgctagtcgcgctgttcctgcaaatcgccgtcaactatgcgaacgactattccgacggcatccgcggcactgacgccgggcgtgacacggacgaatcgaaatcaggcaaaccccagcgactgaccgcatccggactggtaccggccaagcatgtactgttcgcggcgatgatttgcgccgccatcgcctgcatatgcggtgttgtggcggtcgtgctcgcccaagcatggtggttgctggccgtgggcgcggcctccttgctggccggctggttctacaccggtgacaagcatccgtatggatacgtcgggctgggagaagtcggcgtgttcctgttcttcggcttggctgcggtattgggcaccgaatacgcgctgtgcggcacggtggacgtcggcggactattgggtgctgtggcggctggcctgttctcctgcctgatcatgatggtgaacaatatccgtgacatcgacgaggatcgtgagcatggcaaacacacgctggccgtacggctgggggagtccggcgcgcgtacgttgctgattgtgtgctgcgtcatcgcatggatcatcgccctgctgatgtgcggtacattatggtggccgtggggtgcggtgctgttgctctcgggcaccggaatacctgtgcgcatggtctccagcgtgaataaacgtcaattccgcccggctctgcccgccgccagcttccagaccttgctgtttgcggtggtgctggcggttgccgtggcgctatgagagcgaaataataagacgaatactcgtgtttgggcgcacgcggctgtagactgaaccgtatgacttataaactagtactgctccgtcatggacagagcgcatggaataaaaccaaccagttcaccggctgggtcgacgtaccgctgaccgagcagggtgaagccgaagccaagcgcggcggcgagctgctcaaggagaagaacgtccttccggacatcgtgttcacctccctgctgcgtcgcgccatcaacaccgccaacatcgctctggatgccgcagatcgtctgtggattccggttcagcgtgactggcgtctcaacgagcgtcactacggcgctctgcagggcaagaacaagaccgagatccgcgaagagtacggcgacgagaagttcatgctgtggcgccgttcttacgccaccccgccgcccgagatcgacccgaacgaccagtacgcccagaataacgacccgcgctacgccggcgatccggttccggaagccgagtgcctggccaacgttgttgagcgtgtgaagccgtacttcgagtccgccatcgagccggagctgcgcgctggtaagaccgtgctgattgctgctcacggcaacagcctgcgtgccatcgtcaagatgctggacaacctgtccgaggatgagatcgccaaggtcaacatcccgaccgccatcccgctgctttatgagctggacgagaacttcaagccgatcaagccgcgtggtgagtatctggacccggaggctgccgccgccggtgccgccgctgtcgccgctcaaggccagaagtgagcctaagccgctaacacggtacaagctgtaaggggagtcgcacataatgtgtggctcccctttgctatgcctgccaaatc

SEQ ID NO: 1138 - DNA, 4436 bp, Unknown
  R81_24m  MAG No. k141_5600
ccatggcccaggagagacgcccggtcccattccgaacccggaagctaaggcctggcacggcgatggtactgcacccgacagggtgtgggagagtagcacgccgccgcaccacacgtacaggaagcccctcggagcacacgccccaaggggcttcccctatatccgaaaccaacaagacataggctctcgcacctagggtgtggccgaatcgaaagcatatagaagagggaaccctcaaatgacggagagttccctctttgcgtatctggacctataaaggtctagaaattgaaattgtcaggatcagcaccgttgcgcttgccggtgttgatggcggagatggcggtcatatcatcgactgataggttgaagtcgaagacctcgaagttctgcttgatacgctcggcatgagtggatttcggcagcacgacgataccgcgctggatgtgccagcgaatcaccacttgggcaggtgacttgccgtacttggcactgatctcggccaatactgggttgctcagcaggttgccgccggtaccgccgagcggactccaagcctcggttgcgatgcccttggcacgcagctggccaatgagctcttgattggtgaattgtggggaagactcaatctggtctacggcaggtaccatatcgctgtgggtcagcagctcatcaatatgatgcttttggaagttgctgacgccaatggccttggcacggccagaggcataaatctcctgcaagtcgtcccatgcctgctgccagccgtctgccggccagtgaatcagatacagatccacataatccacgcccaagcggtcgaggctttcttggaatgcatccttgccgcggcgtgcgcgaatatcgtcattccacagcttggtggtcaagaagaaatcgctgcgcggcacaccagcacggcgaataccttcacctactgaggcttcgttgcggtaaatcattgcggtatcgatatggcggtagccattctccagagccgtctgcaccgcgttcactgtagtatcaccatccggtgtctggaatacgcccaagcccacctgcgggatgacagtgccgttgttcagcataattgtcgattgaattgccataatgcctcactattcgtagtgttcattcaatttcctattttagaaacaagacgatgcaatgagccgcgtttcgcgggcaaagaattgcgtaatgatggcgtgattctcgttcattaggtcattattgcattcattaggtcaatgggtccagggtcttcggcatcagaacccagtcattacgccattcctgaagagccgtcttacggcataccgacctaatgaacgtgaaatcgacctaatgaatgcaacgagtaagcggctacgataataaccagtagaatcacaacccagattgaaggggagagcacgtggcagaggaatatgtggctgcattcgatgcagggaccacggcgttgaagggtgccttggttgataggcaaggccgtatcgtagccagtgcgagtagtgagcttaaccttattatcaacggcgactatcgggaacagagccccgatcaatggtggcaagctttctgctcggcctccaggcacatgattgagcaggcgcggcaatccgagtcagaattcaatgtgactcgcattcgtggcatcattttcagcggtcagatgcaggatgttattgctttgaacggcgagctcaatcccgtccgcaatgccattctgtattcggatggccgagccgaggaacaggccaagcaactcgccaagacatatcagggtggagtagaacgtttcctgaacaccgttggcaaccggctcgaaggctgcttgccgttgcccaagttgatgtggctgcgtgaacacgagccggaaacgtacgcgcgcattcgtcatgtattgatcagttccaaggactacttgatcgcccaattgaccggcgaatgcgtgggcgatgtggcggcttgttccacagccggtgccatgaatatccgtaatggccaatgggatgccgaattgtgcgaggccgcaggaatcgacatggccatgttgccacacctgcacaatccgcaagacaacattggcacagtgacggaatccgctgcacaacgcaccggtttctccgccggaactgcggtatacgcgggcattggcgatgcgggtgccaccacgctggccagcggtgtcagccgccctggtcaatacaacatcaatatcggcacctcaggttggatcgccaccgtttcgcccgaaccgttcaccggcaagcccggtgctgcgaatctggcatttggtgtggaagaagtcttcgtgaatgccgtgccattcctcaacgccggtgacgtgcataaatgggttaccggcgtattcgctgatggcgattacgcggaagcacatcagcttatcgaaacatccaaacccggctccaacggtgtgatgtgcctgccatatctggtgggggagcggttccccgtaatgaacccgaatattcgcggggcctatgtaggcctcgatccagacaccaccaaggcagacatgatgcgtgccgcgcttgagggcgtggccttctccattcgtcaaggtatggaaagttttgacgccaaacccagcgagatttccctgattggcggcggagccagagaaaatgcgtggtgccagattctggccgatgtgttggagcatcccatcgaagtgttcgccaatgccgatattctgccagcagtggcaatggcctcgttggtattcaatgtaccagacctgctgcaatcagtatgcgaatgcactgtataccagccgaatcctgacaccgcacgcacatatgccgacgcataccggcgattcctgagcctctacccgatgctgcgaacgatggattaggaactgagcatcatgaggcaatcagcgaatttggtccgcaaacatatagcggtcaccggactggtgcaaggcgtgggattccgttattttacggtgactcaggcacgtcgacttggtgtacagggctgggtgcgcaattgccgcgatggctcggttgagctggaagcacaaggcagtagcgacgcagtgcaagccttggttgagcaattagccattggtccgcgatggtccgaagtgagtcacgtcgccgtacatgacatgccgattatcgatgagaccgctcgggcatttggcgtgcgtcaataacctgcatcacgaatccacatcacgcacgataatctcacgatacgggtgaacatgggcgttcctcgccgcttaggccccgcacgttggtacgatggggcgttatgagtgagaacatcatgcaaatcattgacctgcgtggtcagaacctgtctcgtgccgaactgctcgccgcgatgccgcgtgctgcaatgggcacttccgaagccaccgatctggtgcgtccgattctggacgatgtcaaggaacgcggtgccgcggccctgcgcgacttcgaggagaagttcgatcacgtgcgcccgaaaaacctgcgcgtgccggtcgaggcgatcaaggacgccctgaccacgctcgactccgaagtgcgcgccgccatcgaggaatcggtgcgccgcgcccgcgccgtggccgccaaccaggtgccgaaggacttctacaccgacctcgccgaaggcgcccgcgtggccgaacgctggattccgattcagcgcgtcggcctgtatgtgcccggcggcaaggccgtctacccgagctccgtcatcatgaacgctgtgccggcccaggccgccggcgtcgaatcgttggccatcgccaccccgcccgcccgcgacaatgaggaaggcctgccgaacaagaccatcctcgccacctgcgccatcctcggtgttgacgaggtatacgcggtcggcggcgcccaggccatcgccatgttcgcatacggcgccaagggcagcgagccgcaggacggcgacgtgctgtgcgacccggtcgacaagatcaccggcccgggcaacatcttcgtggccaccgccaagtcgctcgtctccgcattcgtgggcatcgacgcggtcgccggcccgaccgaaatcggcatcatcgccgacaagaccgccaacccgagcctgttggccgccgacctcatcggccaggccgagcatgatgagctcgccggttccgtgctgttcaccgactcccccgagattgccgacaaggtgcaggagaacctcaagtaccgcgtgccgcgtaccgagcacgccgagcgcgtccacacgtcgctgtccggcacccagtctgccatcgtgctgaccgacggtcttgaccagtccatcgacgcggccaacgcctacgccgccgaacaccttgagattcagaccaaggatgccgatgctgtcgtcaagcgcatcaagaacgccggtgccatcttccgcggcccgtactccccggtgccgctgggcgactacatgtccgg

SEQ ID NO: 1139 - DNA, 13486 bp, Unknown
  R81_24m  MAG No. k141_6154
atcatcatctcgaactcggccaatgcgcccgagccggagctgacctcggatacgttccagtacgaggctttggccgtgctgcgcaacaaggaacttgaggccagggcccgcgccactgagccgatcgttcagcctcgcagcacgtcggctacggcgtcgcagtccgagtcggaatcgtttgacgaccccattgtggataccaccactccgtcgtatgccgacgccgatgaaccgtacacgcctaccggcacgattcccccgcttcctcccgttaacggaggcactcgcgtatgaacaaatatcttcgtcagcttttcaccgccgtggtcgcgctgttcgtgattctcggcctgtcgtccaccatcatcatggcggtacgggccaacgcgctgaacaacgatccgcgcaacgcccgttcgctgtaccaccagctcggtgcctaccgcggtgccatcctggcctcggacggcacggtcatggccaaatccgagccggtcaacgacgcattcaaatacctgcgtacctattccaacggtccgctgtatgctccggtcaccggcttcttctccatcaaccagaccgccgatcgcggtctggaagcctcccgcagcatgctgctcaacggtgaggccgattcattgatctggcagcgggccaaggccatgctcaccggcactacgaatcagggcgcgtccatcgaaacctccatcgaccccaagctgcagcaggttgcctacgatcagctcggtacgcgcgatggtgcggcggtggccatcgaagtcagcaccggtcgtatcctcgccatggtgagcacgcccagttatgatccgaacaaactggcgacccatgacaccaaagccgcgtctcaggcctacaacgaactttctgcgggccaaaatagcccactaaatagcccactaatcaaccgcgccacctcgcagctgtacccaccagggtccacgttcaagaccatcgtcgcctcggctgcgctggaaaccggcgaatatcagacggacacgaagattcctgcaggctccagctataccttgccgggaaccgccacacagctgccgaacgacgaggcacagggcgatggcgtcaacggacagatctccctgcaagaggccgtcgcatggtcgtccaacaccgctttcgcccagcttggcgtgaaactcggcgcgagcaaggtttcggacatggccaccaagctcgggttcggcagcaccatcaccattgacggcaccgaatccacgggcaccccgatgacggccaccgcgtccacattcccctctgatccgaccgacgacaagcttgcgctggcatccatcggccaaggcgacaccacggccacgccgttgcagatggcgatggtcgcgcaggcaatcgccaacaatggcaaactgatgcagcccacgctggtcgatcgtgtgcgcgccgccgatctcaccgtactttcgcagaccaaaccgcaaaccatggccaacgcgttcagcaaggattccgcagacaagctcaccacgatgatggagagcgtggtgaccgaggccaatccgcagctggccatcgacggcatcaaggtggcggccaaaaccggtaccgcacaaatcggtatcgacaactctgccatcgacggctgggggatcggtttcgcgccggcggacgatccgcaaatcgccgtcgcggtgttggtgcataacacagatgtacacggttcgctcgccgctggcccgatcatgcgcgcgatgatgcaggaggctttgcagcagtgaaacttatcgaaggacagcttattcaccgccgatatcgtcttgattcgcgtcttgcgcaaggcggtatgggcgaggtctggaaaggctacgatattcagctcggccgtgaagtggccatcaaggcgctgcgctcggacatgaccaacgccgaggccaagctacgccgtctgcgtgccgaagcccataattccgccaatctggcgcatccgaatatcgctgcgttgttcgaatactacgagcatgacggcatcggctttcttattatggaatacgtcccctcgaaatcgttggcggatctgttccacagcaagggcgcgatggatcccgtcgaactgctgcccattctgattcagaccgcgcgaggcctattcgtggcccactcgcacggcgtgattcatcgtgacgtcaagccggccaacatcatggtttccgacaccggcgaagtgaaaatcaccgatttcggtgtgagctactccacgggtcagggccagatcacccaggacggcatggtggtgggcaccgcacaatacatctcccccgagcaggcgcagggccagcaggccacgccgcaatcggacatctattcactgggcgtagtggcgtacgagggccttgccgggcatcgtccgttcaccggcaccactccggtcgatatcgccgcagcgcacgtgaacaatcccgtgcctccgctgccggactcggtggacgtccagttacgcgaatttgtcatgtcaatgctggccaaggacccgttggaccgcccgaatgacgcgctggtggtgtcccgcacgctggcacgcatcgaacgccgtctgctggatcagcagaccgaaatggccgacaccgccatggccacgtccggcaatcgactgccgcgccgagtgaccagcacgccacgcattgttttggaggccccggcctcaagattgggagggaataagcaatgagcaccagtatgcccaccgcattggccggcggacgctaccagcttggccagctcatcggtcgtggcggcatggccgaggtccacgtggctcttgacacccgtctgggccgtaccgtggccgtgaaaatcatgcgcgccgatctggccaacgacgacatcttcctggcccgtttccgccgcgaagcacacgccgtggcccagatgaacaacccgaacatcgtgaacatctacgattcgggagaagaactggtttcttccgaaagcggcgatgccgagcgtctgccatacatcgtcatggaatacgtcaagggccagaccctgcgcgacatcatcaaggtcaacggcgcactcagccagcgcgactgcgaacaggtgatgttgggcgtgcttaacgcgctcgactattcgcatcgcatgggcattatccaccgcgatatcaagcccggcaacatcatgatttccgagcagggcgtggtcaaggtcatggacttcggcatcgcccgcgctctggacgattccgcagccaccatgacccagtcgcagggcgtggtgggcaccgcacagtacctttctcccgagcaggcgcgcggcgagaccgtcgacatgcgttccgacctgtattccgctggctgcgtgctctacgagatgctcaccggccgcccgccgtttaccggcgattccgccgtggccatcgcctaccagcatgtttccgaagtcgccacgccgccatccgccgtggtgccggggctgccgaagatgtgggattcgatctgcgccaaggccatggccaaggaccgccagaatcgctatgccacggcctccgagttcaagaccgacatcctgacctacatgaacggcggcgtgccggtggcggccgcgttcaacccattgacggacctgtcgaatatgaaggcccgcaaggaagccgaacgtgatttgcccaccacgccggtggaaccgcagcagcagcccacccaggcattcaacccggtgaccggtcagttcgagcagattccaccggccaatggtgccaactcagcggcgttgcagtcccgtgcgcagcagcgtgcggcggcggccaaggccaagaagcgcaagaagatcattatcggttcggtgatcgcggctattgtcgcggtgcttgtcattgcgggcatcgtgttcgccatgagcggcgcgcccaacaagtccgccgaagacaaggtcaccatacccgaggtgtgcaacgcttccacatccaaggacaacatcaagctcaagcttgagacattgggcttgaagatgaccgaaaagcaagacaccgactccaccgagccggaaggcacctgcaccaagatgagcccggatgccggctccaaggtggccaagggatctgccgtgaaggtgtggttctccgcaggcccgcagtccactcaggttccggatgtcaaggaacgcagccaggaagaggcgcgcagcattctggaaagcgccggattcaaggtgaatgccaccgtcagaaccgaagacagcgccgacatcgccaaggatatggtgacgaaaaccgatcctgccgccggccagtcggttcccaagggcaccaccatcaccatatatgtttcttccggcatgaccaccgtaccgagcaatttggtcggtcagtcgaaggacagcgtgctacagcagtatgagggcaggttcagcttcactgtggagcaggagagctccgatacggtggaggccggtctgattacccgtgtaagccctgattcgggctcttctatcgcacagggcgggtccatcaccatttgggtgtccacgggcaaggagaaggtcgctgtaccgaatatcgccgcaggcactaaatatgccaccgccgaactcatgctcaaggccgtcggcctcaaggcccaggccaacggtccggccgaccccaccgccgtggtggtcggcatcgatcccgtcgccggcgcccaggtcgacgtgggctcgaccgtcaccatcaccacgaaggccgccgccacaggcgacaacaacggcaacacaggagacaacgctggcggtagcggtagcaccggaggcaccggcacaggcggcggcaagtagacggctgctacttcgtgaccttgggctggaggccggccgacttgaccacggcgttgccctggccgcacacgctcagccagttggccaatagacggtagccgtcctgggtcatcaccgactcgggatggaactggacggcatacatcggcttgtccttgaccttgatgccctgaatggtgtggtcatcctgcgtccacgcggtgaccaccagcgtatccggcaccgaatcgggctcaacggccaatgaatggtagcgggtggcggtcatgggattggccacgccctcgaagatctcgtcatcggcatgctccaccgggctggtcttgccgtgcatgatggtgggcgcgtggcccaccgtgcagccgtacacctcggcgagcgcctgcaagcccaggcacacaccgaacatcggcatgccggtggccgcgcacaggcggatcatgtcctcgctggcgccggattcggccggggcgcccggaccgggggagatcagcacgccgtcataaccgtccagtacacccggcgcggccgggtcgatggcgtcgttacgcaccacatcaacagtggcgccaagggtttgcagatagcctacgatcgtgtagacgaaggaatcgtagttatccaccaccaaaatatgcgcggaatcggtcatagggctctccttgagggacgtgtactgcaagacatagtactaggctgccgtcagctcactgccacgaagttcgacatctgctgtaggaatgggatattggcggcggcccaagggaatccccactggaacagcgccgcggcggctgcgaacaacagcagagccagcagcagccatcgaatcggtgccacgccgggctgcagacgcaacagtccgccatagatgctggcatccgggcggcgacgctcacccgcgcgaatctcgcgcagcaccggccagcgccatgccaccgcagcggcgatgaacagaaccagccacactaccagcgcgccgaataccaccttgtccagcgagccaatgcgggaagcgatcgagggggtttcggtggtggagaacttcactgcaccggacgaatcagtagtagccagctctttgggcacgccatcagacactttggcccagtacgccaactcaccatagctgatccatcgatgggtgggggtggagtatttcggctcacaggtggtcagtgtgatcatgcgtttggtgggattggcagtggagtcttccggattgggggcgatcacatacatgtccgtgggcagcacaatctcgtaccgggtgtagtggtagacgtaccagtaatccttggtacgaacgatgatgggatcgccttcctgcaacttgtccacatcgcccaacggctgcccgtagccgttgcggtggccggcgacggcgaagttgccgacctgccccggcatctgggtggtgtcgtaatggcccagaccgtggcgattgagctgctcgagcgtggtgccttccacgatgttgcggtgccattgggagccgaagcgcggaatgtagatctgcgcaatcaagtcgccatatttcgcgtctttcgactgtaccggcgcatcgccctcctgggctttggcgatggtgaccgttcccccgttgttgctggggtcgctccagtcgacggactgggtggtttcgttctgggctcgctccgcctcgacaccggtccaccacatctgccagccgatgtacagggcgcaaatcacggcagcggtaatcagcagttcggcgcagatgccgagtgcttgccagaccaggctccgctggggcgaagacgcgccgcgtactgcggtacgacgggaccttgccctactggcattggccgggtctgccaccattcgtgcggcatcgtcctcggggaagggctgcacgtccgacacggacgcgagatcaatgggcgccggtgcgcagctgtcgtgcctgccgtgtctcattgctgagtctgctcctcatctgtggtctttgacgtatcgaccgtggcatatttcaactgctgcagcaaggcggcggtagcggggaactgaaggtcctcggcattctccaccttgtagccaatgccaaacgcggtcacatattgcttaagaatggtaatggcttcggagtcgttcaacgctgcgcgaagtctttgcgggtcgccaatagcggaaatggtgaacggcggcgagtatttcttaccgtgcaacgacagcacgttgccagaacagatgaccgccgaattgaacagcacccgctgatccataatcatcagcgcatcggcaccgccggcccacaaggcattcaccaccgattcgacatcctgctggtgaatcacgtaatcgttgatattggcggtcgtgccattgttgttgacggcgttctcccataacggagaatcatccagcgttaccgttacgccgctgccgctgagcgcgggcagcatcaggctggaatccacattgctggagtccttgccctgacgccgcgtggcaccgctgccatcggctttgagcgcgtccgtgagattggcgacttgttcggtcaggtcgctgacgtcctgttggagttggttggcctcgtccacgccttgctccaccagatcggccgtatcgctggtgacgtcagccgtacgattgaccctcacgttggtgctcagcagaaaaccggtcagggcgacgacgacgaacaccgcgacaccaccccatagggagtgccgtgcgccatgcttgccgatatgcctggccatgaatttcccgtcttcctgccgactctggtcgccgctttcgagtgtagccactattatgacttttagcctattgaatggagactatgctgatggctgacgaagagctgcacgagaccgactcgaacaaccagaaggactggcagagcgagacctcatccagcaccgctgctgacgagaccgccaacaaagacaccgagcagaacgcagagaacgcttctgccgaggaagacgcggcttacggcgtgaatatggagcaggtgcaggccgtgctcaacgccactgccgataaggccacgctgaccccgcagatgcagcgcatgatgaaccgtcaagcggagaacaccaagcgtgttgaagaaaccatcaagggcaccaagtcgaacccgcgttggttcgtgccgctgttctgcgcgttcatgatcatcggtctgatctggtgcgtggtgtactacctttccccgtctggctcctggccgattccgcgcatcggcgcatggaatctggccatcggcttcgccctgatcatgatcggattcctgatgacgatggggtggcgctgagttccgactcgttgcgcttatctatcggtagatcgtttttctatcgttaggttgttcttagttcttatacgaaaggccggcctcccgtatgcggaggccggcctttttcgtgccttagcctgttcatccacagctatccaccacttatccacgacttatccactacgttatccacagcctgtggatgaattacacccatgtggttttccaccgaatgtggaaaaccatgtggataagtggtggataagcggcgtttctcggtgtatatctcgtgcataactttggcttggcatacatcgccacagcgagggaacagttatacacccgagttatccactgcaacaaacccagtaataccgtggcattcctaacttatccacataagttatccacagtcttatgcacttttctacacacttgtgcacaagtcaccattgtggataactcgttatcgtggataactcgtcattgcgcgcatctcattactgcggataccttcatacggcacacacccactcaccgaacgacgatatccacatcgctaatatccacatcgccgctttccgcacatacactgatgccgggcactgcatgttccgcaatacccggcatcaatcgttttttacagccatatcaagccatatcagtgcagggagccgaaactcatccacccataaggattggccatattgcacaacagaatcaacgcaatgaccagcaccaccatgacccagccgtacacttgcatgcgccattccaggcttttaccgcgccacgccggcacaccactcaccagcagccatgtgagtattccacccactacaaagccgccgacatgcgcctgccacgccacgccaccgaccacgaacggcaaggcgaagttcaccgccatccagatcaacatggagcggatatcggcgccgatacggcgatataccaccagcaatgatgcaaacaggccaaataaggctccagaagccccataggctgccatctgccagccaatgcctcccggagccaccgcagcccacaccataagtcccagagagccgccaaggccggaaatcacatacagtcccaagaaccgccagtggccgatcattcgttccagcactgggcccacggaatacagggcaatcatgttgaacaggatatgcaatagcgagttcggcgcatgcaggaacatcgaagtgatgagcgtccacggctcagccaccagtctgaccggagccgccatgccgaggtacatcaaccaagccctcaggcccggggcaataaatcccagcaatacctccagtagccacactgccacgcacgcaacaatcagcgcccaggtcatcaccggaccaccgcgctcccactggtatcgaatctcccgctgtgtaggaatatgcatgcagtccactgtatcgaaggtctcggatgcgttccacgcgccgcgaagatgctgagccgaccgagggcatgcgggcgtggatgaatcgcccacgaatgtcattccacccaatcgtcacaaacagcggcctagaatagggagcagagtcggtctgaatgggcataccgaccagacgatccctagggaaaggagccgtcatggagaacaagtcttctaacggttggaagttcttcgcgctgctgttcggcggattgctcgccgcgcttgttggtttgtacatctacaagcagcagaacccagattacgatccgtgggaggagccgtgggagaacagctcctcgccggtcgacctgggtctgaacaaggccgaggatgaggccgatggcgaggcggaagccgccccggccgaagcctgatagggcggtctttcaacgcaagaagccccgcaaccgatggatgtcggttgcggggcttcttatgttctggttcccctccctgaggggagccgccccaccgactcagtcggccagaggagcagtatgccagatgtgcggagccgttaagcgggaagcccggtgggcttcccgtaggcggcgacgcgcggcgacagccgcgaggtagaaaccagcacgtagccggcgcgctgctccggcggccgtcaggccagaggagcagtgtgccagatacgttccaaatagtcttccatggagcggtcggagctgaagtagccggagttggccacgttgagcagggccttgcggttccattcgagctcatcggcgtagagggcctcgatctcagactggatgcccatgtaggcggagaagtcggccagggtcatgaaccagtccttggtcagccagtcggccacgagcggggagtaggcgttgcggtcgccgttggagaaggtgccgtcggccaccagatcgatggcctgcttcaggcgcggatcggcctcgtagtaggaggcgggatcgtacccttcggcgtacttcttctcgacctcgtcgacggtcatgccgaacaggaagaagttctcggcgccgacgcgctcacggatctcgacgttcgcgccgtccagcgtacccacggtcagggcgccgttcagagcgaacttcatgttgccggtaccggaagcttccttgccggcctgggagatctgctcgtcaagctcggtggccgggatgaggttctgagccatctcgacgttgtagttcggcagcatgtggacggcgagcttgcccttgacggccggatcgctgctgatcacgcgggaaacgttgttgatcagctcgatggtcatcttggccaggtagtagcccggagcggccttggcaccgaagaacacggtgcgcggagtgatgtcctcggccttgaccttgccggacttgatgtcggcgtagttggagatcacggcgagaatcttcagagactggcgcttgtactcgtgcagacgcttgaccatggtgttgaacagggtgttctcgtcgatatcgatgccgtagtggtccttggcgaagcccacgaatgcgtgcttgttggccttcttgacggcggcgaacttcttgacgaattcatcgtccttggccagcggctcgagacccttgagcagttccagatcggcgacccacttgtcggtgcccaggccctcggtgatgaggtcggacaggcgcgggttggcgagcttgacgaagcgacgcggggtcacgccgttggtcacgttggtgaacttgtccgggtagacgtcggagaagttcttcagggtgacgtccttgagcagctgggagtgcagctcggccacgccgttgacgtgggagccgccgtaggtggccaggtaggccatgcgcacggcgtcgccagtgtagatggccatgtccttgatggtgtccttgtcgacgcccttggccgcaagctcggcctcgaactgcgcgttgatcttctcgatgatctcaaggtgacgcggcagcagctcgccgatcaggctggccggccagacctcaagggcctccggcagcagggtgtggcaggtgtagttgaaggtcttggtggtgatggaccacgcggtatcccagtcgtagccgtactcatcaatgaggatgcgcatgagctcggggatgccgatcaccgggtgggtgtcgttgagctggaagacgatcttgttcgggaaggtcgtcaggtccggcttgtcctgccccgggtagaagacgcggatggcgtcgtgcagggatgcggagacgaagaagtactgctgctcgaggcgcagttccttaccgaccttggtggagtcttccgggtagagaatcttggagatgttctcggccttgacctgcggggccacggcgtccatgtactcggaacggttgaaggcgagcagatcgaactcgtcgtagctcttggcggtccacaggcgcagggtgttcacgcggccggacttgtagccggggaccaggtagtccaccggcacggcgcgcacggaccaggccggttcccaggtcttggtgccgtcggcgttttcgacgaccttgccaccgaaggagaccttctgatcacggttgtagtcggtgtggccccacggctcttcgttggccagccagtaatccggggtctcaacctgcttgccgttctcgtcgaacttctgcttgaagatgccgtacttgtattggatgccgtagccgaaggccggcacgcccagcgaggcgagggagtcgatgaagcaggcagccagacggccgaggccgccgttgccgaggcccggctcgtattcggcgtccacgatgtccttcggcttgaagccaagggcttccacagccttgtcgaactggtcggtcaggccagcgttcagcagtgcgttctccagctgcttgcccatcaagaactcggcggacaggtagccgacggccttggtgttgccgttgacggtgtcggcctgcgtcttgaaccaggagtcggcgaggtggttgcgcacggctttggacgcggcgacatacacgtcagcaggggtggcctgctcggcggtgacgttttgagtgtatttcagttgttcacgaatctcgtcggcgaattgttccgccgtgacgggagacttcggtgcggtgatttcggtcattctgactttccttccgggataagtgcccgtaattattatgccgcgcgataggtatcgtctcacaaacgtaagcatgaactctccgtaacgacgatggcggagcgctcttgcatacgttctcattgagaagcgtatcacatgtctcacagttccgcatcacaccgtatgccatcgtttgcattacggaaaatcttccggatccggtgccatgatggagcatatggcagtaattctcgaaaaagacttgaaacgagggcacgacgcactggtgcaatggcgtgccgcagccctggaactggccgacaacacgccacatcgcctgaccgcctcccccgttctgccgcgcccggtatgggcgatggctgtgcgctactcgctgttcctgctggaacggcgcgcgcccggccccggcgtggaggtgcgcgttgcgccgtggggtgcggtcaagatcctggacggcccggaatcggacccgcataacctgaccccgccggacgtcatcgaactggagcccgaggtctggctacggctggcctgcggcatcaccacgtgggcagaggaaaaggacgccggccacatcagcgcggtcggcgagcgcgacgacctgagtgatctgctaccgctgtaaatcgtcggatgcccggtatcggatgccctttatcagaactgtgcgatgctccaacgctggatgtgctcggcccagcggtccggcgtgggtagggtgatgaggctgcgcatcgtcagcgcgtaagcggcggcagctaccagtacggcggccagaatcaggcaggtcggaccgtagccgatggtctgcataccccagccggcgagtgccacggccacgccataggcaccgtactgcaacaccatgctgcccgctccaacgcggccgagc

SEQ ID NO: 1140 - DNA, 8269 bp, Unknown
  R81_24m  MAG No. k141_6200
cacccaatcgggcattgtgcggctcgaatccgtgcttacaaccactgtgcacctcctgattgacaccgtgtccattttcgcacacgcatgaccgaatcctcggtagatgacgagagttgtcgatgcaggcgccgaatcgaagcatacgactgtcctgctctgttttcacgaaaggatgcgcggcgcgcaacataacaacaccatataatccgcgcgccatgggaactacgtagccattcttccgttacaatcagtgtgacggcttccgcccccgaagaagaaggtgttgattccccttggacgtctcactggcgcatttcctccaacaagtgctttccaacccggctctgaccgtcacaacgttgctgacgctgggagtcatcttcgtcaacggctggaccgacgcacccaacgccatcgccacctgcgtgaccacgcgatgcatgcgcgtacgctccgccgtcatcatggcggccatcttcaacttcctcggcgtcttcatcatgacgcagctcaacgcttccgtggcctccaccatcagcaacatggtcgatttcggcggcgacacgaacgcggcgctcatcgccctatgcgcggcgctgttctccatcgtcgtatacagcgtgggcgcctcgctgctcggcatacccacctccgaaagccacagcctgatcgccggcctgtccggagcggccatcgccatccaaggcggcatcggcggcatcaacatgggcgaatgggtcaaggtgctctacggtctggtcgcaagcctcctgttcggcttcgccgtcggctggttggtatgcaaggccgtgaccctgatttgcgctggcatggaccgccgccgcaccaacgggttcttcacctacgcgcagatcgtgggcgcggcggccatgagcttcatgcatggcgcgcaggacggccagaagttcatcggcgtgctgttcctcggcatggcgttctgcaacggccaacccagcgtgaccggtgtgatgattccggtctggctcatgattctgtgcagtaccatcatgggcgtaggcacgtccgtcggcggtgaacgcatcatcaaatccgtgggccaggacatggtgaaactcgagaaataccaaggcttctcggccgatctgtcaagcgcgctgtgcctgctcgtcatgaccgtgctcggcatccccgtctccaccacgcacactaagaccagcgccatcatgggcgtgggcgcggtacgccgcctctccgccatcaacttcggcgtggtgcgcgacatgatgctcacctgggtgttcaccttccccggttgcggtctcatcagcttcgtaatggccaaactgttcatggtcgtgttctagaaaggaatccacccatcatggcgagacaaaaagacgtgttctacttcgacggattccgccgcagtgcggactacgcatgccaggccgcgaagctgctgtccgaggtcatgcacgacttcaatccggaccagctgcgcgaacgcatggacagcatgcacgcgattgagaagtcggcggacgaggtgcgccacgacatgatggacgaactggtgaccgcgttcatcacgccgttcgaccgcgaggacatcgacgagcttggccacgtgctcgacgatgtgaccgacagcatcgaaggcgtactcaaccgcatgtactacgacaatgtgaccgacatgcgcgacgatgcggtccagatgtcggatatggtggtgcgcgccacggaaagcatctgcgagctggtcaacgaactgccgcgattccggcattccaagacgttgcgcgaactggtgttcgccatcaacacgatcgaaacggacgccgaccacctgttcatcgagtcgatgcgcacgctgcacaccacctgcaccgatccgctgcaggtgttcgcctggcatgacgtgtaccgtcacctcgaacaatgctccgacgactgcgagcgcgtggccaacaccatcgacagtatcgtcatgaaaaacagctgaggttggtttttcataacctccctctgatgagccgagccgtgaagaaaacgccggaggtgtttttaggcaagggtgagtgacaacgagcgaataagaggtcagctgcaagctgtcctgaatcgcgttcgaggtggcatcgcgaagcgatgacggagggagagacctacttgaccaaaggcccctcaccgatgggcgttgagccagaggatggcgagttgggtgcgattggtcaggccgagcttgtccagtatcgcgctgatgcgattgcggaccgtgccttcgctcaggaacagtctggcggcgatgtcgcggttatcgaggccctcggcgaccagcgcggtgatctcacgttcgcgctcgccaagcaggccctcgatggaatcggcggtatctctggaatcgtcggaatcggcaggattcggagtccgttcggtgagcttgccgagcacttccgcgccgagcaccacctgaccggccatcaccgcctgcagcgcaggcccgaccgccgccacatcctgtttgatgagatagcccttggcgccaagccccatcgcctgcgcgatatacgactggtccgcaaacgtggtcaggaacagtatgcgcgcggccgggtccgtggccagaacctcgcgcgcggcatccaaaccgctggtgcagggcatctgaatatcgatcagcagcacgtccggtcggctcgccggcgtctcgaaataacggcgcacggcggcgtcgccgtcatttgccgtccatagcacctcggccgtgccggtggccgtcagaatcgtctccaacgactggcagacgatcggatcatcatccacgattgcgattctcatcaatccctcgattccatggtccaacgcttcttcggcacggatacgaacacacgccagccgtcctcatacggcccgcagaccgcggtgccgccaagggcgcgcacgcgcgattcgatatccgccaaacccatgccgcgcatcagctcatcggccgaaccacgcatatcggcaacgccgtcggcggcgagtcgcgagccgacgcgcgtggcgcacatcgcacgcgggcgggcagcggccgtccgggacccatcggactcggacacggccggccccggatcctgaatgaccaactgccagaacgcggggaagtctcgcaacgtcacgctcgcctcgtgcgccgcactatgatgcaccacgttcgacaatgcctctcgaatcacggtcgcgaaacagcgcgagaccggcgcgggcgccttggcgatgtcgttggccagcgtcacggcgaaaccgggggagatgccgtcgaacgacgtgacggcatcatcgatctgcgcggcgaaatcagtgccgtcatcctcaagatcatgcaccgaacggcgcaccatcgtcatcgcatcatccaacgtcgcacccaacgtggcgaacccttgcgcggcgaccgtatcgttcgtcgcctcggccaccgtcctgccggcctgcgcctgcatgatcgcgcgggtcagcagatggcccacattgtcgtggatctcccgggcgatacgcgtgcgctcgccgagggtcgccatgcgaatcgactgggcgcgttcctcatcgatgtcggcgatgcgcgaacgagtggcccgcgaggattcgcgcgccctgtcctgcgcgtgcagcaacgcgcgccgcgcctcgtccgaggaggcgcgggcccggcccagaacgaatccaagcagggcgaccatcgtcatcaccagcgtctggagacggtcggtgccacgggcgaaccagagcgcgatcggcggcaacagccatatccagcgcgcggcgaccgaaagccacggggccgaacgtattgcatcggcaagggaacggcgagaggccgcggtccgcgagacactgggggagcggccgcttgtcgcagtccgtgccccagttcgggctccggccgaggcgagggccggcagctgtgcagtatcgtaggcgatgagcggcatgaacgcgcaccatgaaggcactgccacggcgatgacgagatacgccgtacacaagacccaagaccattgcgcgggacgcagccattccaccaatccggcgacggaaacggccaacagcaggccggcgatgaacacgccatcgagccgcactccgacaagccaggccaaagccaggcccaacacgagcagcaagcccttctcggccaacacgcgcatggcacctccccggctcgacgctcttccaccaccagtctagcggtgcgcggaacacgacgaacttgacgggcgtgcggaattacccgcatgacggtccaagacaacgggcttacacttcccgaatagatgaggcacaagcgtcggatgtcgtcgacacaaccgtaaagggatgataccgatgattacgcaaagccacagggcgtccaactattcgatggacgagatcagcctgatgccggtcgataaggtgtacaaggccatgcagaccgacgccgaaggactgtaatgacaaatgtcacgcctgtacggccaagtcgtgacgtttgcctgtggcggcgtccggccccttcttgggatgatggaatcgccaaggaagggagtgactatgacaaccgacaacagagcttccgaacacgactcgacaaccaacccggctctggccgtgcacgtcagccaactggtcaaacgctacggcgacatggtggcgctcgactattttgaccttgacgtgaaccagggcgagattttcgggctgcttggaccgaacgggtccggcaaaaccaccgcgatcaactgcatcctcgcgctgctcacctacgattcgggcacgattcgcgtgttcggccagccgatgacgccgacctcctacgcgctgaaacgtcgtatcggcatcgtgccgcagaacgtggccgtgttcaacgaactgaccgtcaccgaaaacatcgactacttctgctcgctgtacgtgccgaagaaaactgaccgtgcgccgctggtcgaggaggccatcgaattcgtcggtctccaggacttccgcaagttccggcccggcaaactgtccggcggtctgctgcgacgcctgaacatcgcctgcggcatcgcgcacaagcctaacctgatcttcttcgacgaacccacggtcgccgtcgacccgcaaagccgcaattcgattctggaaggcatccagcggctcaaccaggccggcgccacggtgatctacaccagccactacatggaggaggtcgaacagatctgcgaccgcatcctcatcatggaccacggccggcacctggcgctcggaaccgccgacgagctcaagaacatgatcgacacgggcgagcgcatcaccatcgaaacgctcgatctggcggattcggcgatggccgaggtccgtgcgctgccgtgcgtgatcgaagccacctacgacggcaaggaactcgacgtgcgatgccgtcgcggcgaacacaacctgaccgacgtgctcgacgcggtgaaacgctccggcgccaacatcggccacctgaccagtcgcccgcccaccctcaacgacgtgttcctcgaactcaccggcaaagcactgagggactgaccatgctcccctcagtcggcaagcaaataacttggctcccctctccgaggggagctgtcaccaaaggtgactgaggggagttcctgagtaaggagacatcatgtggaccacatttctggtcgcattgaaagcgaacttgcgtaaccggtcggcgttgttctggatgaccgtgttcccgattgtgctggcgaccatgttcaacggactgctcggcgggctggccgaagcatacgaactcaagccggtgccgatggccgtcatcgaagacacccgttggcagcaggcggacggtgcccgcaccttcgtagacgcgctggccggggaaacggaatcggcctcagacgacacgacctacgccgaaatcgaccaaaagctgctgaccatcaccacagtcgacaccgtgaaggaggccgaacaacggctcgccgacggcactgccaacggctatctgaccgccgacaataacggccgattggcgatgaccgtgagccgggaaaccgccgtcacagccaaggactccacgcaaaacagcggactggacattagcctcgcggccctgcgcagcgtcatcgacctgtacaaccgcaccgacgccgttacccggcagaccatcgccgacaatccacaggccgcgctcagccggaacttctggaacagcgtcgggcagaacgtcgacatgacccatgagacgacgctcacgcatttccagcctgacgagatcgcccgatactattacgcgctgctggccatgtcctgcatgatggccatgggatactccatcagcacagtcgccgccgcacaggcgaacctgtccgcgctgggcatacggcggaccgtagcgccgctgagccgggccaaacagctcgtcgcgggcttcctctcctgctggctgtgctcgtcggtcgccctgtccatcgcattggcctatatccggctcgcctgcaacgtctcgctcggcggacgcgaaccggcggcgatcctcgcggtcatcatcgcctcgttcatgaccagctcagcaggcaccctgctcggtgcggtgccgaagctctcgtacaacacgaaatacgggctgtcgaccggcatctcctgcacgctgtcgctgttcaccggactgtacggcgggtttgccatgcagatcagcgactggatagcccgcaacgcgcccatactcggcaccatcaaccccgcacagcaggtgacgaacctgttctacgacatcctgtactacgacagctaccggccgttcatcaccacctgcatcattctgctggcgatgagcgcggtattcctcttggccggcatcgcaatgctgaggaggcaacgttatgaacacctgtaaagccacgctgcgcgtgctgttcgcgcaccgggtctacctgatgatctacctcgtattcataggcatcctgatgatgtccatcagctgggcgatgctgacctccgcatccggctccatgtccgcggtgctcgaatcgaccaagacgcgcgtcgccatcatcgaccgcgactccgaccggggtgatatcgccacgtcgatgcgcgcctacctgcgcgattccagcgaactggtggacctcgacgacaccagcgaaacgctgcaacaggccgtcgcctcgaactgggtggacctgatcgtcatcattcccgacggattcgctgacgattatgtcgccgcggcggcggacggcgacaattcgccgaacgtggacacggttaccagctacgcatccggctccgggtcgatggcgcggatgaacgtcggcgggttcctctcgctcacccgcaccgcactgatcggcgcgcagacgagggtcgaccaggcggcgctcgccggcatgatgaacgctacaggaggggccgccggttttgatggcgcgagtctggaccaagacatgctggactcgctgccggaagggcaagtcgacaagccggatatcaaggatctgtcccaggccgccaaaatggccgccgaatcggccagcgatacagacgtgaaccatcagatcgccgtggtcgatacgccgaccgaggagtcggcaagcgctgcggatacggcggtcagcggattcggcggcaccatgaaaaccgcgctgtacccgctgtccctggcgatgaccatctgcggatcgatgatcctgggcgcgttcaccaccggcgaggtgcggcggcgtctcaccgcctcgccccgacgcatggtcctgatgggactccagcggttgctgacgttgggcggattcgcgctcgtcgtatgcgtcggctatttggtgctgtcaatcggtctgatgatggcggcggggctcgatccgttgcacctgagcgtcgggggagtgctgatgacgttcggcgcgacctgcgtgtacgcgctgatgaccgtcgcctgcggattcatgctcagtgagttcgggctctcggaagaggcggccaacgggttcgccaacatcttcggcctgctcatcatgttcacgtcgggcgtcgcattgccggttgacatgatgcccggcgtgatggtgaccatagctaagttcctgcccggctggtggtattgcaccgcgatcgacaacgcgctcggctccggcacggcggaggaaaccggcataagcgtcgccggctgggccggctcgctgggattggtcgcactgttcggcgtgatgttcatctgcatcggcctggccgccggacggttccgccgctcccgccccgccctggccgcgcccgccaccac

SEQ ID NO: 1141 - DNA, 23010 bp, Unknown
  R81_24m  MAG No. k141_6382
acgccacgcgggccaccgatggcgtcgatgacggagaaatcctcgccttcattgccggcgtcggctagagcggacaggccggtgcgtttgttgtctgccaagtctcttcctataaatcagcgaacttcggagaacatcgggccgcgagacagcgtggtcttcacttcggtctgctggtcctggctcagcggacccttcggcttgttgtccggaatgtccttgaagtgttccttgccgttctcctcgccggcttcggccgcggccttggcggccttacgctcagcgggggcgaccggcggatgcatcgggatcagatcgcgcggcgccaaaggctcctcgccacgctcgacgacgatgtcggcgaagaacttgttcagcgcctcggtctccgggctgtccggatcgatagcagccttgccggagaagatgccacgcagcatccagcgcgggccgtccacaccaacgatgcgcgtgttcacggttttgccgcccttgacattgaccggcagcttcagttcggtgccgaacacaccgtccacttcagaagcggccttgttggcttcaagcaggtcaccgcgaacgtcatcccacagtcccagggtcttgggtgcggcaaaggcttcgatctccaggctggaggagccgaaggtgatggtggaaccaagcacttgctgggtggcgcggttggccttgatgcgcagctggatgccctggaggaagggcaggtagtaggcgccgagatccagataatcgtcataatcgggcacgtcctcatcgttgacatcccacgggcctcgctcttcgccgcggccctggtattcgctggccggctcggcgagcacggtctccgcgctctcggcctttgcggcagcgttcgcttctgcggcggccaccttgtcctcatcgacaggctcaacggccggctcggcttccttcttgctcttcttcttgccgaatccgaacagtcccataattcctcgtttcatgtaacggttgcaaccttgctaacactagcactcaggcttagagaaagctgagcatcgcggccgccggtgtccggttcgattcgtagggaggccacaatagtatggccgcatgaccatcaccattaccacgtctaacgtcaacggcattcgtgcggccaagcgcaagggcatcgaggattgggccggcaagcatgcgccggatgtctggtgcatacaggaggttcgcgcgcctcagaacgatgtcgattctattttcgatgaatttggtttcgaatacgccaccgccggcaaaatcgaggcaccggccaacctccatgccatgaacgaggtctgccgggtgaaaggccgcgcgggagtcgggctgctcaccgacttggaagtgcttgacaagcgatatggtctgccaggtctgagcgaggatgtggattcggggcgttggatcgaaaccgatgtcaaaacgcctgagggctatacgatcaccgtggcatccgtgtacatacatgccggcaacaccgatgatccgaccaaaatggaacagaagtaccgttttctggacacgatgctgaagcgcatgggcgcgttgcgggacgaggctgcgcatggcggcaaacaggccgtgctctgcggcgatttcaacatcgcgcacacgccgcttgatatcaagaacgccaaggccaatgagaagcacgccggatttctgcccgaagaacgtgcctacgtggacaaatggctggacgaatacgagttcgtggatgtgatgcgttcgttggccggcgacattcaggggccatacacctggtggagccagcgagggcgcgctttcgacaacaatgtcggctggagaatcgactaccagttcgccacgcccgagttggcggagaccgcacgcggattcgtcatcgacaaggctcccacgtatgacaaacgctggtccgatcacgccccactcacgatcacatacgaggtatgacatattccgtgggacaacatccgaaaatcgacgattttcgcgggtcgtcccacgccccacagcatgagtaatcatcgactacgccaagaatggcgtaattccgggcttcgtgagaaatctgctgtgggacaacactcatgtctatcgattgatgttgatgttgtcccacaatttgtgggacaacatcgggaaaacaccaatttttgcctttcgtcccacgcgaaccatcatgcaaacctgcgcatacgaatattgggttctttccacggatggaaagaacccaatacaatgcgctcaaacgcagattatcagtccagaccgagttggagcttgccgccggggatggcgtcgagcaggtctcgggtgtactgcttctgcgggtggtcgaagacctcgtcggtggtggcgtgctccacgagcttgccatgctgcatcaccacgacctcatcggcgatctggcgaaccacggccagatcgtgggtgatgaacagatagctcaggcccttttcggcctgcaggtcgttgagcagacgcagcacctgatcctgcaccagcacgtccaaggcggagacggcctcatcgcacacgatgacgtccggatccagagccatggctcgtgcgatggcgatgcgctgacgctggccgccggagagctcgttcgggtaacgacccatcacggaagccggcatctcgaccatgtccagcagttccttgacacgattggcgcgcgacttcttatcgccaatcttgtggatgcgcagcggctcctcaatggaacggaagatggagtacatcgggtcgagcgaaccgtacgggttctggaacaccggctgcacgtggcggcggaaaccgagcagatccttggccttgaacgtggaggtgtcgcggccttcgtagaacaccttgccggaagtgggatccaggaggtgaagcaccatgttcgccacggtggacttgccggaaccggactcgcccacgatggccagggtggtgccgcgcttgacggagaaggacacgtcgtcgacggccttgaacatctccttcttgcggggcagcttgaattccttggtcaggtggtcgacggtgatgatgtgctcgcttttctcaagcgtgctttcgccggcgatgtggtggtcaagcagggcgtccgcgttctcaccgcgctccttggcggagatgatgcgctgggaggccagcgacggggcggcggccacgagtcgcttggtgtacgggtgctgcgggtgctgcagcacctcgagggacggaccggattcgacgacctgacccttgtacatcacgacaatgtgctgggcgcgctcggcggcaagacccagatcgtgggtgatgaacagcacggcggtgcccagcgagtcagtgagcatgtgcagatggtcgaggatcttcttctgcacggtcacgtcgagggcggaggtcggctcgtcggcgatcagcaggtcagggcggcaggccagaccgatggcgatgagcgcacgctggcgcataccaccggagaactcgtgcgggaactgacgggcacgggtagcggcgtcgggcagaccggcctcggacagcagacccgcgatgcggtcatccattgtggagccgatgacgtacttcttggcgaggtaccaggcctgatcgtcggccacgccggccttgatgaggtcgtcggccacgcgccaacgggtttcggagcccggaacccattcgttggtgaagcgggcgacggccttgtcgaaggcctcgccggacacgccggcttcggtcagggccttcttggcctcggtcatgagctcgggcagttccttggcgccgaggaaggtctcgtcgtcgttgcccttgacttcgacctcgtcgccggccagggccttggcgagggcggagcgcttctcgtgggccacgtccatgttgttggccttcagcgcttccttgacctgggagccgatacgccacaccgggttgaggttgctcatcgggtcctgaggcacgaggcccatcttggtaccgcgcagcttgtcgaactcgctctgcttggcgccggcgatctcctggccgtcaagcttgatggaaccgttgaccacgtgaccggtgccgggcagcagacccagcacagccatggcggaggtggacttgccggagccggattcgcccacgatggccacccactggccggggtagacggtgaagttggcatcgcgcaccgcatgcaccggcttgccggtgtcagtggtgaagtcgatggccagatccttgacctcgagcagcggaccatgctctttctgcatagccagcatcttggcgttggtgttgtcagtcataatgattctccactcccctcgctcaggccgtacggctcttcggatcgagggcgtccttgacggcgtcgcccatcatgatgaacgcgagcacggtgatggccagtgcggcggacgggtagaacagcaccatcggatcggtctgcaggttggtctgcgcgctggagatgtcgccgccccagctcaccgtggtggtgggcaggccgacgccgaggaagctcagcgtggcttcggccacgatgtaggaggccagcgaggtggtggcgatgacgatgatcggggccagggagttcggcaggatgtgacggaacaggtttctggcaggcgtggagccgagggccgtggaagcggtgttgaattcgaggttcttcgattccagcacggcgcttcgggcgatacggcatacgccgacccagccgaagagcgtcagcaccagcacgatcttccagatggacttggaggtcttgaacatctgaagcaccacgatggcgccaagcagcataggcagcgcgaagaagatgtcggtgatacggctcagcaccgcgtcgacccaaccgccgaagaagccggcgacggcaccgatcagggtaccgacgatcacgaccagtagcgtggagagcacgccgacggacagtgaggtacgggtgccgtagaccacgcgggtgtacacgtcgcaaccctgcaggtcgtagccgaaggggtgtccggcggaggcggggctcaaggagttgcccagatcgcaggcgttcggatcctgcttggtgaacagaccgggggcgatggccaccacgatgatgaacaggatcagcaagccggagatgatgaacagcgggttgcggcgcagggttcgccatgcgtcggcccacatgctggtggccggtgcggattcgtcgacggaatcgacgtcctgcaacggggtctcgtcgagaggagctacgtaacggtcctgaccgggcagggtttccatgaagtattcggttcctggctcgccggtctggttgagctcgttttcagtggtttcgtttgccatgtgactcactcctccctatcacgcgtaacggatacgcggatcgagggccgcgtacagcatgtcgacaacgaggttgcacactacgaaaatcagcatgagcaacgtgacgatggacaccaccaggtttgcctcgcccttcagaatggactggtaggtgaggaagccgatgccgtggatgttgaagatctgctcggtgatcatggcaccacccatcagggcgccgatgtcctggccgaggtaagtgacgactggaatcagggagttgcgcagcacgtggcgcagcatgacctgaccgttcgacatacctttggcacgtgcggtgcgcacgtaatcctcggcgatgttggaggagatttcggagcgggtcagtcggatgatataggccatcgacaccgaaccgagcaccatggccggcatgagcagatcaaggaagccggggtcggcgcctgccgtcaccggcaatatcgcccactgaataccaaagacatattgcatgacgaagccggtgacgaaggtcggcacggaaataagcagcagagagacgatcaggataacggtgtcgtaccacttgcccttcttgaggcccgagataatgccgaagaccacaccgaaaatcgcctcgaacacgaacgccatcaagccgagcctgatggtgaccgggaaggcgcgggtgatttcgtcgagaacgggctggccggcgaaggtatcgccgaagttcagggtcagtgcattcttcaggtagatgaagtactgaacgatgaacggctggtcgagatggtattctgcgcggatctgggctgcgacggcctcattgacaggcttgtctccgaacatggccttgacggggtcgcccggcagggcgaatacaagggcatataccagaagagtcgtaccgagaaccacgggaatcatctgcagaatgcgtcgcagaagatacttacccatacggttgctccttatttcctagaccggccagaaagggtatagtacgcccccgccggtcgataaatactccgacagtttaccgcatgcccggactgtgatatgtaaatttgcgttaacgcaaggtttgagattgggcaatgctggtggatatgtccatggttgcggtcggatagtggatactttaacttggttcccgatggcgtgagcaagcacccctcacacaacaaaaagggcggggatcttgcgatcctcgccctttatttccgaactgcctaacggtatccgttcagtgagtcagactcacttcttggacatctcggtgtaggtcgggaggttctgccaatcgaaggcgtagccggacttcacgttgagggaagccgcgccggaggcgttggagtagtacagcgggatggccggaaggtcgttgaggaggatttcctcagcctgctggtacagcttgttggcgtcatcggtgctggaagcggcagcggcctgcttgcacatgtcgtcgaaggccgggttcttgtagtcaccgtcgttggagccgttgccgtcagcagcagcggtggagtacagctgccacaggtagttctcggcggacgggtagtcaggctgccagccggtacggaaggcgcccttcatctgacggttggtgacggcgtcacggaactcctggaaggtcgggatcgggttggtggccgcgtcgatgcccaagttgttcttgagctggttcacgacggcgtcgtaaatcggcttggcaccaccatcggcgttgtaggagaaggtgagctggccgtcgtacttggagatggcgtcagccttggcccacagttccttggccttggaggcgttgaacttcaggttgtcggcacccttgagggagtcggagtagcccggggtcttcggggaggtgaactcggtggcggcggcggcgttaccgttgagcaccttgtcgatgagctggtcacggttgatggccatggagatggcctgacgacgcagctggccttcctcgtcgttcttgaagtggtcaagggaggacgggatggtgaaggtctggatgacggagccggcctcggagtaagcctggaccttcttgtcggtcttgaaggtcttggtgaaggcagccgggacggattccatcacgtcgaggttgccggcctgaatgtcacggtaggcggcggagtcgtcggtgtagaccttgaaggtcacgccgtcgttcttgggctgctcgttacccttatagtcagggttcttgacgagggcgatttccttgttgtgatcccagtggtccagcttgtacgggccattggagacaggcttctcgccgaaggccttcggatccttgtagaaggattccggcagcggggcgaaggccgagtagccgaccttaatcgggaacacggagtcggactggttcaggtcgacggtgaaggtggtgtcgtccacgaccttgaggccggagagctgctcgtcacccttgaggccatccttctgcagatcgtcatagccggcgatggtggagaagaaggaggagcacttctgggcgttcttggcgttggccacgtaggaccaggccttggtgaaggactcagcggtcaccggagtgccgtcggtgaacttccagccagacttgatcttgatggtgtactgggtggcgtcatcgttcggggtgatggactcggccacttcgttggaagccttgccgtccttgtcgaaggagaccagacgggagaacagcaggtcgaccggcttgccgccgccggtttcgttggtgttgcccgggatcagcgggttctgcggttcggagttgtacgcagtgatgatgttggagccagcggtgttaccggaggcagcgttgctgttagagccgccgcaggcgctcagcagcatggccacggagcaagccatggcagcgaaagcaagagctttcttcttcatatgatttctcctattcattaggttgcaggacgtctcagccccgcctcatgcaaacggggctggattccccgtcaccgtgagacttgcatctcacgatgtctcgaacaatccaaccccgttgctgattacctgtcatttttgcgcacttgggagacaagcagtgtattttttgttacacccatgtaaaattcaggggttcttgccggctaggttcagtctttgctgagtttgttaaccaatgtccacatagtggtcatgcccgcggaaaggcctgtccgtaacggttcttgagctgctcgatggagacgtgcgtatagcgttgtgtagttttcaaggaggaatgcccgagcatctcctgcacctccctcaaatcggcaccgccgtccagtatgtgcgtggcggcggaatgacgcaacgcatgggggctgatgtccggcacgccggcctctcgggccgctctgtgcacgatgtcacgggctatgcgttggtcgatacggccgcctcgtgcgccgaggaacagggcgttggcagcacgggacttgactgcatccgttgccgtacgggccagtaccggccgcccctgttccagccaagtctccagcgcacgctgggcgggtagtccgaacggcaccacgcgttgcttgttgcctttgccggtgactttgatggtgcgattggagaagtcgatgtcggcgatatccatcgacaccagttcggcgacacggatgccggtggcatacagcagttcgagaatcgcggcgttgcgctgcgattcggcggtgactcgggcgttgtcgcgcttgtctgcacgggcgggtgcctcactgcggtttacggtatcggccgacttatcagctgtcttgccgctgccgctgccggacgcggctgccgctcccccatcgtccttgtactggtttgttgcaacggcatgttcagcgacatccaataattgctcggcctgggattcggtgagcaccgcgggcagcgtgctgggaatcgagggagtcatcagtgtggcggccgggtcggtggtggtcagcccatgctcataggcccacgcgaagaacccgcgcacggccacggttttgcgggccatgctgctgcgggcgtgatcgcgcgattccaccgccatccagctgcgcagatcatccagcgtgatctcgttcagatcggtcacgccgcgcagctcgaacagatgcaggcatgccgtgagatccgcgcgatacgctttgagcgtattcgctgacaggccgcggttggacttcagataggagacgaaggagtcgatatcgccgtcgaactgcgtagatgacactctcgttctcctccgaattctttatggccttgggttacggccggggtggcgtgttacgccgctccggcacgggtttcaatgtggcaatctgttcctgatggatggtcacgttctgggccgggcgcgaaccattggcggcggcgtcacgcaccatctccaacgtgtatccatcccaggaaaccacatgccccacatagtcgcggaacttcatacggtggtcgaccgggtcaatgccgtcggtgatgcgcaccaccacgcgggcaccggccggaatctgccttggtaacgtcatacgtcatcatccccttagccatccgccacatcaacttctatgcgtttcctgaaaaacggtacagactaccttactcctttgggtctttcgaacagcggagccacacggtcttctcacgaaaacaagcgggaacttcatccccctcgcgcagccttcttcgtgacgggcggcgaggggaacctgcacacgggctgcatggcggggcgcagttacatggcggggcgcagttggacgatggcctgacgcggatggatgaaaccggtgatggcttctccccggcgtgcggagaacagcaaggtctgctgccagccggcttcggggacggcgagctcgcgttccgggaatccggcggcagttgtgccggcttgctgcgcggtggccgtaccagcttgtgcagcggtgatgccggctcgcgtcacggcggccttgtaccggcggaaggggtcgccttcggcgaagaatcccatcacatcctgctcgccgtcggcaccagcgtgcagttggtcggccatatcggtcagacgtgccgccatgcggcgcagcagcacttcgacgttcagcgagtcttcctcgaccatcgcgcgcgtgcggtccgggtcggtcagggacacgcgggtcatgtccctccagcagccggcagccagcgcggcggcgatgttgcggtccgggttggcgaccagttcgttgatcagcgcggtggacaccacatgcggcatgtgggagatcatcgccgcggccttgtcatgcgtttcgtcgtccacgacgatgacgcggttgccgacgtccttggtaatcatcgcggcgacgtcgaggaagcggcggtagtccgtggactcgtccacggtgatggcccatagggcaccgtcgtacagatgcgggtcggcggcctgccagccggacagttcgttgccggccatcggatgggcgccgacgtagcacttccccagcgcggcagccttgacctgatcgcggaccatgcccttgactgagcccacgtcggtgagcgtggtgttcggatggtcgcccataagcggggctagggcggcgaggattgagggcatcgccttgagcggattgcacagcacgaccacatccggctcggcatccatgagttcggagagcgtgctcttgcagaaaatgccatcggcttcggcctgggcgtaggggtgcgagcgatggttccacgcgatgacgcgtacgccgcgctcggtcaggcggcgtgcgagcgagccgccaatcaatccgagtccgacgattccgactgtgtctaccacagcagttccttccttgctccctcggcgtactgccagccttccgacgcgcgattggtgatgtggacgccgccctcgggcagcatccaggcgtcgaccggcgggttcgggcgttcgcggcgtgggtagacggccagggtttttgcccagtcgccgtgtccggcgatctcttccagtgcggtgcggaatcttggctcccagggggctgcgtcaagggtggcgatgaagctgtaggttccgtcgtggcctttgatcgggcgcgagatgaagctggtcatgttcagccccgcatcacgcaggacgtccagcaggtcggcgagcacgccggggccggtgaccagcgggatgaaggtgatgatggtttcgaagtcgccggcgtcattgcggtgggcgcgggcgttgaattcctggaccacatcacgcggggcgatgacaaggaattcggtgtgcgcgccatcgaaatcctgcacatgttcggcgagggtgtcgagatcgtagagttcgccgcagatgctggggccgagcgccacgcggccgggcttcaggtcgcggcaggcggcggcgttggaggatgcgggttcgggctgcaaatggtgttcggtgatgaaccgggtgcattgggccaggccgtgcgggtgggcgctgacggggttgccggtgcagtcgcagatgctgtggccgcgcacggtgaaggcgttgaaggccacgtccacactgatccgggcgaagccggccgcgtcgggggcgtcgatcagcgcgtcgagattcgggaccacatagccttcgacgttgttttcccatgcgatgacgccccagccttggcgcaactgtacggcctgcatgatcgcgggcacgtcgggcagggcggtgaggtcgaagtcgccgagtgtggcgaactggtcggcggccgtcattgccgcctgatgggtgaaggtgccttccgggcccaagtaaaacagtttcatgcgtgccataaggttctatggtagcggccgtaatcccctacgcccgccgatacgcgacgcattcgcggaaatgtgccgccatatatagttacgcgcgcgattcagaatgagtgggaataacgaaccagcgggcgggaagaatgagcaggacgacttggaccagtatcaggccgtacagccagatgtagccggcatgctgggagaagaacggcatgtcgccttggaatccggcgacgatgagcgctttgccggatgtggtggtcagtgccatgccccatgcggtcagcgaggaggcgatgaggtgcagggccagtccgaccgcgcccatgcgcgaacgggcgcaccatgtcgataggccgatcagcagaaatgccagcaccagaccatacggaatactcagttctgcacccatacggtgggcgaacgtgcccacaaaggcggaagccacgcccgccgcaatcgtgatcaacgatttgaccagcgcgttctggcgatacgaccacggacgcagttcagtagtgctcttcacagtcatgcgtttcagtataggtggggatatgacttggcgaggaataaacttggctcccctcagagaggggagccagagagaatggtcggctacagtcgcaccagatcacttaccctgctgggcggcgttctggcggcgctgcttggcgcgccacttgtaccagtcctcacggccgaggatgatcttgcgcacgcggatggactcaggggtgacttccacgcactcgtcctcgttggcgaagtccagggactcctcaaggctcatcttgatcggcggggtcagggtttcgagcacgtcagcggtggaggaacgcatgttggtcatgtgcttggccagcgtgatgttcacatccagctcgtcgggcttgttgttcacgcccacgacctgaccctcgtacaccggggactgcggttcgacgaagaagttgccacgggcctgcagacgctgcatggcatacggagtggccacaccctgacgatcggaaaccatggaaccgttctgacgaatggtgatggcaccagcccacggagcatagccagcggagatggaggaggaaatgccggtgccgcgagtggcggacagcagagccgtgcggaagccgatcagaccacgggacggcacggtgaactgcaggcggacccaaccggagccgtggttggtcatgccgtccatacggcccttacggtcggccatgagctgggtgacggtacccatgtactcttccggcacgtcgatggtggtattttccatcggctcgttgaccacaccgtcgatcttcttggtgaccacctgcgggcggccgacggtcagctcgtagccttcgcgacgcatctgctcggcgagcacggccagcgccagctcgccacggccctggacttcccaagcgtcggggcggtcggtgggcaacaccttgatggagacgttgccgatgagctcgcggtccagacggtccttgatcatgcgggcggtgagcttgtggtccttgccctcggtgccggccagcggggagtcgttggtgccgaaggtcatggagatggccggatcgtccacggggatgagcggcagcggcttcgggtcgttggggtcaacgatggtctcgccgatcatgatgtcgttgacgccggcaacggccacgatgtcgccggggcccgcggactcgaccggggtgcgctcgaggccctgcgtgcgcagcagttcggagacgcggaagttctcgagggagccgtccacacgggacaggccgtaggtcttgcccttctcaagggtgccgttgtagatacggaccagaccgagtcggccgaggaagtcggaggagtcgatgttggccacgtgagcctgcagcggggcgccttcctcgtattcgggggccgggatggtggagatgatggtttcgaacagcggctcgaggttgtcgttgtccggcaggccaccgtcggcgggctggttcacggaggcgtagccggccttggcggcgcagtagatgaccggcatctccagcagctggtcaaggttcaggtcgatgccctcgtgctgcacgtcgtcggccaggccgagcagcaggtcggaggtttcgccgacgacctcttcgatacgggcgtcggggcggtcgaccttgttcacgcacaggatgaccggcagcttggcttcgagggccttgcgcagcacgaagcgggtctgcggcagcgggccttcggaggcgtccacgagcagcacgacgccgtcgaccatggagatgccgcgctcgacctcgccgccgaagtcggcgtggccgggggtgtcgatgatgttgagggtgatgccctccgggtggccgtacttggcggccagcggaccggtgtattccacggccgtgttcttggcgaggatggtgatgcccttctcgcgttccagatcgttggaatccatcacacgatccggcacttcctcacgctcggaaaacacgtgcgactgctgaagcatggcattgaccagggtggtcttgccgtgatcgacgtgagccacaatcgccacattacggatatctccacgaaccgccatcgaaacctctcttaatactgattttcttgcgtaatcgttcggtacttgcgttctcgagtacttgctcttggatatcaacctgtacctacacacaaaccgtcacgatgttactggcacaccttgacacacaacgggcccggctttctgagaattagtcacatgtcatctggcttgcgagactttttgtattccacactctcgactcccctccctgaggggagctgtcgccgtgggcaactgaggggcgccaagtgtatcccctgaatctcccctgaatcatccctgagtacagcaccgtcatgggtagttactgagtaacctgatatccaacgatagttactcagtaaccttcgcccaaggcaaaccgtctatgcaaaggggatgcggtatggcaatcagagaagcgctattagcactgttggagcgaggcccggccagcgcctatcagcttaagaaggacttcgaccgcaccatcggtctgacttggccgctcaatatggggcaagtttccactacgctgcagcggttgaaccgcgacggactgattgaagagaccgcgccgactactagcggatccaatgatgtcggcaccgcagcggccgcaccattatggcgattgaccaattccggcgcccaagagcttgaccgatggtggcgctcccccattaccccggaacaacgcggacgcgacgaactggtgatgaagctggccgtcgccgtggaaatacccggcctcgatgtttccgaactcatccaacaccaacgccacgctttgcagcaactgctgcacgacatcacccgactgcgccggcaaacaccgcccaccgaactcgccacacgtctagtactcgaccaccatattttcatcactgaagcggaattgcgctggctcgataccgtggatgagacccagctgcgagcacaactggcgcagcaccccgtttcggcacctctcacggcaagctcagccgcactcaccgccaccattcaatagtgcataggagcacatcatgacttctcccgttctttcttctctcccgcaatcttccccatgcgcgctggaattacacgacgtcactcgcgttcacggcaaagatgcacgtcgtgtcaccgcgctcagtcacgccaatctcacgcttcgcccgggtgaattcgtggccatcatgggccccagtggttccggcaaatccactttgctcaatcttgcgggcgggctcgatgtgcccacgcaggggcacgtgctggtcgaaggccgcgatctggccacactgtcagtggccgaacgcgcggccatccgccgcaaatcgataggctacgtgtttcaggatttcaatctgctgccttccctgagcgcagccgagaacgtgtcgttccccttggaattggatggctggaatccccgcaaggcacgtgaggccgcgatgcaatccctcaatgaagtgggggtagccgatatggctgatcgccgacctgaagacatgtccggcggccaggcgcaacgtgtggcgattgcccgcgcactggtcggcccacgccgtctactactggccgacgagccgaccggagctctggattccaatgccggcatgacgattctcgaagtgttgcgcacccgcgcagatcgcggcgcggccgtactgctggtcactcatgagcctcgcttcgccgcctgggccgaccgcacggtgtttttgaaggacggccgtatcatcgatgaaaccggctccagcaatatggatgatttgctcaaccttgaggaaaggggagcatgatggcacgcgcagccctcaataatcttgccaatgccaccgtcggtcgctctgcccaaattccccatgccgctaggccaagccttggcgcacgttgcaaccggtatcgggccgcgctgcgactcggctggcgcgacgcactacggcacaaggcccgcaccctactgtccttgctgctggtaatgctgccaatcgccgcaatggtggcctccatcggtatgaccaccaccataccgcccaccagatcgcgtgcgctggcgacaatcccggctgatacgcaggcggtcatcaccgccaccgccaggccccgcaccggccaaccgttccggcagtcacccgaaagcggcggcacgtggcaggacgatccctcccagcagccggcctcggccgccgagcttgcgaagattctgccgcaacaggatcggctgctcccgtattggcagtcgcccgaactcatcgccatcaccggcaccgcgttgcaacccggcgaacagaccaaggctgggatcgacgtgaaaagcgggaacgacattgatctgaacgcggcctccaccgcgaccatgaccgaggcttcacctgaggcattgcaacgaatgttgccgaagctggtcaagggttcggcgccgcagaataatacgcagattgtcatcagccgcacattggcggataatctcggcgcttctctcggtagcacggtgacgttcgtcgctccgccgttcgatggctggatgagcctggacgggcgcatcggcgaggcggtggccgacactcagcgtgcttggacagtcagcgggctgaccgatgaatccgaagccgcggcatggggcttggaaggctggatgtcagccatattggaatctgatggcgtcggcgtggatggccattatttggtggtcggtccagagccggtcacgtgggcgcacacccgcagcatgaacctgttgcaggccatcgtcatttcccgccatgtgctgactgacggctatccgcccgcatcgcagctctacccgatgcagatcgatgcggctaccatgttgaaccacatggtcactgtggtcatcaccatgctggtgggtatgttgctggtactgtttctggtcacgcccgcgtttacggtgtcggcagatcagtcacgtcgtgtgcttgggctcgcggccgcatccggtgctgcaccacgtgacctcagtcgaatcatttcctcgcaaggtctcgttatcggcgccatcggtggcgtgctgggctcggcattgggattcgcgcttaccttggcggccggccctgcgataggcgcattgcgtggatccacgccgctggagatcctgcacggattctcgtggggctcgctgccgatgggtattgtcacggcaatcatcattggatttgccgcgacgattgcgccggctcggcatgtggcgcgtatgcatccagtcgatgcgttgaaggattgcccgacaagagaggaaatcggctacggtgaatccgcgaatggcgtggatacgaagcttcgccgtaatcctttgagactgctccgtgttgcggttggtccgattctggtcttggtctccatcgtatgcgccgcgctcagtctgacattgccattgcccacgctggccgatcacaatccgggcgcggttccggccggaaccgaaacgcatatggctctgcttgttgccacgattttgttggctgtcatagggcttgcgttgtcgattcgcacttttgcacggtggtgcggcaaagcgggttcccaactgaacatcggcgcacgcctggcactcagggatgcagccgagcatcatcgacggttcgttccggcggcatgcgcggtgctgattaccatgtgcatcgcctcgtacacactggtaatcaccggctccatggtggcggaccagcgaaattccacgatgacgatgacgtatggaccgtcggggatggccattggggccgacgtgcatgtcagcaatgagttcgaccgtgctgtggtgtcggatgcgatacgccggcttggcaaagagacaccgatacgcgctcattacccggtgtacaccgaggatgtcaagcgatggtcaaagctcaatgatacgaccgaagtcgattccgacaagttgaacgccgaacacggctacatgtatgccgctgcattgctcccggccggtcacacttgtgataacccaacgatccaagagcaaccggacacgtccacatgggtgggccaggatgccgcttcggccctgtatccaaacgttccgatacgttgtgtgccgatagaccgatcccatcagccaacgtattcgaatatactgccgagtttccgcggcgtgaatctcattatggatggcaatgcgatgcgtttgtccggcttcccgaacgcggatgaggcggcacaggtgcttgatgcgggcggtgtggtggtcggcgatgccggcacaatcgacgcgggaggtatggtgcgtgtggccatttcgccgaatccggcaattgcaaacgaatctcaggccacacatatcgagaagcgcaaggccatctacgtgcgcggcgcgtacccgctggtgatgagcccggcaacagcacaggcgctcggcatcaaacaattgcagtatctgggtgagtatctagacttcgccggtggcaactcccccgttaccgtaaagaaggcctcagcttatgcaatcgaaaatctgccgctggcatccacgagcactgacgggaatcgcctgccgtggggtgacaatatggcattggtgcccattggcctgttggcattgctggcactgatggccacgctcgtttcactgctgctggcccgcacgcaggcccagcgcgacatggccacgatggtcgccgtgggcgcgccaccccgattcctcagacgttacggcctgacgcaggctgcggtgattctgctggccggcgcgccagtgggcgtggtatccggcgtggcgttgggatggctgcatgtggcatggaaccgcaggatcggtgtggacggtcattggctggaaaccgtgccgatctggggattgcaggcggcgctggcattcggcgtagtggtaaccggactgctggtggcgtggctggtcacaaaaccaccgcgcaatctcacccgtcgttccctcgattgatcagtgacatacggcaacccttgccgtgtcattcgggagctataagacaaaaagtggcccacacattggtgtgggccactttagtagcgaaggctgaagtgtaatcagtcttcgagattgaggcctttgcgctcgggcaagcagagggctgctatgcaggcgaggatgaaggcggcggcgaagatgatgaaggccacggccttgttgccgccggacagggtcaggaaccacggcatgaggagcggcgcgatgatggcggcgatgcggcccaccgcggcggcggcaccggcggccacgccacgcaggcgggtcgggtagatttccggggtcacggcgtacaacacgccccacgcaccgaggttggaggcggacagcagcatgccgaacacgagcacgagggccgctgatccggcctgcgagaacgcgaaggcggccacggcggagacggccaggaagatgctcagcgtcttgcggcggccccagacctccaccagccaggcggccaggaagtaaccgggcagctgggcgatggagatggcgagcgtgtagccgaatgacttggtcagggagccgaactggtcggcgagcagcgacggcatccatgtgaacgcgccgtagtaggagaagttcacgaagaaccacgtggcccagatggcgatggtgcgggccaggtacttggagccgaacagctcgcgcgtcttgatcttcggcagcggcttgcccttgggagaggttaccggggccactcccccggcttcctcgaagtagcgcacggccttttcggcttcgtcttcgcgacccttggcttcgaggaatcgcacggattctgggatgtgcacacgggtgacaatcgcgtagagcagtggcagcgcgccgatggccagcgcccagcgccagccccagtcaccggtgttcgggatcacgaagtagccgattatggcggcgatgatccagccgacggcccagaacgattccagcagcacggtcatgcggccgcgctgtttggtcggcgaaaactcggagaccagcgtggaggcgaccggtagttccgcgcccaagcccagtccgatgatcagtcgggcgccgagcagcatgccgagcgaccaggacagcgccatggcgccgttggcgatgccgaagatgatcagcgtggcggtgaacacggttttgcggcccacgcggtcggcgatgaagccgcccaccgccgcgccgatggccatgccgacgaagccgatggacagcacccatgacttttcggtcggggtgaggttgaagtgcgggtcggcggcgatggcggcgaccacgaaggaaacgaggccgacgtccatggcgtcgaatgcccagccgatgccggaggcgacgaggagtttacggtgcgccttgttgaagggcagccggtcgaggcgctcgttgcgggtgagctgcgcgggttgcgctggagtggtggtgctcacggcgtttcctttctggtaagtggcgtcagatttagtgtcgggtcaggtcggtgtaggactcttcgatggccaagctgatgcgttcgacttgttcgcgggtcagcggcttgcggaaggtcatgcgtaatgccgatttggcgatggacggttcgaggcccatcgccagcaacgtggcaggaatctcgtggcgcccgatggcgcaggccgagccggatgaggcagcgatgccacgcgcgtccaggtcgacgagcagcgcttccccggtgacgccgggaaagacgaaggaggcgtgaccgggcagacggcgcacggggtcaccggtcaggtcggcgcggggcgcgacccggcgaaccgcgtcgatgagcgtgtctcgggacgcgaccaactcacggcactgcacctgcatgcgcgcattcgattcgttgagtccgatggcaagcgccacggcgccggccacgttctgtgtgccggagcgcaggccgcgttcctgccctccgccggacagcaccggttcgatgggtgtgcggccgcgtaccagcagtgcgcccagtcctttgggcgtgccgaatttgtgtccggatacggacagggcgtccacatcccagtcacgaaaacgaatcggaatctggccggcggcctgtacggcgtccacatggatgggcacgccgtgcgcgtgggcgatgcggaccagttcctccacgggttccacggtgccgacctcgttgttggccagcatggtggagaccagcgtggtacgttcgccggcctcgccgtcaagctcgcgttcgagcgcgtcaagatcgagatgcgcctgcgcatccacgggaatgcgcacgacttcgaagccgaaccattcgtgcagccatgccgccgattgggccacggccgggtgctcgatagcggaaatgataatgcgcgggcggctgcttgccagttgtttgccatcggtttcgtcgagtccgtagaccggccgcaggcccagtttgcgcatgcgcgccatggcgatgcctttgatggccagattgtccgattcggtgccgcctgaggtgaagatcacgtcatccggccgggcgcccaacgccgcggcgaatgatgcgcgggccgcgtccagcgcgcgggccgcggttttaccgggctggtgcacactggccggattggcgtaggcctcagtcaggaacggggtcatggcctcgatgactgccgggctcactggttcggtggcggcggcgtccaggtacagttcaccgggttcaccggatgcgttgggggtatcggccatgactagttccaatccaatccaaggtcgatgctgcgcaccgagtgggtgagcgcgcccacggagatcacgtccacgccggtggcggccacggctggcactcgttccaggctcatgttgccgctggcttccacgatggccttgccgtcgatgagctccacgccgcgacgggtgtcgtcgagcgagaaattgtccagcatgatggtgtccgctccgccggcgagcacggcgggaatctggtcaaggcggtcgacttccacttcgatatgcgtggtgtggcccacctgttcgcgcacgtggcggatcgcgccggccaggtcgatgccgcgcgcggcgagcgccgccagatggttgtccttcatcatgaccgcgtcggacagtccgtagcgatggttgtggccaccgccacagaccacgccgtatttctcgaacgggcgcaggccgggcgtggttttgcgcgtatcgacgatgcgggtgcgctcgtagcggcgtggccgggtgacgggtccgtcatagtcgtcgccgtagatggcgttcaccgcgtccacgaaggcggcggtcatggtggcgatgccgctcatgcgctgggtgaagttgagggcgatgcgctcggcggtgagcaggtcgcgtaccgggccttccacggtggcgagtatctggccgcgctggaatcgctcaccgtccttgacggtgacggtgacggtgacggccgggttctgtgcggcgaaggctgcggcgaacacgtcgatgccgctcatcacaccgttttcgcgcgcggtgaggtgggccgagc

SEQ ID NO: 1142 - DNA, 9021 bp, Unknown
  R81_24m  MAG No. k141_6450
agagaaggtgcagatcttcaagaacgggctgtgccccaaaaccaacggcaacgcgctggccctcgccatcatgcggcccggcgcactcgacgccgtcggagcaagcctcgcccaaggtcatggcatcgacgcgaacaacgagcacctgcccgtcgccgtgctcggctcggacgccgcctaccggctcggcgtcaacgagcccggcgaccgcatcctcatcgacaacgcatggtacggcgtcatcggcatcctgaaccccacgccgcaggctgaaaacctgaacgccgccgtcatcatcggcgagcaatgggcgctcggccggtaccccgaccaggccgacaccatcggacggatcagcgccatctacgtgcgcaccacgcccggcgacgccgaaggcacccgccgcacgctcgcccacgccgccaacccggccggcggcaacgtgtccgtcaccgcgtccgccgacctatccacagcgcgcaccaccaccaccgattcactgaccacgctcggcctgatgatcggcgtgatcgcgctggccgtgggcggcatgagcatcgccaacatgatgattgtcaccgtgatggaacgtcgcggcgaaatcggcctgagacgcgcgctcggcgccacgcccggcaacatccgcatgcaattcgtcaccgaagcggccctcctgtccacactcggcggattcgccggcatcgcgctcggcgccggcgttgccatcggcgtcgccgccagtgccggccagccgatcgccctcgactggacctccctgccgctcgcctgggccgccgccatcctggtcggcatcctcgccggcctctacccggcctcccgcgccgcccgtctcaccccgaccgaggccctgcgcggcgaataggggcgacggctggagtgaacgatcaccatgagtgcgcagcctcaatgtcacttttactgcacatgatgacatgtgcagtaaaagtgacatattggtgctgggcgggagagagcacgcgtggcgcgggcggggtgtggttcgcggctatcggctagtatggtgcggtcacgacagagggaggcatgctgtggccgatgtgatgcgggagctggaacggctgcgaccggtgtatgagacgggcgtcctgcggttgctgttgcgccagaacgcgatgctgtacgtgtcgctgctgcgttccacgttcgacccgctcaccggcgagctgccgcgcgagaccgtggaggagcggttcgcgcaaagtctgaacgctctggccgacgccggcgaatatgcgccgcgcgaggaccagaccttcgccgaggccgcccatcagatcctcgccgacctgacccgtgaaggcgaaggcgactacgcctggctcgccaactcgcatgatgcggccacacaccgattcctctaccgtttgacggcccgcgcccaccgcgccatcgaggcgctgagcaggctcgaagacgaatcacgcgccctgtccggcgcgcaggccaacagcatcatcatggaaatcgaacacgcgcgcatgcagctgaccgccgaccccggcgagcgcatcaaacttctcaaccgtgaaatcaaggaacgcaagcacgagatcaaacgcatccaacagggcaagcagcacgccacgctgagcgaagcccaagtggaggacgtgatcgccgtgatccacaacacgctgcgcggcgtacccatcgacctgcgcgaactcgtgctcgacgagcgggacaacggcgacgccttgcgccggcgcatgcagaccggcgacatcagcgtggacgagaacctgacccgctaccacgacgaataccgccgctcgttcagcgaatcggacagcggccgccgcttcgaggacgccttccaggtgatcatcaccgacgagggccgccagcaaatcgacgaagccctgcgcgccatcgccaaaaccccgtatctggccggcgaatccggcgtgctgctcggccagatccgcgacgaactggcccgcatctacgacggcatcgaagccgtgcgccgccagatgcgcgtctccgacgaggcgatcagccggctcgtgcgccagcaaaccgacactcgctaccgtacgatgctcacccgcttgaaccgactgtacgcgcgcctcaacgcggatgcgaaaacccatatgggagacgcctcgcgcccgtacgacacggccaccgcggacgcgctgttcgcgccattgccgatgcgcccggccaaatccatgacccgcgccaccgcacccggcctgagcgacctcgccgccgaagccccgcaggcgactccggtggccgatctgcgggatatggtcaacagcggcggcccccgactcctgcgcatggtcagcctcatccggcgcaacccggtgaccgttgacaggtccgatgacaggtccaacgcaaccctcgtggacatcgccgccagcttcaaccggctgcccgaaagcgaacgccgcgaaagcgagatcgtcggcttcctgggcgggctgggagccgtaagcggcagcgccatcgccgacgagccgtccactgacggcgtcggcatcgacagcgacatcgccaccgagccggccccggcgcagcgcggcgataccgcgacttggcattgcgtatcgatcgacggcgagccccggcactggatcactagaccggtgctggccgacatggacgagctgaacatcattgtggaggaaggatgaccgtggccgaggaacacgaggagcacatggacaacgccaacccgtacgccctgttcgaaggcgacaccggcgacatgccggccgaggcacgcatggccgccatcgccctcaaacgcgaccgctatatcagcgggcccacctacgacaccgtgctcgacaaccgcgacgtcgtcgtacgctccctgaacaacgacctgctcgacttggtgatcaacgaacgctaccgcatcatgtacgccacgcccgtggccggcgacgacgtgaccctgcgctcgctcaaaacccgtgtcagcctcaaacgcgaggaggccgcgctgctcgccttcctgcgcatccgcgtcctcgaatacgagaacgtgcacgccgaccccgccgactggctcgtcagctttgaggagatccgcgccgcgctcgccaccggtgccggttacctggcagcccgcaatgacgaggaaggcgtggcaaagcagatcggcgccatcgtctccgcgatgatcacctacgggtatttggcgcgcctggacgacgaagccatgtaccagatcacgccgctcgtgcccgtggtgctcgaccgcgaactggccgacacctggctcgacgtcgcggaacacggcgacggcgacacggaagatgacgatgacgacgagaagggagccgaatgatgcaggcgacagacgtgcagatgatcgcggaccggtggatgctggaatcccgccgactcatcaactggggctcctatgagggctaccacgaattccgcccctccacggaccacaagctgccggtgaccctgctcgccggcgccagcgaatccggcaaatccacgctggtcgacgcgcagatctccctgctgtacccgaccggcacgccgttcaacaaggcctcgaactccggccgctccgaacgcagcgactacacctacctgcgcggcatggtcggcgtgggcagcaccgaaaccggcgacgagccgctctacctgcgcggtcgcgacgagaacggcgcgccgcaacccgtgtggggtgccatcgtggacacctatcgcaaccagaccaccggccaggtgctttcctgcgccaaattcctctacctgatgcccggcgacggccgcggcgacgtgcgccgccagtacgtggtctggggcaagcccgtggaccccaggcgcatggaccaataccgtgacgccccgttcacgccagcccagctcaaagccacctaccccgactgcctcacattccccagcgccgaagcgttccacacacacatctggagcgcaatgggcctgagcgaggccgcctgccgactgctgcacaagatccagtccgccgacgcgccctcccggctcgacgacatcttcaaacaaggcgtgctcggcgtgcccgaagccctggacctggcccgcaccacggtcgaggactacgaacgttacgacgagaacttccacgccatggacgagaagacccgccgcatggacacgctgcgcggcatccaacaggcctacggcgaatacgccgccgcacgcggcaaggcccgcgccttcgaaccggtcaagccggccgtcgacggcacggtgccggccgtgctgcgcgactgggcattggcccgcatgcgcggcgaagtcgccgtccaactgcccgccgaccgcgccgaacaacagaacagcgaggcggaagccaagctgctgcgccgccgaaccgaagacctgcgcacccgcctcgacatgatccgaggccagatgcagggtctggacggcggcaacctgacccgactcgaactcgaactcgaccaggcccgccgcaccctcgaagacatgcaagccaaccgaacacgaatcgaacaaacgttcgcatccatcggcgagacgctgcccggcaacgaacagtcctggaacgaacgccgcatcaacgccgtgaacttcaaacgcgaatacaacaaacgagacggcgaatgcgaggaagccctcaccgccgccatcaacgcacgggccggcgcacgcggcgacctcgaacgactgcaacgcgacttcgaccggcaacgctcccagcgcacccgcatctcccagcagatggacgaaacccgcgccatgctctgccgcgccaccggactcgcccccgccgaactgccgtacgtggccgaactcatggacgtgaacgaacacgaggaagactggcgtctcgccatgaacgtcgcctacgcgcccatcgcccagaccatcctcgtcgacaagcgccacgaacagggcttcgccgccaaagtcagcaccatcgacccgcgcaccatgccccgacgcacctggcagttcgtggacaccgcacgccactacgacgacaccggcgcgcacgcgaacatactcaccggagaacaggacggcgactggctgtccggcaaactgcgctaccgcgacgactcgcccttcgccgactggctgcgctcgcagacccaggacgaacgattcgacgccctatgcgtcaccgccatcgacgacaccgaccgcaccaaccgtcaggtgcaggccgacggtcagatcaaatccggcgcacgcggccagcacggcaccaaagaccgcgcccaggtcatcggattcgtcaacgaaacctacctcaacgcgctcgcagcgcaggtcgacgccgcccgcaacgcgctcagccaagccgacaccgactacacggccgccaaaacacagtccgataacctccaccgcgaactcgaactggccaaccagctcgcctacacgtcctgggaacgcatcgacatcgccggcgcgcaacggaccatcacggacacgcaggacgccatcgcatccatcaaaaacgatcccaaactcgccgaactcgccaaacagcgcgacgaactgaacgccgaactcgaccgtgtggaacgccagcgcatcgaatccgaccaggccgcggcccgcgccggcagcgccgtcgaagcggcgctcatctggctgcgcgaccatgccgacaccggcacgacggacgccgccggtgccaccgccgacaatgacgatgacgccgcttccggcccgctgccggacgaagtcacggcggcgctcgccgaatcctacgacaaccgattcgccgggctggcggacgcggccatgcgcgcgcacatgatcatcggcgcgggcgtggcaggaacgcaggcgccgggggagagtttccccgaacgcaccatcgccggcatcggcaaggacatggcctcccgcatcaacctgctgaacggccaggccgacgccgcgcgcaccggcgtcgaatcgaaaatgagcacctacatcgcgctctacgcggccgacgatgattcgctgaccgccagcgtggaggactaccggtactatctcgacgaactcgccagcctcacccagctggccgcggttgccgccaccgacgccgaataccggcgctgcctcgaacagctgctcaggagcttcctgaccatcaaacgcgccatcgacacggatgccagcgacatccacgaccagcttgaccgcatcaacgccatgctcaagggccaacagttcggccccaagcacggcagcctgtccctgcacgcggacgtgcgccgtcccgagcgcaccttctggacgcagctcatccgcgtcatcggcaccctgaacgattggaaatccgccgacgtcaacgattccgacgcctcgcgcaaggctttcgcggcctgcgcgccgatggtcaggctgctgcgcaccgaactcgcgcaggtcaaggacacgaacggcgtgaaaagctacggcgcccgcaacctcgacccgcgctgccgctcgtccttctacgccatcgtgcatcatgccgacggtccggacgaacgcatcacctccaccggcggccgttcgggcggcgccttgcaggagctcacctcgttcgtatacggcgcggcgctcatctacctgcttggcggcggcctgaccagcgagccctcgtacaccacgctgttcctcgacgaggcgctcatcaaggccgacggccgttacacgcagcgcgccctcacggtgctgccgcgcctcggattccaggtcatcgtctccgccccggaaagcaagaccggtgaaatcctcgaggtctccaccaaggcctacgtgacctacaaggaccccgacaccggcctcacctccctgtgcgaggccgtgctgcatcagaatgacatggacgatgaatcatcgtcggatatatcgaaggatgacggggttgccgaatgagcagtcccggcgtcgccggtattaagacgattcggttcgactcgacgatgttcgaaagcaggtgatgggaactatggccggcatgaaagacatcgctgcgatcaccacatgcgtgaagaaacatatgcgttcacatatgtacgacatcgaaccggcatggccatttcccgtgccggtgggattgccggaccaagcatttttggaaaccaatgcgattgcagtgcatgacaacaacaatgagatacggcaatgggcaagcaagaatggttgcgaaatcataaccaagcatcgcaccataggcacctctgtcgagttgatctccaaagtcgtcgttcctgacgaatcaatagccatgcgtgtggttggtcgtacgctggcggcggaatatcgcgaagcgcaccgtcgcacagattccactgacaggattcagcggcaaatggctgaatgagtcaaaaaccaatcgtcgtaaggccatttgccgactgctcggtgtcgaaacgttgggtctgtcaaaacggccgaccgaactgcggttccgttatctcgatccgggccacgacgattttggtaccgatcgtactgaacgcagcgcgaagattgctatgcgggagcctaagccgacgcccggccttcaatcggcggagcgacgtctttatgaacgactgtgtgctgacaaaaccatcgcttatcggcgtatcgaacaggaacgcattcccatgcgtgatgcagttgacgaattacgcaagcttggcatccccgtggagtccattgaagattttgtcccggttcgaacatcaatcgtttgacggacgtaccggggcagaatccgttgtcccggtttgtgatttcgggtgtttttcgcgaaccgggacatgttgtgttgccccggtatgggcgtcaatcgtttgatgcgagaatcgggacaacatggcgattctgagattggctttattccgccgtttccgttcgcgttttatgtggtccgtggaaactggaatgtcctggttctcgaaaacaggccaaaatcacgaaccgggacagcgggttttgccccgatgcggacgtcaaacgattgacatgtgaaccggggcaaatcagaggaggagaggtcttcgggatagagcttgactggggctgggcgcacggttgatgtcgcgtgggccggctcttgcgtttcggtccactgatggtccggaattttgcatactatggttcggttttccggcctgacacgccatcgaacaagcgttcgaatttggtcgtgtgttcgggtatccttgggacagatttggcgcgcgcataaccgtgcgcgcgggaacggtgagatggaaggtggggtgtggctgtggcggcaacgcggactggcgcaaggcgcgcaacaagcgcaaagggcgcgaaaaccagcaagggcaagaacggtgaggtcatcgtcgaaaaggtgatgaccagcgactccttcctgagccgggaaatcaaaaaggcgccgctgatcgaacacgatggttcgctggtagctgatatctcgcacatcccgaacgatctcaagatcacgattcagggtgcgcgcgaacacaacctcaagaatgtcgacctggcgattccacgcaaccgtatggtcgtgttcaccggcctgtccggttccggcaaatcctcgctcgcatttgacaccctgttcgccgaaggccagcgacgctacgtcgaatccctgtccgcctacgcccgccagttcctgggtcagatggacaagcccgacgttgacttcatcgagggcctgagcccggccgtctccatcgatcagaagaccaccaaccgcaacccgcgttcgaccgtcggcaccatcaccgaaatctacgattacctgcgactcctcttcgcccgcaccggcatcccgcactgccccgaatgcggcgagcccgtcgcctcccagaccccgcagcagatcgtcgacacgctgctcggctacccggagcgcactcgattccagattctctcgcccgtggtcaagggccgcaagggcgagttcgtggacatgatcgagctgctgcgctccgacggctacgcccgcgcgctcatcgacggcgagatgacgcagctgtccgacgacatcaaactcaccaa

SEQ ID NO: 1143 - DNA, 23962 bp, Unknown
  R81_24m  MAG No. k141_6469
gcgcttggacatgcgccggccatcccattgaccggctttcggatcattggccaggccattggaaggtatggaggggccgcgtcctgtctcgccggccgcaaagtcatggcgcttgggttcgggcttggttgtcacggccatgagtccctccttgcggaaaatgcactggctcccgctggcgggagctgtccgtcatcaaacggactgagggtggtcaacactataaggatgaccaccctcagtctccgcttacgctcgacagctcccgccagcgggagcgagtataaaccttacttagcttcctcgaaccactcgcgggtggtgccgtcgtccagggtcacgcggccagtttcgccgctcatgtgcttgacacggtgggcaatctcctcgtgacggccgtgcaccatcgggcgctggaccgggctgccgaggtagccgcaggtgcgcttggtgacgttgcacttgtccgggttggagttaccgcactccgggcacttgaagccttcctcggtcggctcgaagtcgccctggaagccgcacacgaagcagtggtcgatcggggtgttggtgcccaggtagccgatgccgatgttgtaggcgtaatcccacacggcttcgagcgccttcgggttgtcctgcaggcacgggtactcgcagtagttgatgaagccgccggaagcgtagtacgggaagtccttctcgtagctgagcttctccatcggggtgggctgcaaccacaccgggtagtggaaggagttggtgtagaagtcgtggtcagtcacgccttcgatacggccgaacttttcacggtccatgcggttgaagcggtcggtcagggattcagccggagtggagtacacggaatagtggtagccctccgctttgctccactgcttgcacagctcgttcatgcgcttgacgatggacagcgcgaactccttgccttccggatcccagccgtggtcgcgaatccagttcttgccgtagaagaccgcggtggtctcggcaaggccgatgtagccgagcgacacggtggcacgctcgttcttgaacagctggtccacgttgtcgttggcaccgagacgaccgaacgcaccgaagcggaacagggtcggggcgttgaccggggtggcttccttgcagcgcatgatgcggaactggagggcctgatgggcgacttccatacgctcctcgaacagcttccagaagcgagccttgtcaccgtgggattcgatggcgatacgcggcacattgacggtgaccacgccgaggttcatacggccatcctcctcgtccttgccggtctccgggttgatccaaccctgcaggaaggaacggcaacccatcggagccttgaaggagcctgtgatcttgacgatgttctcgtagaacaccacatccgggtacatgcgcttggtggcggactcgagggcgagctgcttcaaatcgtagttcgggtcacccgggtcggcgttcacgccgtgctgcacagtaaagacgagcttcgggaagatggcggtgtggtgttccttgccgaggccacgaatacggttcagcaggatcgcgcgctgcacctcgcgggagaaccagtcggtgccgagaccaaagccgacagtcacgaacggggtctggccgttggacacacggttggagttgatctggtattccatggtctgcatggcatcatagatggccttgcgggtacgaatcttggcgaggatttcacgctcctgctcaagttcgtcaacgtcggtgtggaacggggtgtccatcggcagcggttcgcgggaaccgaaatgcagcttggcgggctcgttcctcttggcgctctcgacctgacgacgggcgaattcaactggcatgccgtcggggatggtctcacgagcttcctcgaggaacttctcgtaatccttcttggcatactgggcaagatgctcgtcggcacggttggcggtctggccaccatactggctggaggccacgtccttcatgatctgggtaatctgggtggccgcaatggcgatggacttcggggaagccatcggagcgttgccaagagtgaagccattggccaacatgtcccagaagttcggcaaggagcagttggactgggcagtgaacggcgagtagtcggcatcgtggaagtgaatgtcgcccttcatgtgggcgttggacaccgccggcggcagcatgttgaacgcggcggccttggatacggcaccggccagcagatcacgctgggtggagtagacgttggaatccttgttcgcgttctcgtgaatcagggtcgggtcgtggttgatgaagcgggaaacggcctcgttgacatcagtggccttggcacgctgaatgtccttgtcgagacggtagttggtgtaggcgcgagccacatcgtacaggtgggcgtcaatgagggcgtgctccacgaggttctggatgtcctcgatcttggcggggccggcgtaacgccccttgatttcgccttcgacttggttggcgaaaccacggatcatggcatcttcttcggggccgacttccttgttcaggtcaccgaaagcagacttgaccgcagagatgatgttaatggggtcgaagtcgaccacacgaccatcacgcttctcaacgagcacggtggaggccttggcggccaccttggtctcgttatcggtgacgatttcctccaacacctgtgcgcccatcgggcacccctttcctataaggcgaacactctcctgagttccgcattttggccgcactcgacgtgggccacacgaaattacattgatgtcgttttttgaacctctagaagaatacggcatctccaccactatatctagtgctcaacagtggtgtgtcgaactatttatagggttttcggctattttccgccaaaaccacaagtgtgtgattagcgtaactgttttctgctcgcgtgtcgcacagcgagctcactaacgactctcaatcgtcagcgcaacgcatatctcactcctcttcatagcacccgtttcttcgccataatgactcctttcttctgatgcaccagaccatctccatcatcggctgatacatcgcttcgtacggttctcgcattcatcatcacaccgttttcaggcgacggtaaatatttaccgtcatcaaccaacgcacttatagtggagtgcatgactactgcaatgggctacccatctaccggccgtccaccgaccgccgcttcactggcctcggctggctttgagccgggtcaaggcactttcgcgcctgatcagggcaccatcaatctgccgaatgagcctcgccctatcgatcagctgcctgcacgcgccgctgaaaccagcgcgcaaaatccgtggccggtaagtgtgctgagccagaagttctacggtgccgtggaacgatggccgtccgcgtgggtcaccggccagatcacgcagatcaatacccgtcgcgccggctcggcctacatcacgctgcgcgacgacttcgaggatatcgccatggaagtcaatggcttcggcaggttcgcggccgcggccagccagttcgttcagggcgaccgcgtggtgattcatggcaaaccgaacctgtggatgaagcgcacttcgctgtcgttgcgcggggacacgattctcaaggtcggagccggtggcagcctcaaggccatgatcgacgaattgcgcaagcagcttaagggcgagggcctgttcgatgccgatcacaaactgcctctcccggagtttccgaagactattggcctgatttgcgcacctcaggcacgcgcggaaggcgatgtgatcaccaatgtgaaccttcgttggccttccgtaaccttcaaggtggtccatgtgcatgttcagggcgagcaatgcccggccgaagtggttcaggccattgcacaactcgatgccgacccgagcgtggatgtgatcatcgtggcccgtggcggcggctcgtttgaggatctcatcggtttctcggatgagcgtgtggttcgtgcggcgtatgcctgcaccacaccattaatctcctccatcgggcatgaggatgactggacgttgctggatctggtcgccgatcttagagcctccacccccaccgatgcggccaagcgcgtggtgccggatgtgcgtgagcagtcgcagctcatcgaaggtgccatcgaccgtatgcgactgcgggtccgttcgcgcgtggagaacgagattcgacttatcgagggatatgcgaaccggccaagcctgacccaaccgcataccatgctcgaaccgcatcagcggctgatcgacgattccctgcagcggcttgacatcggcctgcggcgtatcgtggatgatgcccagctcaccgtcgaacgcgcccatgcctcactgaccgcactcagcccccaatccacgctgaaccgaggctatgcggtggtgcagtccgccgatggccatgtgctggatgacgcttcgcgggtcagtaccggggatgacatcaccgtcaccctgaaaaagggcgtcattaccgccaccgccacatccgcaaccgcaaccgcgtaatgcaccatatgcattcacgcatatataccgtatatatataaggagaacaagatgaccgagaacaccacacccaccgacaagaacacccccgcctcgtccctgacggacaaggaacgcgagctcatcgcccagatgccatatgaggaggcgcgcgacaagctgattcaggctgtccaggcactggaaaccggcggcctcaatcttgaccagtcgatgcgtcaatgggaaatcggcgaggccttggccaagcgcgcccagggcctgctcaacgacgtacgagccaagctcgaccaggcacaagccgagcaagccgccaacgaagccaccgcaggcacgcagtccaacctcgactgagttgcctcccggcgcggcatcccgcggctcgcacctgaatccggactggactgagttccgcttcccggcatacgatagtggcgattaggccacattggtagcagttatagaagggaaatcccatgtcaacgctgattcttgtattccatccgcacctgaaggacggctcgcgagtgaacgcccgtctgcttgccgaactcgccgcacaaggcgaggacgacatcatcgtacgcgacgaatacgccgaatatccgaacttctccgtcaacgccgacaaggagcacgagctactggaggccgccgaccgcgtaatcctccagttcccgttctactggtactcctcccccgcgctgctcaaggaatgggaagacgaggtcatcaccgcaggctgggcctacggtggaggccacgcactcaagggcaaggagctcaagctggtggtcaccactggttccgacgccgccaagtaccgcaaggatggcgagtacagccacaccatggaggagctgctgagcccgtttgaggtcgtggcgtacaagatcggcatgaactatgctgagccgttcctggtgcagggcaccgccaccatcggcgatgcggagctggatcaggccgccgccgattatgtttcggcgattttggactgaataagctgaggccgggtgcaagtcgcacccggccttgttgtttcgcgggctagccgcggtctctcccagtcagcctgcggctgacagctccctcgtcagagagagcttattttttggatcagagggagttgatagctacttcttcaacggcacgtagatcacgtcgtcaatgagctcgcgatagtgctcaacgatttgcgcgcgacgggtcttcaggctcggggtcagcatgccgttggcctcggtgaattcgtctggcagaatctcgaacttacgaatcgactcggcgcgggaaacgccctcgttggcggcgttcaccgcacgctctacctcggcatgaacgatggcgttcttggccagcgaggccagatcgggttccggtttggcgccttgggattccaaccagttgttggcatccgccagatccagcgtgaccagagcggccacgaacggcttcttatcgccaataaccaagcactgattaaccacgggcgaggtcatcacggaagcctcaagcagacccggcgacacgttcttgccgccggcggtgatgatgaggtccttcttacggccagtgatggaaatgaatccgtcttcggaaatatcacccaaatcaccggtatgcagccagccatcggtaatctgctgggtggtgacctcagggttgttgtggtatcccttgcacaccagcggtcccttgatcaccagctcgccatcctcggcgatgccggcggtgatgccgcacatcggcatgccgatggtgccgatgcgattgtcttccggcaagctcacgcacaccggaccacaggtttccgtcatgccgtagccttccagcaccggcatgccgatgccgttgaagaagtgggagagctcggaatccatcggggctccaccggtgacggcaaagtcggcgttcgggccaaagatggtacgaatcttcttgtacaccacctgctcgtagaaagcgtgagcaatacgaccgggaagcggcagcttctcgcccttctgctcggccttggaccattcgcgcgcgttttcggcggcgcgcatgaacatcttgcccgcaaaaccgctgccggcacgctgggaggcggcgttgtagaccttttcgtacacacgcggcacggcaagcagcagcgtggggccgaaggtctcgaagtccttgaccatggtcttcatattggagctcagggccagagaaatggtgccgccaaaactgaagaattccaggaatcgggcgaacacatggctcaggggcaggaacagcagcagacggcggttgggccatgcgccggcacgaggcatgtactgcaggccggagcgcaccaggaacgcgaagttgcggtgggtgagctccacgcctttcggggtgccggtggagccggacgtgtaaacgatggtggcgcggtcgtcgccgtgggaggcgctcttgtattcccagaattcggcatcggtgacgctttcgccataggtcttgatggcgttcaggccgcctgcttcgatgacgaacacgttgcgcagggtgggtacctcgctgcgcacggattcaatcttgtcgcgctgaccgtcatcctcggcgatggcgagcgtgaccttggaatcgttgaaaatccagctgacctggctggcggagttggtctcatataccggcacggtgagtgcgccgatggacatgatcgccatatccagagcggtccactcccaacgcgtgcgagacacgatggccacggagtcgcccttgttgacgcccagaccaatcaggcctttggccagatcgatgaccatgtcacggaagaccagggcgctgtacggctgccaggtgccatcctcagttttatattcgatcatggcgccatcgggatcgcgcttggctcgctcatcgagcaaatcgaacaggttgatgtcgctgtcaatcggctccttgacgggattggtgaactgcttgacgatacgagtatcgtttatggccttatcagcgatgttttcagtcatactccccatgtaactccacggatgctacaaaacacgcgcgaaacaacgtattgtccagaccaaatggccccggcaatccgttatttcgggcaaaccaggtaaatctgtcgcaccgtacattcagcagattactcggcggagtcattggcctttttcagctcgtcgcgaatctcctgcagcgtggcgagagtctgctcttcaacgctaggcccctgttcttcagcgtcagcctcatcctgggcagcagtgagatcacgaagcttattaatcggcaaaatcacacagaaatacaccgccacgccaacaagcaggaagctaatcagcgcgttaagaatcgcaccaaatgaaacagtcgagttgttgaacgtgatggtcagcagtccggaaagatccggtacgccgccaatcatgccgattaatggactgatgagattgtcgacgatggaattgaccacagcggtaacggcagagcccatcaccacacctaccgccatatcaatcatcgatccgcgcgacaggaatttcttaaagccattcaacggacctttatcggtcaaagcaacaactttgcgagcggttcctcccgtggccttggcaaagtcggtggcaatattcatgggattgtggttactcataacggcactccttacgaaattcagacacttcacttgtatccgactggttttcccacgactccattatgccgcttgttggaatatccctataccactgcggcgttcccgtacatgactatgtacgagaacgccgccacccctgtttgctgagaacctgttagagctgcttagaactgaatgtaatcgacttccgtatgttcgccggtttccaagtatttcgccacatcatcaggaccgacgaacaccagttcgaccgcttgcgcaatcatcagattgacacgatccattggcgtaaggttttcgaaatagccgtacaccgggattcccagcgcatgcgcatatccgatttcgaacatcgtgcccgggtcctcgtccataagattggcgaccacggctttagcagcattaatgccatggatatcgtccgcaaagcatccttcagggcctacttcttcgatctggctgacaaaccgcggcttgaacagtaccttgccatggtcttccaatatcttttccaaacgttccatacttgacgtttgttcaggatcaaagaacggaccggccacatagaagtcatactgtttgtcttcactcatggtctctagtcatagcgcagcaacgtcggacgccagccgttattttcactgtatggacaaggggtcgtatcgtgaacattactacgggataaccgtcaatgactacgtacgttgcccccgatcagcacactccgccactttcgccccctcccgtatcgtcgagcacgcgaaccaagccgaccaaatagccgccatcccatgcgctgattaccgtatccgaatgctgcaatgccttgaacaaccgttcgggccactgcgccgattcccaaccaaccgacttgaacagcgcctcaacctgttcgacagtaaaccgcttctcttccgtgtattcgatagccatggaccctcacgataaccgtgaagccccacatgtctttgcatagtttcacatgacgggatgatggatggtggaacctatacgtttacacatgcctaatgcctatggctcatcaccgatgaatagaggctgagataccgtcatgtttccgaagccaagtgcccgagatcggattcgaaccgacgacacccgctttaggagagcggtgctctatccactgagctactcgggcaacgacgtttcattgtacacggccgcacgcccagtcgcatcatgttcgcgtggcagcctacataagacgcatggcagtctgtgtaagctacctggcagaacccgccaccaaggcatggccggttttcgtgctggtttggtgcgaactgctcttgcgcacggcgaaaagacactgaaagacaagccgcacacggtacagtggcaaatcgcacgaaaagcaaggtaacagtaaacaagccggaggaaagggcagcatggcaaaagcacggagtactaccacaggtgcaagcgtacgagctcgcgccgctgccaagccacgctctgccaaagccacggcacgcccagtatccaagtctgccgtgaagccacacaaacggcatcgtctgcttggttttctcgccacgatgttcgcgcttcttgcccttgccggcactgccgcccgcgcgctgcctgccgatttacaggaactgccatttgtgccgattgtggtatcggcaacgccctggttcacgttgcttggcctgattgccctactgttggccatcgtgtcgcggcgtatccttgccgcactaatcgccatcgccgcaatcgcatgcaatggctattggcaatatccgttcttctactcgaccgacccgctcccccaagccgcgcagaacgccgtggctgcggcctcccccaacaccagcgatgcctacgcgcgcgtcatgaccttcaatgtatacaaggggcaggccgacccacaagccatcgtcgaactagtccgcgatcagcgcgtcgaagtgctcgctttgcaggagaccaccgaggatttcgtcaaaaaactcaatgaggctggcattgagcactatctgccgtatgcgcaggtctcatcgtctgacggcgtattcggtaacggcctctggtcggccacgccacttgccgatccggccgacgatgacgtgaattccagcgcctcattcatgcccggcggcacggtggatatgggtggtcagcagattcgattcgtatccgtgcacaccaccgctcccgtacccggctattggcggcagtggaagcgatcgctggatgagttgggtccgatgcgcgggcatacggatacacggtatattttcatgggcgatttcaatgccacttacgatcacacgccagtccgtgattttcttggcgaccggttcgtggatgccgcacgtgaatccggacatgggtttacgttttcgtggcctacgaaccgcgtgtatatgccgatgttcgccggtattgaccacgtggtgcttgatcagggcatgaaggccgggcaatgcaaggtggtcaaagtcgagggttccgatcatgcggcgttgttggctaccgtggcggttgggtgatttcgtattcctcggccagccgcatgcactgggacacggcttccagaatcgcctcgatgccggacttcttgattgagccgtcatcctttaaatacttcatcaggcgcactgtggatttggtgctggcctcggggtcagggcgagcgccgggagcggcgtcgacgataagcatgtggatagtgttcgaaccgatatcaagcacaccaagtcgcgtggtgtgcgaacgcagattgaccatgatccctattcctgaccttacccaacccgtgatggccgaacaacgggccgaccatcgcaatcagccagccgtgcgccaccatggcgagtcgttcggccggcaaccaacaccgcgaggccagccgaacatcacacaaactcgactaccgtacaacaatcacaccggctgccgcgccgttcacaacgattcgacgaacgttccgagacgttccagcccctcggtcagggcctcacgtgaggcggcatagctcaggcgcacatgcgtatccgctgtggccgcaccgaagtcgcggccaggagtcagagccacatgggcttcatccagcgcgcgttcgcagaacgtccaggcatccagaccagtacgggagatgttgaagtaggcgtagaacgcgccattcggctccacctcaaccggcaaaccgatgcgcttgagcccgtcaatcacaatgcggcgacgggcaagcaattcctgacgacgagcttcacattcggccaaactctccggcgtaaaacaggcgagcgccgcatgctgggtgggcgtgtgggcgcacaggtagtagttggtggccaggtcgtcgaccgcttccagcacggtggggtcgtcgggcagaatagcccagccgagacgccagccggtcatgccgaagaacttggagaagctgttgcacacgatggcaccgggatcgcaggccagtacggacttgacttcggtgccgtccggctcacggtcggccaaatcaaggtaggtttcgtccacgatgcgccatgcgccgcggctggcggccagcttgcacacctcgtccaatacgttgaagtcgatggtggtgccggtggggttggacggcgacgtgatcattacggccttggtcttgcttgtccagtactggctgcacaggtcggcggtcaggtggaagcgggtggcggccgaggtcggaacgtcgatgacccgcccctcaaaggagcgcacaagttcgcggttgcacgggtaggaggggtcggccacaatcacatcgtcaccggggtccacggtcagcgcggtggccaacagcagggcggccgaaccgccggcggtcacgcagatacgcttggggtcgatgtcaaggtcatgacgctcgcggtagaagtcggcgatggcttggcgcagttcaggtaggcccatggcggcggtgtacggcagggcccggccgtcgtactgttcgcgcatggcgtcacgtacggcgggcggcgcgccgaaatcgggctcgccaaggcttaatttgatgacgctgataccttgggcgatcatcttgtctgcttgttcgccgaataccatggcacggaagggattggcctcacgcgctcggcgggacatgactggagacgcggccggagattggggctgctgcgctgcttcgttttccatattccggttctatccgcctcacgggacaaggtttcttcttctataatcactgtaggtcgattgagtgtaccaacccgtattcaaggaggaataatgagtcgattcaatggcaaacgcgccgagttcgaggccagcggcgaaaagatcaacgtcgcgattctgggtgcgggccgcatagctcacaccatggccgacaccctgacccagatggctgaaggttcactgtattcctcatggattcacccgtatgcggtagcggcccgtgatattacgcgcgcgcaggcttttgccgaccaatggcattttgacaaggcttatggatcgtatgaggagttgacggcggacccggatgtggatctggtgtatatcgccaccccgcacagtctgcacgccgaacaggcgatcctgtgtatgaaagccggcaagaacgtgctggtggagaagtcgttcaccgcgaacgccgggcaggcacgtgaggcgctggccgtggccgaggaaaccggcatgctgtgcacggaggccatctggacgcgctacatgcccagccgcaagctcatcaacgaagttatcgagtccggcgagatcggcgaggtgaaagcggcgagcgccaacctgtgctatccggtgtccggcaaggcacgtatgaccgatccggcctgtgccggtggcgcgctgctcgatgtgggcgtgtatccgctgaacttcctggatatggcgatcggtgccgaccatggccgcacgctggatcatttcgatacgtcgatgatggccgccgaaaccggtgtggatgcacagaattccaccacgttgtattacgatgatggcacgatggccgtgtccaccagttcgatgctggtttcctccgatcgcggcggctacgtgtggggcaccgaagggtatttggtggtcaccaatatcaacaatcccgagtccatcgatatctacaacaacgatcacaagcccgtgcgcagtgttgcggtgccgtcgcagttgaccggttatgagtatgaggtggccgatgcagccaacgcgctgctggatggcaagatcgaatgcgaggcgatgccgcacgccgacaccatccgcatcatggagctgatggatgcgattcgcgaccgttggggcctgaagttcccgtttgaggtctgatttcagctcccctccagaggggagctgaaattattccgctgaatctgcatctccttcaacaatctgctcatacagccgtgcgaggcgttcgtcacgcacggctttcgttaattcgcactcccatacggtaattacacgccagccggcggcctccagttcagcccgctgcgcgatgtctcgattgtgattgcgcagtagcttcgtctgccagaattccacattcgatttcggcatcgaatgtttggaacagccttcatgcatgtgccagaaacagccgttgatgaacacgatggtgtggtatttcggcagtactacatccgggtggccggggtaacgcttgtcgttcttgcggaatcgcaaacccttgcgaaacagatagctgcgtaccagcacctcgattttggtgtctttgccacgaatatgcgacatcgtgtacgaacgggtgccccgctcatacttctccactggctgtttcttgcgattcacgcactccagactaccgtgacgttgcggcgaggatgaaagcctgaacgaacaatcacccatcttgcccgtccgtgtctcttatcgcgggcaatgatcatctgccggtcgagactgcacgattagaccgaatcaaatggatgacatgatgattcgtagggccacggcggccgatattccccaaatcgacgaactgctgcggcaggtgctcgaagtgcatcatgccggccgaccggatctgttcaaaggcggtgtcaagaaatacacggacgaggaattgaaggcgattctggccaacgatcagacccctgtgttcgtggcggttgcgccatctgccaatgacggcactgacgtcgaacataacgccgactcccccgccaccgaccaagtgcaatggcatagcgccaagcgacgtctgctttgcgagatttgcgagagatgaatgcgataccagcgttcatggctatgctccttaatccaatatcaatggatgaacctgcactgccccgtatgtcaccatcataatatatcgaatatcaatataaaaatatcgaaaatcactttcaccattcacccacacacatcgcgacgtgatcgaccgttcttgccttgctcgcagcatccacgaccaacacgggaaagtcactttaaaaaagcactttatcaatgcggataactcggaagctagaaccacataaccccgttcagcttgccaatcagaaacctcatcccataccgtcagatgcacccgcacgcaacgacgcgtcagacaacagaaagaaggaccaatgaacatctctacgtttacccacaactcccacccggcaattcggcatacgcattttgtctagtgcgagattgagagttatgatgacacgaagaaaactcatcatcaagaaacttcggcaagcggcaaagcagcgagggctcgatttctatttgttacggcaaggcagcagacatgaggtttactgcctggacgggttgaggatacccatcccccgccataatgaagtctcagaacgaaccacgctggatatcatcaacgagagcgagcagaaactcggaaaggggtggtggcaatgagcaactatgacgtgcttgtgcaacccgatggccgatattggtacgttcaggtaccagctatcgaacggtcgacccaggccaaaggacttgacgatatcgagccaatggctaaagatctcatcactgtcatgaacgacgacgacaatccggagctcaaggtgacgtttgtgttgccgaaacaagccaaacaacacgtaacagaaatgttccggcagcgcgaaatagcaaaaaaagccaacgcacaagcggctgccgaatcccgactcgccgcacgggccctacgcaacgagggactcacgtatcgacaaatcggagctttattgggggtctcctaccaacgagcatttcaattggtcaacggcaaaacaaagcacaaaacgacagcgtccgaatcgcctcagccaacaactgaatcacgctccccacgcacgcaccatgccacaccgctatcgactccggtctcggcttagcgaacgggtccacaaagcccagactgtttccatcaccaagctcaagagcaccgagcaggatcttctcatcccagcagattgaggagatcgtccttggtgagggtggcgatggaggcgggggcttcggtgagggcgctggcaccggtgccagcttcgtcggcaagcaaggaagcatcggtgaactggcgggcgagctcgctcttggtatgctgaagctccaagatgcgttcttcgatggtgtccttggccaccacctgatacacgttgacgtcttcggtctggccgatacgatgtgctcggtcggtggcctgatcctgcgcggcagcgttccaccatggatcggcgtggatgaccacgctggcaccggtcaggttcagtccggtgttgccggccttcaatgaaatcaggaaggcgggcgtatcgtccgcattgaactggtcgacgagttcgagacgcttctttttaggcgtggatccggtgatggtgtagtagcgtagtccttgcgcgtcgaaacgttcggcgatcagatcaaggaagctggtgaactgggagaagatcagcgccttcttgccttcattcacgcaggtttccaccagttcggtgatggcggcaagcttggccgactgatccttggcatcggcatacagcagccttggatcacagcagatctggcgcaacttggtcagctcggcgaggatgcgaatcttcgacgtgttgaaatcggcttcttcgctgtgttcgagctgcattctgagccgctgctcgtgggccgcatacagtttgcgctgttcgccggcaagctgcacggtcagcgtggtctccaacttgtccggcaaatcggtcagcacttgggacttcaacctgcgcttgatgaacacgcccaccaacgactgcaattggcgagacacccgggcggcctcaggattgacctgtgcggcggcccgaccttcgcccgtgctgccatctgcagcccgggcgttggagatgggcaactcgtagcgctcatggaatcgcttgtatgagcccaatagtcccggcatcaggaagtcgaagatgctccacagttcggagagtcggttctcgatcggcgtgccggtcaaggcgaaacgatggtcggcggccacggccttgaccgctttggctatcttcgtggtgtgattcttgatgtactgggcttcatccagcgccatgacattgaaacgttgctcattggcggtgtaatcatcgacatcccggcgcagcaggtcgtatgaggtgatgagcacggtgggttcatccgcccggaacgcgcggccgatggcggtgcggcgctcggctttggtaccggccaccaccacggcgttgaagctcggggcgaacttggcgaattcggcaccccagttgtacaccaaggacgccgggcacacgatcaatgatggatgcggcccgccatcttcggaatcgaaagtaatatgaccggttacggctgattcactattaacagcattaccggcatccatgccttgagcggtcggcatgccactagattcgttgtggtatcgcgacagcaacagggcgataagctgcacggatttgcccaaacccatctcgtcggccaaaatgccgccaaaacccttgtcgcacaacgtgttcagccattggaagccttcgacctgataagggcgcagaatatgcttgagactatccggcacttcatacgacttagggtcgatgatcttgagatcgtcgatgtattcggtgaacgaagcgtccttgactacatcggagccgtcatccggcagctcaccatccagtaggaatgctcgaccgcccggcaactcgatcagcccggagttgagctgctgttcgctcagatcaaggtcgctggccaatcggtccaacgtgctgagattcgcgccgctgagtttgaccagcgtgccgtccttcaactgatggaatcgttgacgccgacgatacgaagacagcaaggcacccacttcgtccggcggtacttcatcagcgaggggtgatatctccaccaaattgcctttgatggacaatccgactttgacgcttggcggcttgggcgcgatcagccggtcaaaagccggtgtggtgaagacctcccctacttccttcagtgcgggcaatccctcgtcaaaaagacgaacaatctgcgtggtgtcatcgcgatcgatagtggccgcatcaggcacgaattgtttggcggcctttcgcgcggccggcgttcggtacccattcaccgtctgatgagaggcggccgcaacgcgcttgcgctggtcaggcatggtaaagaattcacgcactacatcgatcgcaagatgctcagcgtcgaaatcacgcccaatcacgccccgagacaagggaatggagcgctcgtcctcagcatgcaccgtcgggccatcgggtagcaacgggacaatggcatcgccgtagtgtgccttgacctcgcattgcacaccatgctcatcacgatccagataaaactggaggctgcattccgtaggacttaattcagccagctcgcgaggaatctcactggcctccaacagtccggcaccaaccagctgaggcaatagcgtgcgtgcgaacagggcgatgtcatcaccggcaatgacctgcccctcgccatcgggttcaaacaggtctcccaatagtcctcgcaacggaatcaatcgtttcgggcaacggacgaatcggcatcccgctgcgcttttacgctgagagcccgccatcatggcggataccgcaccggccggattagtggaggcgagcaacagccatacatccttgccaccatcaatcacggtttccaccgccggcactccggcaagcaggtatccggcatccggaccatacgtattgaaatcacgccgcgcaatgcgcataagaaaatctggctcgccaccatcaaccggcaccgatgcaggctgcccggagaaccatgtgttcaacacgagctgtacgcctctgccctcacgtacggacagcaaccgggccacttccggtgctgaaagtgtcaggtgacgatcgatggcgatatgcccgtaataccggtcctgctgctcggccgcacgacgcacggccatcgcgtcgtcaaggaagcccagcagtgggcgcgaatcatcgtcgaacatatccggcgtatgggtaaaggcaagcttctgcccataatccgtatagtcgccgttcgccatggtaagcacaaattgcggaatcgatttcagtacatagctggacccattggaagtcgatccgatcttgaactccacgctccacacgccatcgatgaaactcaatatcggaacaagctgcacctgccccaagcccacagtctcactatcgccctgatacccgccgcctcgggtgccggcacgagagccgtatccgctattcgtacgtcgtccacctgcgccatttcgtctttttgcagtatcgaatcggcgcatgagcgcattgcggcgacgcgctttggcttgagcatcttgcctatcgacgtgctccatatagtcgatcagcgtccgagacggcctcacagccccggcacggtacccttcaaaacgctgcggatcatcgcagaatatgaaggcgagcgcaatcatgtgcttgcacatgccatagccacggccgtaagccgggcatgagcacttgccaccgacggcttctcccgtatcgaggtcgaattgcacgctggtacgatacctactcgatgggctggtggtgccacgtagaataccgtcaagctcggcatacccggttcgatgattttcgctgtataccggattgataaccatggtggccgctttgcgcgcaatgctacgggcacgagcgagcacggcattcgacgatgacgattccacatcgttgcgtaacgcaaggatagggacggcatgggcttcggcacgcttcgcagccccggcgaaatggccttcgtcctcatcttcgaaccatacggaacgtccttgcctgaaacgatagggcataaccgcatcggcggcggacaaactgtccgttccaccaaacgttacggctctactgccggcagcgcctgcgccaccaagcattccatctgcctcgccagagataccgcctataccgctgctcttgccggcaaagaggcccctgtcctcattagtgtcatctgtgtcatctgcgccataccgatcatcgtcgtaatcggcaccttcgtcgcctccccttttccaaggattgcgacggcgcaacgcatggccccaggaaacgccggaatcatcatcctcataaggcaggaggtcatcgtcatccgcattatcgggaacatggccaaatacaccataccctttgctcatgggcgagcctcctttccagcgaatgcatttcagtccaacacttctatcctagacgaggcgcgcggtagccttaatgtatggatgcagacaagccggcgcaacgcaaatcctatgcagggaacaccaccctcgaaatcttcgaggtgctgtggcgtcacagctactttggacatggcctgaccgtgcggcaaatactcgatgaacttgcccgtaaacaccagctggaagatccaagcgagctgccgaccgagaaaaccatacgaaatcagctcaaaaagcttaccgccacggaatttctcggcagacatatcgggcatctcaccgaaagcgaccttgccggcatcgaatgcaagaatccacaacccggctggtatcttgacgcattcctatccaccgccgaaatgcgactgctactcgacagcctcaccttgtctcgcatcagcctcgacaccatggacgatctcatcggtaaaatccgcgaactcgcaggtgccgctgggcaagcagtaggttatcttgagcacgtggccacctacacgcatatcaacggcgagttcctatccaccatcgaccaactgaatcaggccattgaagaaggccacggcgtaaccttccaataccgtgattacggcccggacggcaccctgataccgcataaaagccgtacgggcgcaggtcgaattacctacaccgccgacccttaccagatggtgtacaagaacggacggtattacctcatctgccatctacatggcgaggataatctccgcattttcgtggtcaaccgaatcgccaacgtcagcgccaaaggcaggaacggcacagttccactggaaaaaccagcgccggctgattttgacgcagtgaacttcatgcgtcaccgcccgtatcccgtagccgatgccccgattcgcatccgcatggccgtacgagacgaatccatgctcaacaatgtgttcgaatggttcgacgaccctcagatcaaacattcgccggacggcacacagttcgaagtcatcgtcgatgctcccgaacgcgccgtgttctggtgggcattgcagtattcctgggatggccgcgtagtgattcttgagcccgattcgctcaagcgcaaactctatgatgccgggcgtcgcatggccacagcctatgctcccgaatgatgcagcatcacatcgcacacctccttgccgagttgttcaccagcgaatttcaccggagaacctatcatcccatcgccaatcacgttcggtaattttttaccgaacaactcgatttcaagccattccacgaactatggcccccgcctagccgtacttgacgctaaggtggaaccatcacatgccgcgatgcacatgcaacgcaaacgcaacgatatgtaaggagcaactatgagcgaagagcgtaccgcatggggatggggtctggccagcgtagacgccgccggcaccaccctagacgtctggtaccccgaactgaatctcggtgaggcaccggccgaggccgatcgtccaaaccacaatttcggcactctggctcacgatgaagccgacgcccgtggcatccgccgcgtgccggtattcgtcgtcagccagttggacgagccgatcagcaacgccgcggacgcttacctgaaactccatctgatgagcatgcgcatggccaagccgaacacgctgaaccttgacggcatcttcgcccaactcgccaatgtggtgtggaccaactacggtcctttcgccgttgaggacttcacactacgcaaggccgatgtcgaacgcgcctccaccgaagccgctctcgctttcgctgcccaggccggactgcctgccgcagctcctgccaccaccgtcaacgtgttcggtgtggataaattcccgcgcatgatcgattacgtagtgcccaccggcgtgcgtatcggcgacgccgaccgtgtgcgcctcggtgcttacctatcttccggcaccaccgtgatgcacgccggattcgtgaacttcaatgccggcacgctcggcgtctccatggtcgaaggccgcgtttcgcaaggtgtggtcgtgggcgacggttccgatatcggcggcggtgcctccatcatgggcaccctctccggcggcggcaagctgcgcaactccatcggcgagcactcgctgctcggcgccaacgccggtatcggcatctccctcggcgataactgcaccgtcgaagccggtctgtacatcaccgccggcaccaagatcagcatctgggacaaggccaaggccgcagccggcgagccgctcgaagtcgtcaagggtgctgagctctccggcaaagacaacatcctgttcatccgcaactcggtgaatggacgtatcgaagcccgctaccgcaaggtgggaattgagctcaacgccaagctgcacaagaactgaaattgaaataatggagcgttatcttcgttgctcctcggtcgacgtacttccgtacgccttccctcggtgcgcttcgataccgcacacattatttcaatttcagaactagccctgctcgttcttatgcagccgtcgcagcatagccggtttgcgctgtacatatagaaagcgcctcactggatctccagcgaggcgctttctcaaaccaacaatcaccgctcgtccatcggcacgaaatcgcgctcgaccggaccggtgtagacctggcgcgggcggccgatcttggtgttcgggtcggccagcatctcacggtactgcgcaatccaaccaggaatgcggcccagtgcgaacagcgtggtgaacatggccggatcgaagccgatcgcccgataaatcaagcccgtgtagaaatcgacgttcggatacaggttgcgcgatacgaaatactcgtcgttcaacgcaatatcctcaagctcggtggccacatcgaacaacgcacgctcgtcggacggcagtttctgcgtatcctcgcgctccatgatcttctcaagatacttcttggcaatcgccgcacgcggatcatatgacttatacacacggtgaccaaggccggagatcttctggccattctccttggcatccgtcacgaactcggccacagacttgccggaatcacgaatcgccttcagctggcgcagtacggcctcattcgcgccaccgtgtaacggtccggacaaggcattgacgccagcggccaccgccgaatacaggttagcgtgggcggaaccggcgatacgcaccaccgaggtcgagcagttctgctcgtgatcggcatgaataatcagcaaacgacccaaagcatgcacatacaacgggtcagattcgaacggctcgtacggcacagcgaagcacatgcgcaggaagtcgtccacatagccacgcgcgtaatcggggtacagcatcggctcatcgcgacgacggcggaagatgtacgacacaatcgtgcgggccttggccatgatgatcttggcggcctcatcgagctggtcggtgtcggagatatcggtggtgtccggatagaacgtggccagcgcattgatggcggaggcaagcacgctcatcggatgagcggagcgcgggaacgaacccatgaaggtacggaagtcttcgccaaccatcgtcttgtggttgatgtccgcgcagaactgctcatactcagccctgctcggtagctcgccgtggcgcagcagccacgccacttccagaaaatcggagttctcgcacaactgctcgatggggtagccacggtagcgcaggatcgaatgcttgccgtcgatgtaggtgattttcgattcgcactgtgcggtggtgaggaatccggggtcgagcgttacccagccgtcattgcgcagcttggaaacgacgatgccatccggccctgcactagccttcaccacgggcaggttgaacttgttcgaatcgacatcaagttgtgccgttgccattcgcgcgccttcctcttcatgaaccacttaccccaaacattaacgttcacgcgttcgcgaacgctagtgttcggtactttatgtcttctgtgttaccgccggcagacaccggtcgatacacgaaagccgaagtgcgctcatgctatcaaagcaaacgcacttcggcttgttacgtctcgaattcgcgggaa

SEQ ID NO: 1144 - DNA, 98982 bp, Unknown
  R81_24m  MAG No. k141_6648
gcatggtggaggaaccagtggcacccttgaccggcacctgggcgaacactccacgggagatgtacatccacacgtccacacacaggttgtgcatgatgcggttggcgtgggagacggtggagtacagctcggcctgccagtcgtggctttcgatctgcgtggtcagcgggttccaggtcaggcccatgcggttggtgacgaattcgcgggagacggcgacccagtcgacatccgggcatgcggccaggtgggcgccgaacgtgccggtcgcgccgttgatcttgcccaagtgctcctggttttcgatgtgcttgagctgacggttcagacggtagacgtagacggcgagctccttgccgagcgtggtcggcgtggccggctcgccgtgggtgagggagagcagcggcatatccttgaattcctcggccttgccggcgaggtggtcgatgatgcgcttgaactccggggtccacacgttttccatcgcgttcttgacgcaatgggcgatggagaggttgttaatgtcttcggacgtgcaggcgaagtgcacgagggtcttcagctcgtcgttgatgttggccagctcggccggagccttgtcgatctgatcatcgatgtagtactccacggccttcacatcgtggtgggtgatggcctcatgagcggcgtgctgcttgatgccttcggcgccgaagtcctcgggaatggcgcgcaggaaggcctgctcttcggcagtgaacggcttgacgccgtcaacgatcggctggttgccgttgccctcaaagccgttggccagaagaatcatccattcgacttcgacacgcatgcgttcgcggttcagggcaggttcgctcatgtattcgacgagcggggcggtggccttgtggtaacggccgtcgagcggggtcaatgcgattgcgggggaaatatcggtaagcttcataacctccaagggtacttccagccgtgaaccgagctgctacactgtggtgtggcgttcccgcccgagccgcacaggtcaaggaacgcccgtgattcgattactgtgtgcggcctttaaggctaggagatcaccatgcctgcaaccaccattcatactcttccgaaacgttcggtcgccgtatcgtcgctgaaatggcagccgttggacatcgcggtcggtgccacactgggcgcggcctgcggcgtgatcttctggggattcaacttcgcgtacatgccgatctcttcggtgtttggtgcgattctgcccggtttcgccagcatcgtgcacgccgtctggtatttctccggtacgctggcggtgctgattctgcgcaaacccggagcggcgctgtacgtgaaccttatcggcacgctggtcgaaacggtgattggtagccagttcgatttgggcttcgtgattatctcggcgctgctgcagggtgttttcgctgagattccgttcgctttgacccgttaccgcatgttcaatctgccgatttccattgcatccggtgcgttggtcgccttggaatacggcacatatctgatgctgtttcgctacgtgggtgtgtcattcgtcagcccgcgtggcatcgtgcacatgatttccgaggtcaccggcggcgtgcttatcagcggcgtgatggcctggtatctgatgctggccatcgccaaaaccggtgtgctcgaccgcctcgcatccggccgcgcactcatcgagcgacgcgcctgacaccctttgcgcgccactttcccggggatgttgcgctgatagagggggtttcgggcatgctagcgcaacaatcccgggaaagtggcgctagccgcgtctctgcggtgattgcattgtggggggtagccgattgatgctaagcattgacagcattgacaagttgatgtgcccgttgccgtgagaccccgagtatatcgcctatttgctgtagggcgagacccatgccatgtagttcttgtgccgcggcgcgagtttcccgcgctgcgttcgatctgcattccgcttcttccttgcgcagtcgccgagcttcatcaaggtgctcttgtacggattgcggcagttttgtctctatggtgagtgcgaaatcagcatcttgcgtcatgacggtgataaggtcgcgtgccatactttcaatctctgctgttgttcttgcctgcgtgaaaccgataccggggatctcaagaatccagtatttttcgccaggacgaacgatgacctgatatgttttcactgctgataccagcctttcccgagtttggcttctgcttctttgcaaataatgtccgcgaggttgttgtcgatttcgttatgacgtgggatggggaatcataagtccatcgagttggaatatctcatgactccctccttgcctgatactctcaaacgtaatattcttgcgtttcgccgcttgcttcatcagtttgatgagccatctcctactcgtcattatattgttaactcctttcttgacaactctgtcaagtgtggtatttacttttaaccgccgaacgtgctgaactcggtggtgcgctcgccgggagcaatggttgtggactgggtcatgcggccttggtaatagcgggtttccttgagttctccgttgatgacttcctgaaaatgcgcttcgtggcgctgcacggcgggggagccgaggtcggtggcgttctgataagcggcctgatggtatttgagccaatgcgacaactccctgccgttggtcgaaccagccacggatgcggcgtcatatggggtcagaccgttgatgggcgttgcgccgggagtgcatgagacgtccgaatgcactgtggatggtgttgccgcgggcgcgggcgatacatgcccttgcacggtgagccaattatcggtgaccgggttggcggcaccatccagcgcggcgaccagttcatcatcgatttccacgctggtgacccacgtgcgttgcggaatcggatgattggccaccggcgatccggctgtcaccacatgctcgatggtatattcctctgcccaatccgaggcaagcgtggcggcaacgatgccaccttgggagtggccgatcagtgccacgggctcgtccttgccgataccagcctgacgcatcgcctcggcaaccgtgcgagcgctgtccgctttcctgcggcgctcctgatcggcgctcatcagttccacgttctgcgcccagccgaatggtgagtcaggttgtccatcggtacccgggatggtgaccagccaggagttggttccatcagcccgttcatagcgttgaatggcgatggtcccatattcgagtccgctgttcagctcgattttgccgagccgttcttcggcgagcctgcgcagattctccattgactcggccaccgatccgcttgcacggacgacgtcggcattcgcctgcacctcgcgcacgttcagatgattgccttggacgacgtctttcgccgggccggagaaattggcgattttccccgcagccttgttgacctcatcggtgtgcgcaatgctcttgccgataggtacgccgccaatgattccgcccgcgccgctgagcactccttcctggaacggataggtgaacgtggacatccatgctgggttcggtttgccgtcaatagcccagccggccagaaagccgcccgccgccacagcggcaacacccaccgcggcatatcccggtttggcctgtgtaccggcctgcaataattcggtaaacatgcgccgagccgtcatctccgcctgagaatacagagagtgtgcgcgaatcagcagatcggccgcgccacgcaggtcatcgctcaaccgctgacatgccgttgcatggtcataacaccgattgcccagcgcggcatatggtgcagtgacatggccgggaacaacggcgctcggatcgcccgactgcaaggtgacgcacatcggcgcactatgccgatgtgactgcaactgtaatgcggccgattcccaagccgtggctatggccgcaaatcctgccgcctcgtcatcgagagccttggctatggcggcatattcttcaagagtggctggcgcatatcccactccgccgtaaacggacgattccacctgccagtaatcgtgctcgctcatgatgacccccaagccaatcggtgggtggtctccatgtcttgcgcgagactggccgaatactgtgcggtgcgactgagccgcgatcggaataggtcggcggctttaccggtccacacgatgttgcgagagcggttcacggccaccgccatctggtccgattgcgccagtgtggccgcacgttggacggacacgaggtcgcgactacgctgtaccgccgcatggcaagggcaagtgccgtaatcgaacggcgtcaccgtattgccggcaaagccgccggcgggatcgatgggtgctggggtgctggtgtaggtattcatatatccagctaaaaggacaggactcatgcttgtccagccggaacgaccaatgtggttctagcttgccgattttgggcgaagttattcacaagtgttgtgtatagccgtaacgattatccacaaatagcctgtttgggcacaccttggatcagccatgggctatcgggatcagacaaacgccaaagccgacagccgaaaccgggaaacagccgcgataaggccatgacccgtgaggatgtgagaaaaagagcaaccgtgaacgactgcttaccacggcttggtggccccggtacccttgttctgcgtcgccttctgctcggattgggtggtgttcgactgggtatcggtggattgctgattggccttcatcagctcctcgacctgcttcttctgctcgtcggtcaacgcgccgccctttttggcattggctgaggaactctcggattgctgcgccgactgggcttgcccggaatcggaaccgctgttctgcgcctcggcctgtttcagggtgatcttcgtcagctcggaagaaatcgaagcattggtgtcgatggcgtccttgacttgcggcaacagaagcgtacgcattcgcccggcctcggcgaattgcgcatcggtctgctgctgttgcgccttgagcgtggtgatatcagtcgactcatcctgagccgctttgatattggcattcaatgatgcggtggcctgattgaacgtaatcgaagcggacaggtttactgccgccacgccggcaaccagcagcagcaatacggtgccacaagccaggacgatacgtgcccaaagcgggcatttcgcccgcatccgaatattcgccgagccatcgttctcgtggatttcgttactgttcctcacagcagcctccttgaggtcgcgatccatgcaccgacttccatggcaagcaatatcgccaacgcaatggccaacggccataccaccggcgtggtgcgtgtgcgttccttgaccgtggtggtcatgcgccactgcttcgacgacttggccgaaaccgaatccgccaaagtctgtgaagcgtccacggccacatacgtgccactgatctcgtcggcaatgtctttaaggttcttctcatccatcttggagatgccgggttcgccggtatccgggtcgaccacccagtggtccgtggtgttggaatcgccggcactgacgccatcggcgatgacgggaatcttgccgccctcggtcgagccgacgcccacggtaaacccatcattgagatactgtcgcagtgacgagaacgtacgacgcgtcacattcgaggtctgttcgccgtcagtgatgaggtacagcacaatcgcatcatccgggtgcgcttcacgaatcgacttcgcggtcagcagcaattgatcgatcggagcatccagactggatcccgccgacacggatgtggcttccaccgccaacgtgttggcccaattatcgatggccggcgcatccggggtcagcggcacatcaagtgttcccgaagcaccgaaccgtaacgccgcgaaactggcgtccgggtaagcagcggtcacatcatgcacggcctgacgcgcggcatcgatgcgggtaatggtcttctcggacccgtatgtggcatcagccaccgccatcgacccggtggtatccaccgccacgatgacgtcggtggcattgatgacctgtgaggtggtagacgataccacgctgggagtcagtaccatcaccgctacgatgagcagcataagcgtacgtcgtatgcaagcccacacggtctcgtcactggaagcacggcggcgaacaaacaatacgatttcgagaatggccagtacggcgagcccggccgccagcagtccgtcggcgacccagcccaaggcgggggagaaggtgaatccgttcatcgcctcaacctccatgcacatacgatccagataatgagtatcacggccagagcaagcgtccacagaccgggagcgtccaccattgaggatttcgccttgttctccacatccgtatctctacgcgactgaatatcccgtaccagctcatctatcgacgcgccgttcgattgggtgaggaagatgcctccatgcgactcgatcgcggacttcatatccgttgtggtttggtccgattcactggctttcggcccggaatacaggccgtccacggtgattttggtctgctgggtcaagtccaacgcttcggtcagcgaataggtgggtttgcctgacacgacgttgtcggtggccagcacgatggatgccgcacgctgacggtcggcattcgcatgattggcttcgccataagcgaaaccggggagcatcgccgcgcaagacaccacgccgtcgccaatcaaggaggtggcgtccttgcggttctgcgtgccttcgagccaattggcgatgtcctgatattcggcatcggacatcttatcgatgtcatcctgcgactcgacgcctttcagcgccttgctggcggaggtcaactgtttggtgaccagttcgtagtcgtcggtcagcgggaacaccgtgcgtgaggtcgagttgaagatactcaaaccgatacgttccccctcgaaatgcttgaccagttccaaataggtatcgatgacctcgcgatcataggggagcgtggatcccgacacatccagacacaggacgatatctcggctggaagcgcgttcgtcaccggcatccacttggctggggcgagccaccagcacaatggccagcgccagcgcaagcaccagcacgctgatggcgagacggcccaaagcgcgccattgacggaacagacgggaagcgtgctcggtattgagatcgtcgtccatcgagaatacaggggtgtcgtcggcggcgttacggcgggcgaacacgacaatcagcacgataatcgccagcgctgccaagacgccggccagagcggcccaaggccaatgccatgccagcatcatgaacgccacctttccaccagattcgccacccactcggcggcctgctgcacgctggtcgtctgggcgattcggttgcgggcatcatcggcaaattccggtggatacaacgcgctaatggtctgcttcaatgcgtccaatccttggcgattcgcgggcgtgcgattcaggtacgccaaatcggtcagcgtactggaactaagctccttgcctgatgcggcaccggcgaaatcacgggcgatgacggccaattcgacgaaagcctcatgccggggcagtgctccggattcatgacgggccaccacatcgtcgatgcgggcacgccactcggccttggagctggcattgctatgagtgccacgcgcacggtcgctgttccgaggtttgcgtgcggggcgagccagcatgatgatcaacgcgatcagacctaccgccagcaacaggcatgcgacgatggccatcaccaggggagtggtcaaggccaacgactccacgggcctgagatcgccgggatcagtggcgagcgggatgatggggaacatgctgtgcatcatagatcacccgccaaagtcagtccgaccagttcgggtgcagtgcccagtctattgcgtgtggtgcgggccaatgcccgggacaccagggcgacgaaacgatcgaacatggattcgctggatgcggctcgaatgatatgggaaccggcacgggtgagctcctgttccaaagccgcggccatatacgcgcgatgagtatcgacctcggccgctgccttggcgttgcgcaggaatgccggcacacgccgtgcactcaagccgtcggcgggagcgtggcgggatgagacggccttgaacggattcatcgtcgccacatcgatcagcaccatcggatgggtgcgggtaatacgacggatcgtggtgatatgccgctcctccatcgcatgctcatcggtggccaatacgatcaatgcctcacgatccttgatacggcgcgcatattccagcagcgcgtcgatattacggtgatgatcccaatcacgatcaagcgccttgtccagcgtgcgttcgaactgcgcgaacccaccgttgaacggcacgcgggtgatgctggactcatcgccgaacaccagcgaaatatcgtccgaccggcgcaacgacagtgcggcgaacatacgcagcgcattggcggcaacctgccatgcgcgttctccggaagggcatacgccagtcatctccaggcctacgtccatcagcaaccagacccgtgacgtcgacaggcgctcgcgctcgaccaccatggggcggccttggcgggcgctggtcttccaatcgataagacgggattcgtcgcctggctcataggcatgcacatccatcgcatcgccgctgccgccacgacgtccggatgcgtgttcgccctccagcacgcccaaagccttccttacggtaggcaggctcagctgagtgccaagggcctcgattttcttgcgaacggaatcggaactcacggaacaggaaccgtttcgacgatcttgtcgacgatctgatcgctgaccacgccatcggccagtgcctcgaacgtcagcataatacggtggcgcagcacctcatgagcgaacgccttgaggtcctcgggcaccacatagtcgcgcccggacagcaacgccttcgcctggccgatacgggtcaaggcgatggtggcgcgcggcgaggcacccaaacgcaccaaggacgacagtcccttgatggggcgggagccggcacctcgtgacgtggcggtgatatcgaccgcataacgcatgatcgcgtcggaaacatgcacacggcgtgccgccttgcgcagaaaatcaacgtcagacacggaaatgcgttcgccggtgatggtgtcgggaccgatcatatcggagccacggtgggtgagcatggccagcatgcgagcctcttcgtcgggcgaaggataggtcatgacggccttcatcatgaaacgatccatctgggcttcgggcaggttgaacgtgccctcctcctcaatcggattctcggtggcgatcaccatgaacggcttgggcaaggcgatacgctgcccgccgatggtcgtggcaccctcggccatggcctcaagcatggcggactgggttttggcattcgaacggttgatctcgtccagcagtacgaaattggcgtgaatcgggccgatctgcgtggtgaacttctgcgacgcaaaatcgaagacctgcgtgcccaccagatcggatggcatgagatcaggagtgcactgcacgcgtttgaacgagccggatacgcaggtggcgagcgtctgggcggccgtggtcttggccaagcccggcacggattcgataagaatatgcccgccggccaccaaggtcacgataagcgattcgcgtagattatcctgacccaccagtgtctgggcgaacctcgcccgaatggcgtcggccaggatacgtgcgcgtttggcgtcatcggcacccagcggagccgacacgccgggcgcgggaacggtgaccggtcgtgcggcggtggtcggcgaaggtatgttcggttgcgtggggaacaaagtcatgccctcactgtaactactcacaatgactgttggtctgtctaaagagtccaatccaccgggtcggcacccatggtgactagggcttgattggctctggagaatggtttggagccgaagaatccgcgggaagcggacagcggactcggatgaggcgatttgataatgaaggcattggtcagcaatggctcgaggctttgcgcattacgcccccagagaatcgccaccagcggcttgggcttgccgtcggcgtccgtgcgcgcgttcaacgcacgaatcgcggcctcggtgacttcctcccagcctttgccctgatgcgaattcggccgcccgacgccgacggtcagacatctgttgagcaacatcacctcacgttccgtccacggtgtcagatcgccgttggtgggcatgggcaccccaaggtcgtcaaccaattccttataaatattgaccaggcttttcggcagcgggtgaacattcggcgccacgcagaagctcaaacccaccgggtgacccggggtcgggtaggggtcctggccgacaatcagcaccttgatggaatcgaacgggatggtgaacgcgcgcagaatattgtggcttgccggcagccacgggcgcccggcggcgttttccgcacgaagaaaatcgcccatatggtggatggcgggctccacgtcggccaaggcatgggcccaccccggctctaccagttcgctcaatggtttgatcatgactcaccactgtagtcaaacgtgcatatccggtgcacgaggcgtggtgtggtggactgatgagttgtttgccgattacactcatgggtagttttgacaggaagaaagggcgattatggcacgcgacatgatgacctacgaatcctatgaaccggattccttcgacaatcctccgaagggaccggtgggagttcaccgtggcgctcgttcggcagtggcccgcctctgcccgttcatcgtcgttattctggtggccgcactgtgcggtgtcggggtctgggcatggatttccggggaatacaggaatgcaataggaggatcgtcccagacggcgaccacgtccgggactgcttccaagtccgattcgtccagcaaggctgagaccaaaaacagcaccaaggatgattcctcgtccacttcgaccgatccgtccaaggactcgacttcggattcggcaaaatccgataccaacagtgatacgacatcctcgaatgagaatcaagactccgatcagcagtctcagcagtccggagccaccgcgactgtgaataaggccacgcaggtgcgtgtggtcaacgccacaggaatccaaggatatgcaggtcagcaggccgatgtgctgcagaccgccggttacaccagcgtcgaggcgaccaatccgcgcggcacattgccggcttcttccgtggtatggtatcagaatgaagccgataaagccaccgccgaagatgtggcgaccacgcttggcatttcggctgtggagcaggtgcaaggactcgccgttcccattacggtggtgctgctcaactagcgttgttgatgcgcccctgatatcggcgtggaatacatcgaaaactgtgagcgttctcgcgtctatggaataattcgtaccgaaaatgtgccactgcggttgggattgttccctcgtcactgtacaatcgtcatctagtcgcgaggtaggggagcgcgatgcggttctttctacgttccctataggttttgtgtcgcgacgcctaagggaacaaaggaaagatcagatatggcacaaggtaccgtgaagttcttccttgccaagaaggggttcgggttcatccagccggacgacggcagcgaggacgttttcgtgcactacgcggaaatcaaggacgacggcagcaccaataagttcaagatgctgtacgagggcgatcgcgtggagtatacgcccgcttcgtccggcaaaggcacgcaggcgaaggatgttgtcaagctgtcttcgggtgaagcccgctccgagtgagcaacacgcacgcaaggatgtgcattgaaggccctgaccgtttcgacggttggggccttttcatgcccaaagcgcaatcgccgccgatgatgttggcactcggcggtcgcgagtgctaatgtctgggttagcactcggaggtcgagagtgataatcggcagctgacggctggtcgtcacgactcgacgcttgcgagtgataaccggtatacctagccatttggaggaatacgcaaccatggcaaagatcatctcttatgatgaggaagcccgtcagggcatgctggagggccttgacaagctcgccaacaccgtcaaggtcaccttgggcccgaagggccgcaacgtcgtgctcgacaagacctacggcgctccgaccatcaccaacgatggtgtgtccatcgccaaggaaatcgaccttgaagacccgtacgagcgcatcggcgccgagctggtcaaggaagtcgccaagaagaccgacgacgtcgccggtgacggcaccaccactgcgaccgtgcttgctcagtccctggttcacgagggtctgaagaacgtggtcgccggctccaacccgatcgccctgcgtcgcggcatcgagaaggccaccgaggtcatcgtcaaggaactcgtcgccgccgccaaggacgtcgagaccaaggaccagatcgctgctaccgccaccatctccgccgccgaccctgaggtcggcgagaagatcgctgaggctctggacaaggtcggccaggacggcgttgtgaccgttgaagacaacaaccgcttcggcctggacctcgacttcaccgagggcatgcgtttcgacaagggctacatcgccccgtacttcgtcaccaacgctgacgaccagaccgcagtgctcgaagatccgtacattctgctgacctccggcaaggtctcctcccagcaggacatcgtgcacgtggccgagctggtcatgaagaccggcaagccgctgctgatcatcgctgaggacgtcgacggcgaagcactgccgaccctgatcctgaacaacatccgtggcaccttcaagtcctgcgccgtcaaggccccgggctttggcgaccgtcgcaaggccatgctgcaggatatggccatcctgaccggtgctcaggttgtctccgacgaactgggcctgaagctcgagtccgtcgacacctccgtgctcggccacgccaagaaggtcatcgtctccaaggacgagaccaccatcgttcagggcgctggctccaaggaagacatcgacgctcgcgtggcccagatccgcgctgagatcgagaacaccgactccgattacgaccgtgagaagctgcaggagcgtctggccaagctggccggcggtgtggctgttatcaaggtcggcgctgccaccgaggttgaggccaaggagcgcaagcaccgcatcgaagatgccgtgcgtaacgccaaggccgccatcgaggaaggcctgctgcccggcggtggcgtggccctcgttcaggctgctgccaaggccgagaaggccgaggccgtcgcctccctgaccggcgaagaggctaccggtgccgccatcgtgttccgcgccatcgaagccccgatcaagcaaatcgccgagaacgccggcgtgtccggtgacgtggtcatcaacaccgtccgctccctgcctgatggcgaaggcttcaacgccgccaccgacacctacgaagacctgctggccgccggtgtgaccgacccggtcaaggtgacccgctccgctctgcagaacgccgcctccatcgctggtctgttcctgaccaccgaggccgtcgttgccaacaagccggagccgaagcctgctgccccggccgccggtgccgacatgggctactgatccgcaagcgatcgctagctgattgagctgaaaggggactccttcgggagtccccttttttgtattctggctcccctctttgaggggagctgtcgaacgcagtgagactaaggggagctgcggtgtagggatactccctcagtttcgcttcgcgatcgagctcccctcagggaggagagccaagaaactagctggcaaacaggcgcgaagcttggatttcggcgtcagcgtacacggtggaggcttgcgtcagcgagcgttggatggactcgagtgaggcctccatctgctgttgggccgcacgccactgttcggctaccgcggtgaactgggtggccgccgaacctcgccatgcgtcctgcaaggcattgagattggtgtacatgccgcccacggcctgcctgatctgcgagatcgaagtggccactgcggccgaggatgattggattcgctcggaatctacctgatattggggcatcgttgctccttttctagagggttaatggtatgtatggcggccgcttgccaataccggccgctaaggtggaggatatgtcaacaacgaatcgggaagacggaaaaacaactattgtggtcctatcttcggagccgtcctgttcggccttcgggaatatggtccgaaaatggcttgtttgtgccatttgcgcccttgctgcagtagcgatgaacgcaatgtggataaccgcaaatgcctatggggataactcgggcgacagctctgacagctccagcagcagcaccgacagcggcgtgaccatcaccgagaacatcacggatacggaaaatctcctgggctcccatgcggccgaagtcacggatgccatcgccaaaaccgagaaggaaaccggtgtacacgtgcatctgctgtatctttccagtttcaatagtcaacagaaaccggaagactgggcggcaaccgtgatggagtccatgaatcccaagccgaacacagtgatgcttgccgtggcctcgaatgacggcaacctggtggtcgtcgtgtccaagaactccgataagtggcttctcgataacaaaaccgtcgataagctatccgaagccgcacagcagccgttactggaaaacccgccgagctggtctggcgcggcaacggcaatgatggatcaaatcgtgaaatccaaaaaagcctccacctcatcatccacggtgaccgtaggcataatcatcatgggtgtggtgttggtggcgctggtcatcatcatcgtggtcatggtggtgattcgtcggcgcaaggagatcaagaaggattccaaggccgaactccaagatgacattcaggaaacgcccagaagagcgcgacactctaggaagcatgagtaagcctattgaagcatcgattgttgttgtcgacgacgagccgtccatccgagaactgctggtcgcttccctacacttcgccggattcgaggtaaacaccgccgcttccggttccgaagccattgaggttatcgaaaaagtgcagcctgatctcatcgtgttggacgtcatgctgcctgacatcgatggatttaccgtcacccgccgcatccgccaggaaggcattaacgcccctgtgctgttcctcaccgctcgtgacgacacccaagacaagatcatgggcctgaccgtcggcggtgacgattacgtcaccaagccgttcagcctcgaggaagtcgtggctcgcatccgcgccattctgcgccgtacccgcgaacaggtggaagacgacccgattattcgcgtcgccgacttggaaatcaacgaggactcccacgatgtgacccgtgcagggcagccggttgacctgagccccaccgaatacaagctgcttcgctacctgatggacaatgagggccgagtactgtccaaggcacagattctcgaccatgtctggcaatacgactggggcggcgacgcagccatcgtcgaatcgtacatctcctacctgcgcaagaaagtcgacggcatcgaggtcgacgacggcgaaggcggcaagcgcaaggtgactccgctgatcgaaaccaagcgcggcatcggatatatgattcgcgaaccgaagaactagtcgccccatccataacgcatcgcaatctcatgagtatccccgataagcagtcaggcggcgtaccgccgagcagcacgccgaacgccgccccgaacacgaatcccatgcctgcaatgccgccgttcgccgcccatttccaagagcggcacgaacgtaagaaaaacatgctgatgcggcatatcgaccgtatctcgttgagcagcaagctggtggcctgcaccatcgccgtgctgcttatcggcgtgtcggtgatttccttctccatccgcgcgttggtgaacaactacatgctgcagaaaaccgacacccagttaagctcgcaaagccagctggtggtcaacaatatcgatctgctgtcaaaaaatgactcatcggggccgaactcgtactttctgcagattcaatataccgacggcaccaaagacaaagagggcaatcctctggtcgtgaccccgctgatgccgcagatgcaggacggtatcgtatcggtgccgattcttcctacctatggtgataccagtggcatcacgctcggccaggcattcactacgcaggcagtggccaagcagatcatcacggtgcagtccgacagtgcggacagccagaacgatccggccaacggaaactccaattcctctgacaccatcgccaaggtactggccaaccccactgtcaatgccaaccatgccgccatcgtcacggcgagggcaccatggcgtattctgccggtgaccttccagcaaaacggcaaggaccgtgccgtggtgtacatcggcttgtcgctggccgaccagatcgacaccgtcaacacactcacccgatactgcattgtggtcggcatcgccgtggtgctgctcggcggctccctgtccacgctgatcatccagcacacgatgacgccgctgaagcgcatcgagaaaaccgctgcaaagattgccgccggcgacctgagccaacgtattccttccgcgccggaaaacaccgaggtcggctccctggccgcctcgctgaactccatgctcacccgaatagaatccagtttccatgaacaggaggagaccaccgacaagatgaaacggttcgtctccgacgccagccatgagctgcgcaccccgttggccgccatccatggctatgcggagctgtataagatgcagcgcgatatgcctggtgccttggagcgtgcggacgagtccatcgaacatatcgaacggtccagccagcgcatgactgttcttgttgaggatctgctgtctttggcccgtctcgatgaggggcgcggcatcgatgtgaccggcacggtgaaactctcgtcgctggtcaccgacgccgtcgacgacttgcatgcgctcgacccggaccgtgccgttcgccgcatgcagatttccctcgaaccggcgcgcgatttgaaccatcccgccgaattcaaccttgccgaaggcgattggcccgaggtcgtgctgcccggcgacgcctctcgactgcgccaggtggtgaccaacatcgtgggcaacatccaccgctacacgcctgccgattcgcctgccgaggccgcgctcggtgtgatgccggccgccatcgatccaagacagctcgctcgcatgcccgccagcgacgcgtcaatgcggcggttcatcgacgccgccgaagtaggtgcctcgatgcagaccggctatcgatacgccgtattgcgtttcgtggaccatggccccggcgtgccgcctgaatcgcgctcgaagattttcgaacgcttctacaccgcggacccatcccgtgcccgcgaaaagggtggtaccggtttgggcatggccatcgcgcaatccgtggtcaaagcacatcacggctttatctgcgccaccggcaccgatgggggaggcctgaccttcaccgtggtgctgccgattgagcagatcgtcgctcctgagcccaagcggcccaccggcaaaaccaaggacgccaaacagaagacttcttggttcagctctgagcgtaagactcaggcgactcagcccaaagcgtgaggtcaagccctgtgaggtaaactgtaccttcggtttactatttccattgaggattaaggaaggttcgcaatgcccaccggtcgagttcgttggtttgacgcagccaagggttatggcttcatcaccagtgaggaaggcaaggacgtgttcctgccggctcaggccctacccactggcgccaccacgttgcgcaagggggccaaggtggagtattccgtggtggacggccgtcgtgggccgcaggccatggatgttcgcctgatcgcctccactcccagcttggtcaaggccacccgcccgaaggcggatgacatggccgccatctgcgaggaccttatcaagatgcttgatgcggccggcaatacgttgcgccgtcaccgttacccatctgctgccgacagcaaaaagctggccacgttgctgcgtgcggtggcggatcaattcgatgtacaggactgatctgatctatgactgataccaccgaaaccatcgtgacaccggaccctcacgccatcgcgcgcgccgtgctgctcgaagtggccgacgagagcgatcaggtgggggatttcgttacctcatatgatcttgaggatcacgtcactgacttccgcttcgccgcgaatatccgtggctacgaaggatggcaatggtcggtgacgctgtatcacgacgaggagatcgactcctggaccgtcaacgaatcctccttgattcccactgagggcgcgttgatgccgcccaagtggattccttggaaagatcgccttgagcccacagatctggctcccaccgattcgatcggtaccgatccggatgacgagcgcatcgaggaaggcgaagtcgaggaatcctcgctgcaggatgtcaacgatgccgtcgagaccttccgactgacccgccgtcacgtgctgacctcgttgggtcgtgcgcaggctgccaagcgctggtatgaaggtccgcgaggccccaaagcgttgagcaccaaaaccgccgaaggcaacctgtgctccacctgtggtttcttcgtgccgctcgcgggcgaactcgaccgtatgttcggcgtgtgcgccaacaagtggagtccggatgacggccgcgtggtctccctggaccacggctgcggtgagcattccgaaatcgaacctcccgagccaagccagctgtgggtgcagtccaagccagcctttgacgatctgcatatcgacgtggttgccaaccgtccgtgcaagcaggagcaggttgcccaggacgaggccgaaggcgaaaccgacaagacaggcgagcctgccggtgatgatatcgaagcacagaagactgttgacgggaacgccgtcgatactgagcccgctgaggaggcggcaggcgacgggacctcgcaatcccagtctgccggtgatgagtctgttgcacagaacgcatccgattccgttgtggatgttgatgcagctgattccagcgacgagtccaagtctgatgctgacgacgaggccaccgaagaggacatcctcaacaacaccgttgccgatgatgatgaggatgatgagatggacgacgaagaggataacgttcgtctttcagacgatgtgactcctgaactcgaaaccgtcatcgatctcattgagcagctgcgccagaacagggcggacgaggaataaaataaacgccaatcctgctccccaacagcagaatgtactctcggatcaacttataggtctcagcgaagatgtttcctaaaaagtagatggtgatggggttgcaggaataaagaattcctccctgcaagcccatcaccgagacgtgcgttagcactccatgccgatttcggtgaatcagtgcaccacagtcaccgtgcattcggcgaagttcacgatctgacgggacaccgatcccaggaagtgcgcgtccagaccggacaggccgcgcgaaccgaccaccagatggctggcgtaccgagatgccgcaatcagccccttggacgcgggaatatggaaggcattcgcgctgaccttgacaccatcgggaatctcggccttggccatcagcccggcgagaatctcctcggcgcggcgctgaccgaccttcaccggtgccacggcgttctcatagcccggaataacgcccaaatccttgagctgccagcagaacatcacatgcagcggcgcgtcgtgcagtcgtgccttttccagcgcgaagtcgaacgcgcggcgggaagtctcggaaccatccacaccaaccaccaccgggcggcgagcctcctcgaccaccggctgaggctgcgtgtagtggaccggctggtctcctggcgtcagggcattggcgatggcatcggtcacggtctcatcctcgctgccggcgatgcgcaccacggtcaccggcacttcggcggcctcggccagcgaagcggacagggaccccatgaaccagcgggccacacggctcagcgagcggcggccgaccacgatctgctgcgcatcatggccgatctgcagcagggccgaagtgccggaggccttcaccgaggtgagcttcagattcgccggatcgaagtcgatgcctgcagcggccttgtcgacccacacacgcagctcgttggcgatatcgtggcggaccttggcccaggcctcgtcgctgtccggttcggaccccatatcccacgaatgcgtccagccaaacacggcgttgacgctctgaccggttaacgaagcctcctcaagcgcccacttcagcgcggcaaaggattcatcggaaccatccacgccgacaacgatgtcgggcttggttgtcgcttcactcatttcgagcctccttgtaatcgactacgggtgaatctagaaccagcatatcgttttcttatcctctcacggcgcaattcatggaatccgatgaataaacgtcatcgtgaatcggtagagtaagacggaatgtcaattgaggaaggacaagcatgttcgaacggtttaccgaccgtgcacggcgcgtgatcgtgttggcgcaggaagaggcgaggacccttcagcacaactacatcggcaccgaacacctgctgctcggcctgatccgcgaaggtgagggtgtagccgccaaggcactcgcctcgaagggcgtggagctggatgccactcgcaagcaggttgaagaaatgatcggcaagggcaacgcggctccgaacgggcacatcccctttactccgcacgccaagcaggtgttggagttctcgctgcgcgaagccctgcagctgggccacagctacatcggcaccgagcacatcctgctcggcctgattcgcgaaggcgaaggcgtgggcacccaggtgctcatcaagatggacgtcgacctgggtgagctcaggagcgcgaccatcgatatgattcgcggcaactccggcaccggcaccggtgacggcaagggcgatctggccaacgccggcggcgtgacagacaagcagaacaagtccggttccgccattctcgatcagttcggccgcaacctgaccgtcgaagccgctgaaggcaagctggacccggtcatcggccgcaccaacgagatcgagcgcgttatggtcgtgctctcccgccgcaccaagaacaacccggtgctgatcggcgagcccggcgtgggtaagaccgccgtggtcgaaggcttggcccagaagattcaggccggcgacgtgccggaaaccctgaagggcaagcaggtctactcgctggacctcggttccatggtggccggctcccgctaccgtggtgatttcgaggagcgcctgaagaaggtgctgaaggaaatcaagacccgtggtgatatcgtgctgttcatcgatgagatccacaccatcgtgggcgccggctccgccgacggcgcgctgggtgcctccgacatgttgaagccgatgctggctcgtggcgagctccagaccatcggtgccaccactaccgacgagtaccgcaagtacatcgaaaaggatgcggctctggaacgccgtttccagccgattcaggtgcacgagccgaccatcgccgagaccatcgagatcctgaagggcctgcgttcccgttacgagaaccaccatcacgtgaccatcaccgatggcgcgctgcagtccgccgccgagctgtccagccggtacatccaggaccgcaacctgcccgacaaggccatcgacctgatcgatgaggccggtgcacgcctgcgcatcaagcgcctgaccgccccgcctgagctcaaggaactcgacgagaagatcgccaagatcgccgccgacaaggacgaggccatcaagggtcaggacttcgagaaggccgccgaactgcgcgacaagcaggagaagctggaagccgatcgcaagcagaaggaagactcctggcgcgaaggcgagtccgacgtcaagatggtcgtggacgaggacgtgatcgccgaggtcatcagctccaccaccggtatcccggtgttcaagctgactcaggccgagtccaagaaactgctcaacatggaagccgaactgcacaagcgcatcatcggccaggacgaggcggtttccgccctgtcccgctctatccgccgtactcgcgtgggtctgaaggacccgaagcgcccgtccggttcgttcatcttcgccggccccaccggcgtgggcaagaccgagctggccaagacgctcgccgaattcctgttcgacgatgaggacgcgctgattcgcgtggatatgtccgagttctccgagaagtacgcggcttcgcgactcttcggcgcgcctccgggatacgtcggctacgaggagggcggcgagcttaccgaaaaggtgcgccgcaagccgttctccgtggtgctgttcgacgagatcgaaaaggctcatccggacatcttcaacacgctgctgcaggtgctcgatgacggccacctgaccgacggtcagggccgcaaggtggacttcaagaacaccatcatcatcctgaccaccaacctcggtacgcgagacatcgccaaggccgccaacacgggcttcaacctgggtgccaacaacgagtccagctaccagcgcatgaaggaccaggtcagctccgaattgaagcagcagttccgcccggagttcctgaaccgtctggacgacatcatcgtcttcaagcagctcaccgagccgcaggtgcgccagatcgtggatctggacgtcaagcagctcaacgaccgcctgttcgaccgtcacatgtcgctcgaactcaccgacgccgccaaggacctgctcgcgcagaagggcttcgacccgctgctaggtgcccgtccgctgcgccgcgtgattcagcgcgacatcgaggacgccatctccgagaagattctgatgggcgatctcgaagacggtcagcgcgtgattgtggatgcggaaggcgagggtatcctcggcgaattcaccttcaagggggagaagttcgaggagccggccgccgccgataagcccgccgaagacggtgccgccaccgatgccgaaacttcgtccgaagccggtgcctccactgatggcgagactccagccgacgccactccggccactgaaccagccgaatccgctcccgccgattccggtgacgctccgcagaagtagtccgtttcgatagcgtagctagcgcataccagcaaagctccccttgacaggggagctgtcagcgaagctgactgaggggtagacctacgcacacataatgtgcacgtttttggtctacccctcagttgcctctggcgatagctcccctgtcaaggggaactactgtttgttgtcgggttattgcagcagggcgagtccggtgtcgatggtctcctcgcgggtaaacagcgtgcggccggcgcgcaccgaacgcaataccgagcagcgctcatacacggcgttgaacacactatcggcgtccagcacaatgaagtttgctggcttgcccgtttccaagccgtacatatcgcgcaggcccaacgtagtggcaccgttgacggtcaggaacttcaacgcatcgtcgatttcttcaaagctcatcatctgtgccaaatgcagcacataatcaagaatgagcatcatattgccattgcccagcgggtaccacgggtcctgcattgaatcctggcccaatgacacattgacacccgcctcagtgagctccttgactcgcgtgatgccacggcgcttggggaaggtatcctgacggccctgcaaatacaggttctcggtgggggcgcaggcgaagttgatatgcgccgccttaagcagcttggtcaggtgaaagaagtaggcgttgtccgccgatcccagcgaacaggtgtggctggcggtgaccttcgggccaatgccagccttatatgccaacgccgaaagcagctccacgtaacgggaattcggatcatccgtctcatcgcaatgcacgtcgatgagcttgtcgtatttcgaagccaactcaactaccgtgtgcatggaatgctcgccaaactcacggcactgttcgaaatgggggatgccgcccacgcagtcggcacccatcttgagtccttcctccaccagctcggcccccgattcgccatgcgggccctcgtaggagtacatgccctcctgcgggaagctgacgatctggagagtgaccgtatccttcaattcctccttaagctccagcagcgcctttaatgaggtcaggttcgggtcggtcacatcggcatgggagcgaatgagctgcacgccatgcagcatttctttcttaatgccgattttcgcgcgctgcttgatctcgtcgaccgtcaagtcggacttggtctcactccatcgctggatgccctcaaacaaggttccgctttcattcaccgcaccgggcttgcgggccgtgaatacgtaatcaaggtgcagatgcgtatcgcagaacggtgggcagacaagtttgccgcccagatcgaccacctcaatggccgccagatcaccaccctgagcctcatattgttgcgcgagtccggggccgaatgcggtgaacacgccatccgtgacgagaatgtcctgcaatggcagggtgcttgcagccgtgctgccgggttctccggtggcgatatgtgcgttggtgaacagtgtggtagtcatcgtcgctccttcaactggtgtgttgccgaacggttacgtgaaccgactgcccgcgtaaccaactgaggttattgtcaacagcacgctttgcggtgaggttaaccggaacgaccggtgttccgcgggggaatggacagattgtatgactgtatcgattcgcagtgcgcttcataacacgcagttcaaacgagccgatcctgtggtggaggtcgaaggcaaagacctcgatacgccagtgcgatgggtgtttaccaacgagcgagaggatgtctccagtttcctttcgggcggtgagatgctgattatcgagggtaacgctctgctcgccgccgattggcacggcacgttaggacaatatgtagcaagcctggcacaggctggtgtcgccgctctggtggtcgaactggtggagggtgtggtgcggatgccggacgaactggtgtctgcggccaggctgcatgggttgacgttgattggtctgaaatctcgcgtaccttttgtcgacatctgtcagagtgtcaataccgctatcgtgcacgaacagatgcacttgcaattggaggtggacacaatgtccacttcattacgtgagggattgtcccgtaccggcaatatcgaggctgtggccgaaaccattgcgtcgctgttcggcgaaagcgtcgccattttcgatggtgacggtctgttggccgctcgagcgggtcgtgcgttcgatgccggcaacgaatcgagcgccgtcatcgcccttgaaagtcgctcccggccggtgggagcattggagatcacgcaacgcaccatgactttcgacgccacgatgcgtcgggccatcgccaccatcgtgtctccggtggccgccctctatattgacggcggcgcgcgcatgggcatgatgcatcatctgagtatgggcccggccgacggcgtgcacgtcaatacatttgaggcgcaggaagcgcacgcgatgctcgacgcgctgggttttgccggatcatgcatctatatgccattcgcttttcggttcagatcggtggtggaaggcatcaaccatgtatcgacgatggtcgaacggttcgaagaacggtcgggatgcgccgtctcctgcatgctggaaggtgacttgatggtcggatggtgctccaccaccgattcctcagacggtgcggccgcattcggacgccattgcatggatgcgcttgccgtactggaaggcgacggtgtgtacgtggtgcatggccgagtggcattggacacggtgacgctggtcgacgggttcgcggtattgcgtgacatcgccaatcaggaaccggcatacgggcgaatcgtaagtaccatgtccgcactcgtcgaccgtttcgtcgcatcctctgatatggacaaggcgatgcgcatgctcgtggtgcagaccatcggattcgaggtcgccgcctctccgttgttgctggacacactgtgcgtctgcttcgacaacctcgatagcaaaaccggcgcgtgcgagcaattgggtatcagacggcaaaccctgtacaaccgactggacaaagtgacacaaatggtcggcgtcgactataacgacaaaccgaactggtcgatgctgctattcgccgccaaactcacgaaatcatggcaagaacagcatggtgaataatgcgccagcaccactgggcaacctgtccacttctacgccgaacgggttaatcgacgattcacgtttcagcaaatactcaagggcatagtcgaggctatcgcggcgctggtcgacctgctgcgaaacgaattcccacttgaatcccattcagtcacacgaacagcacatccttgaaaggacggtgacatcatgagttccgcaacgattactacatctgcacgactgatgaatttcacccctcaaactgaagaacaggccatggtcaggaaagtcgcggtatcttccttccttggcaacttcatcgagtggttcgactacgcctcctattcgtacttcgccaccaccatcgccctggtgttcttcccaaccgacaatcacaccgtcgccatgctgcagaccttcggcgtgttcgcgctatccttcatcctgcgtccaatcggcgcactgttctggggtagctacggagataagaaaggccgtaaagccgcattggcccactcgattatgttcatgtccggtgcgagcttcctgattggctgcctgccgtcttactcggtgatcggcgttggcgcgccgattctgcttctgctgctgcgcatggtgcaaggcttctccgcttccggtgaatatgccggtgcggccacattcctcggcgaatatgcacccacctcaaagcgtggcatctactgctcgctgattccggcgtccaccgccatcggtctgctcgctggctccacgctggccacgctgatgaccgccaacatgaactccagcgcgatggtcggttggggatggcgtgtgccgttcctgctggccggcccgctcggcctgattgtgctgtacatccgtaccaagctctccgattcccccgtgtaccagtcaatgaacgatgctcttgagtccaagagcgccgcctccgctgacggccaagtcgtttccaagagcggcatgttcgccccgctcgccgaactcttccacaaccatctcaaggccctgatcatcagcttcggagcctgcgtgctgaatgcggtcggcttctacaccgtgctcacctacctgccgacctatctgtctgacaccgtcggcatggacgccacccagtccggcaccatcaccaccatctgcttggtcgcctacgtgttcatggtgttcggcatgggccacatctccgacaaattcggccgcaagaaggtgctcatcggtgcttgcgtggcgttcatcgtcctcaccgttcctgccttcctcatcctcaacacctcccagttctggcccgtgctgctggttgagctggcaatgtgcgccaccctgaccgccaacgacggtaccctgtccagctacctgaccgagacgttccccacctccgtgcgcttcaccggattcgcgttcagcttcaatctggccaatgccatcttcggtggtacggcctcgttcatcgccactggcctgattgccctaaccggttcatccatcgccccggcctggtacatggtgggtgttgcggccatcgccttggtcgcgatgattctttcccatgaaaacaccgacaaggatctgaatcacatctgatctcctcagctccggctcctttcccgagggagccgggcgcattcattgaccatccaatccaccgccaacccaaaggagtactgcaatgggtagcaaccgccgtatggaccacatgacctggccggaattcaaggaggtgaagactcatcccgtcatcgtgccgatcggttcgaccgaacagcacggccagcatctgcccatcggtaccgacgcggtactcgccacgcgggtcgccgaagatctggcggaacgcatcgacggcaccgtgctgcccaccctgagctacggatacaagtccaagccgctctccggtggcgggccgctgttcccgggtactatcgacatgaacggcgtgacagtgatcacccaaatgcacgacgtgctgagcgaactcatcgccgatggcttcaccaagatcgtcgtcatgaacgcgcattttgaaaacgaggcgttcatcgtcgaggccatcgacctggtcacccgcgaaaccgggggagtggccaccatcgtggaaaccaattggtgggacccggttccgcagtcggttatcgacaaggtgttcgatggattggtgttccccggctgggcattggagcatgcggccgtcaccgaaacttcgttgatgctccactacgcgccggaactggtgcacatggaccgtatggtcgaggaagccggtgccacggcgaaatcctatgtacgctacccggtgcgccaaggtgacgttcccgctcacggcggactcgccaatccggccggctcaagcgccgaacgcggccgcctgattgccgaggcgtgcgtggatgcggtagctgagatctgcgtcgaggaatttgccgagtaatctccccttgccgacgcattcgtagtgacacgggttgcaaaggcctgaccctgatagtacggggtcaggcctttcccatcccaagacgccgctaagaattcacctgagagtcgccttcctaggcatggccgttcaatcgacgatcctagcgtgactggtgtgagcaggaatatgaagaaccggcggtgggccggcaagcgatcggggatcgcttttggtgcagtagcgcttatccttacggctctggtggttccttatgcctgtgcgggaaccacgggagccgttcctttttccggcgataatccatcttccggcacccgtacggtgaccatcgccgacatcactgattttcacgggcatatcgaacgtggtgcagacaacgccaccgccttcaccgtggccgacagccataatcccggcaatatgatcccggtatcgaccggcgatttggtgggaggttccccgtatgagtcggcggtggagaaggaccaacccacgctggacatggccaaagcgtggggattgacgatttcggcggtaggcaaccatgagttcgaccgcggtgtcgccgatttcaacaatcgcatcgctgatcccagcaatggcatcgactggctgtgcgccaacacgtctgccgccagtaagtcgcctgacggactgctgagccatgtacgtgactctacgattcgaacggtgaacggcaagcggatcggtttcgtgggcgcccttactgatgcgctcggctcggtagccactccgcagattacgcgtgatgccgatcttgacgaacgggcggtggacgcgatcaatcgcgtggcccgtgaactcaagcgctccggaaaggtggatgcggtggtggccttgctgcacgccgatgcctcagccgccgccgatattgggcgagatgttgatgtggtatacaccggccacaatcatgcgatcaagcgtggtacgaccgctggtggcgcgcctatttacgaggcgggcagcttcgggcggaatatggccgtgcaggatttgatcatcaccggtgccgggcgtcgcgccacggtgcgagtggccgatgtggacctcggcaatggcaccagccatacggcggttgacggcgtgctgggcgtggaagggcttaatgcgcatccggcgcaagccgcttggatgtctgccggtgctgaggcgaacgatgaggtatcgcgcgctcagcatatttaccaggcggcggcaacatattcgaatcatgccggcaacgcggtgattggcaccttggcctccggcgtgaatttcgacaaacaaggttcggataagcacgggaatacggtcggtgtgctggtggcggacgcgaaccgcgagtcaatcatgaagcatgtgtatgccggaaatcgtttgccggtaatcggattttcgaataatggcagtctgcggactccacggcttgatatgaatggcgatggcaaagtcaccgtgcgcgaggtggatagtctcatggccttgcagttcaaggccgcgcatgagacgctcaccgggcgcgatgtgaagagagtgctcgccgagcaattccaccgtgacgatgggcgactggagcggcgctggctcggcatctcctcgaacgtgacgtatcggtatgccgaatgcggtacgaccggtgggagcggcaatgccgatgccgccgctgatactgatgccgccgctgataccaacgctgacgctgacgagtgtgctgccgacgaacatgcggcggttcgtatcgtgaacctcgccgttgacggtcgaccgattgcggacgatgacctggtgattatcgcatccaattcatatctgcttcagggcggcgacagttaccccgccttccgtgccggaaccaattacggcgagctgaatatgccatacagccagccgttgcatgaatatctggccgcacatcaagggctcacggcaattgttgcagcacaccggtagggactcaggcgtaagacaccaattgctgggtgactgaggaactatggggtgaagttatgagtatagggcagaagaaaacggcataaatatgacgaagctcccctcgctgaggggagctgtcgccgtaggcgactgaggggagcttgcggtataaccgtaaactcccctcagtcagccttgctgccggcttccctcagaggggaacctggcacgagacccttacttgatggcgttcagccactgctccttggtggccttctcggcttcgagcttggccttcttcttcgggtcggattcggccgcgatcttggcgtcgagctcggcgagctgggcgttgagctgctcctcgaagctggacttgcgggcgtcggcctccgggtcggtctgcttccaagcggcatcctcgatggccttgatctgcttgtcaacggcgtcgagacggttctcgatgcggcgcatatcgtcacgcggcacgtaaccgatctgatcccactcttcctgaatcttggccagctcctggcgggccttcttggcctcggcgtcggtcttcaccggcaccagagcctcggccttgaccagcagagcctccttggcagccagattctccttctcggaggagttgatctgatcgcgatcagcctgacgagcgttgaagaaggtgtcggcggcttcgcggaacttggcccacagctcgtcgtcctcgttacggccagcgcggccggccttcttccaacggtccatcagatcgttgaacttgcgggaagtttcaccccaagcggtggaatccttgagctcattggcctcggcgataatcgcttccttggcttccttggcggctgtacgctcgttgtcgcgagcctgagcccacttgcggcgagcctggttgaaggtggtgcgggcggcggagaagcgcttccacagcgcctcggcctccggcttgtcgatgcgcacggtggtgcgctggtggttctgccactcgtcgaacaggttgcggaacttgtcggcggtggagcgccagttggtgttgtcgcccagggaggccgccagagcttcggccttctcgacgatggcggtgcgctcggcgacggccttggcctgagcggccttgcgcgcttcggcgatctcggccttcttggcctcgccggcggccttcagttccacgtaacgggccttgagggccgcgaggtcgcccaccaccgccggttcggcggtttcttcgcccagcagcttcacggactcgtcgatttcacgggccttgatgttcggggaagccagacgggtggccagcagatcgagcttggccttgagatccaggaaacgacgggcgtacagtgccaacgcctcttccttggagacatccgggaactggcctacctcgcgctcggcgtcgccatccttgacgaagacggtgccgttgtcatccacgcggccgaaggcctcggcggccttgacatcagcctcggaataggcggcggtggcggcggccggggcggcagcgcgcggcttggccgacggagtcttcttggcgaaggcggcgggggagggcgcgtgcggtttcggcatggaagcgggggacggagtcggcgccggcgtggccgcgctggcttcgggtgcgggtgtcgttgcctgctcttcgggcgcagcggtgtttacgggttcggtgacagtttcgtcggccatggccagctccttaaagcgtagaatgcataagcgggagcgtctcccatcccgggcgaaccaggaagttttgacgcaaccctcacctattatattgatttcgtggctaaaggtgcatcaatatcaggattcccggagtggctcccctccgaacgtgttgtggagcagcgtgttatcgatacgcttcgtaaggtttttgagctcaacggcttcatcggcattgagacgcgagcggtggaaaccggcgcttctttgttgaaaaaaggcgagaccagcaaggagatctacctgctgagccgtttgcaggaggtcggtcatgaatccgacactccgattgaagagcggttgggcctgcatttcgatctgaccgtgccgctgagccggtatgtggtcgagcactcgggtgcgttggcgttcccgttcaagcgctggcagattcagaaggtgtggcgtggcgagcgtccgcaggaaggccgcttccgcgagttcgtgcaggccgatatcgacgtgatcggtgccggcgacctgcccgaccactatgaagtggaactgccgctggtcatggtctccgcgctggaagagctgcgcgcgtatggcctccccaaggccaccgtgcacgccaataaccgcaagctgtctgaaggcttctaccgcggccttggcctgacggacgtcgaaggcgtgctgcgcgagatcgacaagctcgacaaaatcggtgccgatgaggtggcccgactgctcaccgagacctgcggcgccaccgaagcacaggcacgcgcctgcctcgaattggccgagctcaccgcctccgacggtgctgagcttgccgccaagttcgatgcgctgtgcgagtctcacggcatcgccaaggattccgaggcatacacgctggctcgtcagggacttgataccctggccatgatcgtcgacgaggccgccgccatccgccccggttccgtcatcgccgacctgaagatcgcccgcggtctcgactactacaccggttccgtctacgagaccttcctcgacggtgccgcatcactcggttccatctgttccggtggccgttacgacaatctcgcctcccagggcaaccgcaagtacccgggcgtgggcctgtccatcggcctgagccgactggtcagctacatgctgcacgctgccggcgcgcacgccaaccgcgtcagcccggccgccgtgctggtcgctgtgtggaatgaagaggaccgcccggccgccaaccgtattgcgaaccaactgcgtgcgcgcggcatcgccaccgacgtggcacccaccgcggccaagctcggcaagcagatcaagtacgcggacaaactcggcattccgtacgtgtggttcccggccaccgctgccgaaggtgcggaaggcgcagagcccgctggcgacgaggtcaagaacatcgtcacgggcgagcaggttgccgccgattgcacgtcgtgggagccggatactgtggttgcccagcaaaccgtcgaaatctgacgtattcgcgcgaaaaatcgaggagaaacaagacaatgagccagacggcttacagaacacatcatgccactgaagtgaccgaggccctggtcggccagaaggtcaccctcgccggttgggttgaccgacgccgtgatcacggtggcgtggccttcatcgaccttcgtgattcgaccggcctcgtgcaggtcgtcatttacgacgaggatatggcccgcccgctgcgcagtgaattcgtgattcagattaccggcgaagtgcgcctgcgcccggatggcaacgagaacacccatctggccaccggcaagatcgaggttgtggccgagaccattgagatcctcgccaagtccgacgccctgccgttccaggtttccaccgctctcgagaatgagtccgagaacaagctgcctggcgaggacgtgcgtctgaagtaccgttacctcgacctgcgccgtccgtccatgcagcacaatctgaagctgcgttccgacatggctaaggccgcccgccacgcgctggaagacatggacttcaccgaggtcgagaccccgaccttcatcaagtccaccccggaaggcgcccgcgacttcgtggtgccggcccgtctggtgcccggttcctggtacgccctgccgcagtccccgcagctcctcaagcagctgctcatggtctccggtgtcgagcgttactaccagctcgcccgctgctaccgtgatgaggacttccgcgccgaccgtcagcccgagttcactcagctcgatatggagatggcctacgtggaccaggaagatgtgatggccatgactgagaaggtcatcgccgccatctggaagtccgccggctatgaggtccagctgccgctgccgcgcatcacctggaaggatgcgatggacaagtacggctccgacaagccggacctgcgcttcggcaacccgctggtggaactgaccgagtacttcaagaacacgccgttccgcgtgttccaggccccgtacgtgggtgccgtggtcttcaagggcggtgccgccacgccgcgtcgtcagttcgacgcatggcaggattgggcccgtcagcgcggtgccaagggccttgcttacgtggtctttggcgagaacggcgagctgaagggccccgtcgccaagaacctgtccgatgaagagcgcaacggtctgcgcgaggccgtcggtgccgaggaaggcgatgccgtgttcttcgccgccggttcccgcgaatcctcccagctgctgctcggtgccgtgcgtgtggaactcgcctcccgtgagggcctgctcgatccgcagaagttcgccttcacttgggttgtggacttcccgctgttcaagcccaccgatgatccggacgatgacgatgtggctgtcggccactccaagtggacctccatgcaccacccgttcaccatgccctccaaggattggatcgacaagttcgacaaggatcccgagcacgccatgtccgattcctacgacattgtctgcaacggtgaggagatgggcggcggttccgtacgtatccaccgcgacgacatccaagcccgtgtgctcgatgtgctgggcatcaccaaggaagaggccgacgagaagttcggcttcctgcttgaggcattcaagtacggcgctccgcctcacgcgggtttggccctcggttgggaccgcaccgtgtccatcctggccggtgccgactccatccgcgacgtcatcgccttcccgaaggccggcggcggccgcgacccgctgaccggtgctccggccccgatttccgacgagcagcgcgccgagactggcgtcgactacgacccggacgccgacgaaaactaatctacggagcgtataccgcctttcctcagcactcgacgcaccttagtgcgccttcggcttcgaacggcggtctccgcatgcgtagattaattttcgaggagtaatgctccggtgctattagccgcaaatggcccttggaataattccaagggccatttgctttttgcgggtggggcccaatgtgccaaatacctgccaaggggtgccaaatactccgcccgatggcacctccgccatgcggcaaacctcgcaccatgcggtgtcccccttggcgtttgccgattatccttccatggggcggtaacttcctcatggggcggtaaacaacccatggggcggtgaaaaccccatggggcggtaggtcaaaatggcttaattccgcggttttacaatttcttcaaaccgccccatgggcaaattgccgcctcatgggggaattgccgccccatgaggagcgatcgcaactccgtatttgatcaatgttgtaaggctttgttgtgttttgcttgtttccgcctcctgtattcccctttgcgcgcattgatggtaaggctgccgtctattaatacccggcatgaaggttgaggacggccaggaagcggtatttgcatcgcggtggcaacctcttgtgcgaaggcacgttgtttggcggtattccacaggtcatcggcgaacacctcgatgacggtccagcccaattgccgcagacgtcgacgtttttgctggtcccgcacatattgtttgcggaagcgacggtgatgatcgccatcatattcaatagcgactttgtattgtggataagccatgtcaacggtgtaggtgtatccgttctctgaatcggtaatgccatattgtgtttgcggtatgggcaggccgaaaagcataagcgccaagcgtgtacgagtttcctgaacggaatccgatggttttacgagcttcagcgctgcctcacaacgcgcacgaccaataacgcggtgaaaggccgttagtcgttgagtgaattgttcaatggcatatccataacgtctgatgagcgcttcagccagcaccactaattcagtgaggttgagatattgggcaaactgtatccacgcatccatgggatgcatgcaggttacgccgtttgaaaaagcgatactgctgaactttgcattccatatgcgatagtcgacattgtccaatgaagagcgggtccccttgctcctcaccgtcacataaaaatccttctgcggcaacgtgctgtgcctcggcaactccacgccgcataattccaatgcggtatacagcgagaaacacaacgtgcgtttcgtgcgcactttgcccagcagattccaacaggccgtgttcttggccgtggctttggcgtcaagatctttgcgcagatagttgttgatttcgccattgtgcggcgcttcgctgtatccgttcatgcgccgagcgtagcgcattccacggtggcacaggggcaaaaccgaaaaatggggataacttaagcggcgcgaactggttatccaccggcatatcgtgtgccgcgcccggttatccaccgcgcttcgggagtgtcgtccaccgtataacagcactcatcgtgtgcgaacagctagccacgctcaaaatgcctagcacatttatacgaatacggcatgggaaacggcgagaccagccccacacaatacaaagtgaccgccagccatgcgcccgactgcggcatacacggcagcaacgccaacgacaccaaggccaaacatggaatcagcagataggacaacacgtgcccgctttgccgtcgcagcaacgtctcagccgccacgcagcaggcaatcagcgcacagcagacgccgagcgatgcgcgactcagcgagaatgtatgccgatgcccaatgccgccttcacgatgtctgatgcggaaatgagacatcgactgagcaactgtgtggacatactgtgaacacgttggaaacgtcggtgtgttatcctcccactcatgtctgaaacgaacaatgaaacagcagtgcgttcgcgcacgacaagcacaacatcaccaagcaaggccaaattgaccccgctggttcccggcaaagaggacctgaaccgtccgctagtcgaactgacccacgtcgaaaagcacttcggtgctttgcacgtcctgaaggacatcaacctgaccgtcaccaagggtgaggtgctggtggtcgtgggcccgtccggctcaggcaagtccacgatgtgccgcaccatcaatcgcctcgagaccatcgattccggcgacatccgcatcgacggcgagcccctgccacaggaaggcaaggagctcgcgaacctcagggccgaagttggcatggtgttccagtcgttcaacctgttcgccaacaaaaccattcttgaaaacgtgacgttggccctcatcaaggtgcgtcacatggacaagaaggaagccgagcaactggccatggacctgctcgcccgcgtgggcgtcgactcccaagccagcaagatgccctcccagctctccggcggccagcagcagcgtgtggccatcgcccgcgcgctcgccatgcgccccaaggtcatgctgttcgacgagcccacctccgcactcgacccggaaatggtcaacgaagtgctcgacgtgatggtcgaactcgcgcatgaaggcatgacgatgatctgcgtgacccacgagatgggcttcgcgcgcaaggccgccgaccgcatcgtcttcatggcggacggccagattctcgaagagaacacgcccgacgagttcttcgagcatccgcagaccgaccgtgccaaggacttcctctcgaagatcctcacccactgacgaacccactgaaagacgggtacgcaatccaatgacattcaccaatacgttcaaacggaaggtttgccgcgtgatcgccgcgctcgccgccgtggcctgcacaatgtcgctggccgcctgcggcgcggacgaaaccggcaagatccgcatcggcatcaaattcgaccagcccggcctgggcttcaagaagtccggcacctacgtgggcttcgacgtggacgtggccaagtacatcgccaagaaactcggctattccgaagaccagatcatctggaaggaagctccctccaagcagcgtgaggccatgattcagaacggcgacgtggacatgatcctcgccacctactccatcaccgacgagcgcaagaaggccgtctccttcgccggcccgtacttcgtggccggacaggatctgctcgtgcgcaaggacgacaactccatcaacggccccgaagacctgaacggcaagcgcctatgctccgtcaccggttcgacctccgccgccaccgtcaaggagaagttcgcctccgaagtccagctcatggaacagcccggttacgccgaatgcgccactgccctgttctccggcatcgtggacgcggtaaccaccgacgacatcatcctggccggcctggcctccgcctcgcgcggcaagctcaaggtggtcggcaaaccgttcacgcaggaacactacggcgtgggcatcaagaagggcgacacgcagctggccaccaaaatcaacaacgccatcgtggacatgattcaggacggctcgtgggagaacgccatcagcgataacaccaagggcaccaactacacgcccgacgtacgctacaacccgcccaccccggacgaaggagaggaggcctgatgagcggattcctggaactcttcagccagtatgacgtgctcggcgcgtttctggtcaatatcgaactgaccctatggtccgccctgttctccctgatcctcggcgtgatccttgtggtgatgcgcatctcgccgatttcctcgctcagggccgtggccggtgcgtatgtggaactgttcaagaacctgccgctgaccatcatcatggtgttcatggtgctgggtgcctacgcgcagctgaagctcagcttctccgacaccttcaccacgaacttcttctggctcgcggtcaccggcctgagcctgtacacggcggcgttcgtgtgcgaatctctgcgttcgggcatcaacaccgtgccgattggccaggccgaggccgcacgagcgctgggcttgggcttcatgcagtccgccaccgagatcattctgccgcaggccttccgaggctccgtggcaccgctcggcaacacgctgatcgccctgctcaagaactccaccgtggccgccgccgcatccgtggccaccgaaacatcctcgctgatgagcgagatgatcgaattccgtcccgacgtgatcatccaaatcttcctgatcttcgcgctcggctacgtgatcctgatcatccccatcggcatgctcaccacgtacctgtccaacaaactcgccgtaaggaggtgacggatatggccgatacttcgaattccgtgctgttcgacgcgccaggtcccaagggccggcgcaccattcgcatcgtcaactggatcgcgggcattctgttcgcggtggtgctcgtgtttatcctcatgcgcctgcacaacccgccggacggcgagaaccagctcagctgggagctgtggaagcccgccgtcgaacgagaggcgtggaccgacttctacctgcccggactgtggatgaccatcaaggccaccatcgtggccgtggtgggtgccgtggtgttcggcttggtgttcggcgtgggccgactgctgccgaacccgttggtacgtggcgtctccgccgtgatcgtcgagttctgccgtgcggttcccgtgctgctgctcatgatcttcttctggcgatggttcgcgttcgcgggcctgcccagcccgtcctattgggccgtggtgctggccttggtgctgtacaacggttcggtggtcgccgaactggtgcgctccggcgtcggcaatctgccgggcggccagcgcgaggcctcgctcgctttgggcctgaccgaaacgcagtcgttgatggaggtcgaggtgccgcaggccgtctacgccatgctgccggccgccgtcacccagctggtcgtggtgttgaaggataccgccctaggctcgatcatcatgtataccgacctgctgcaggaatcgcgccgactcggctcgatgtacttcaacatcctgcagacgctggtcatggctgcggtgatctacttcgtcgcctgctggctgttgtcgaggctcgccgaatggctgccttcgcgcatgcagcagcgcacggccgcgcccaccgaggccgagcccgtggcgccgatcgccgccggagacccgtccaatgtcaaccagatcgctgtggccaaggaagtcgaagagctgccgtttggtggtgcgccgcgcaaataccatgtgcatcaccgcggcaccaacgcctcgattcgcaactggcggcgcacccgctatgaacagggatatgacgccacccagcccgagtcacaggttgacccggaaaccggcgaattcccggcgttccgcaagtccgaagacgagtcagaggcctgacagtcagctcaatcgccgctaagccggcacgaagaatttactgagtgtttgactgggttccggctacgtagccttcacggaggataggttggaacatatgaagatgttccggcacctatcctccgtttttgctattgcgaccattgcgccgctggcgttggcggccacgctagccgcgacgcccgcaatcgcacaggccgaccagctgcccaacccggattgggtggcattgctctccgactacgaaaagaactattggcaggcccccaccgatgccgaacacggtggcaaggtgctcgacgccgatacaatgaaactcgacgaagatttggccgtggccattaaccacaaagccgccgaaaatctcgataaggatggcctgaacgcccaacgcaagcgtgcgctcgtcgactccgatctgcaagccgaggaagccatgccggacgcgctcggtccggtgcttggcaaatatatgagcgaagggctcaaatccgggaaactcaacgccgtcgccgatatcttctcctttaacgtggcctccacctacgcctcaaaacgtgcggccatgcatccgcgcccctatctgaaccgtgcggaaagcagctacggcggcactaacgatctcgccggactgcccgccacgcttgacatcaagcaatcaccctcatggctcgaacacgtgcccggctactcgaacttgcagaaaaacagttcctacccctccggccacactactggcgcctattcgtggggtatcgcgctggccggcatgattcccgaactcgcgccgcaaatcatggcccgcacttcggaggccggcaacaaccgcatcgtgctcggcgtgcattatccgcttgacatcatgggcgggcgcattggcgcatccgcccagaacgggcagtactggcataacgaattcgcttcgtccatcgtgcccgcgtcccggcagctgcgggactatctggtgtcccgctgcgccgcggacggccacggcactaccctcgccgcctgcatcgccaacaccaaggcctccggttcgggcggctacaccaacgattttctggacccggtggccaccgagccggtcgcggaccaggcctcggccgtgcgcgtctacaccgcacgcctgacctacaccttcccgcaagacaccgcccagtccggcgctgatttcgtggcaccgcgcggggcggcggacgtgctgcgactggcctatcccgaactgcacgccgatcagcgcaacgcgattttgaaagccactgccttggattccggataccccctatggcaatcgagcgacggctggcagcgtatcaactgggccaaagccctgtgcgcccgcgtcaccttggataagcacggcgatgtggccaaggtcgagaccgccgaccaggtggcgcttgccggcccgagtgtggtcaatgcccagtacgccgacgcgggcaatcatccggcgtctgatggctcggcgggtgaaaacagtgccattgcggccggaccggatctcgccaccctccatgccgcgcaacgaccggcgttgatcagcgtagccatcggtaccgctgtaatcgcgattgtcggcggaatacggacggttcgacgcaaatccaagaaccagcttcagcggtaattcagccaaagttcagtttggagatctgccgagtttgccttcatatggtgtcggcttcatctccctcccataccctcggggggtgtcatccgtcgaagagcatcatgctgcggcggcacaacccgaggaaggaacgggagtaatgttccacaccaacaatttcaccgcgatgtcgcggcgcgccatcgcgctgctcaccgctgcggtgacactgagcagcatcgccctgatcggcgtgcccgctgcggctgcggacgagcagcaggccactgccgaacagaacacggctgccaaaccatccgtaatcatcaacgaggtctatgccggcaatacgaaagctgccggagacccggatagcaagcgttgcgattgggtcgagctcaagaacaccggctccacagacgttgacgtgaagggctggggcatctacgacagcggcaagaaagccaagaagcactacaccatcggcaccagcgaagtaacgaatacggacaccgtcatcaaagccggcggatatctggtggcatacatcgaccccgacaaggccgagcccggcctgggttccgatgccgacgaagcctatctgaccactaccagcggcgactttaccgatagcgatgtggtggattccacgtcatggaataccgatacaactggcgtgaagaagatgagcgacagtcagtcatggtcccgtaaggacgatggcactttcgcgctttccgatacgcccacgcccggtgcacagaacgtgttcgatgacccgactccgactccgcccgccggcgagaccatgaccgtggacgcatggtcgggattggccgatgtgaccacagtggatgccgaaggcgaatttggcgccaaaggacaaggcggcgaccacactgacggcaatctgtctggtctggtgtatgaagccggtaaagacggcaagcaaggcgtgctgtgggcggccgacaacgatctgaaccccacgctcggcaacaccgctgataagggccctggctccatcaacaagttcgtctaccagaacggcacatggcagcaggatcccactgatggctggaccttcaccaacaacggtcagaccaagggcggcaagcagctgcacttcaaggacggcaagggcggtgtggactccgaaggcatcacgctgatcaacggagattcatccaagggcatattcatcggcgccgagcgcgacaacgaaaacaagaatgtgccgcggccttccatcctgcagtatgacgtgaccgcgaaaaccaccgacgccaacggcgacggagcgcaagagctgaccgctacgcacgagtggaatctcaccgcagcactcacacaattcggcgtgacgctgggccacggagcggacgccaatcttggggtggaaggcatagcctttattcccgactcggtcctgaccgccaacggattccaatccaaccttgacccgaagaacgtaatgacctacgacccggacggtttcggcaatgatttcggcggtctgttcttcgccgcactggagaaaaccggccatatctacgctttcgcgctgcaaaccgtgaatgatgaggacctggtgcatccggtggccgacatcgacctgccgcagtccgcagtgaacaccggctatgatggcccgcgcgatctgacttgggacgccgagcacaaccagctgctcgcccaaagcgacaatgatgcgaacaccggtgccaaaatcggtacctacgagttcaagaacggtgtgctgcagctgaccaagctgaccgacactccggatgaaatccgtacgcagaacaccgaaggctttgccatcacccctgataccgaagccaccaaggtagtaaatggcaaggtgtacaagccggtgttctgggcagacgacggcgtgaccaatggccattcattgcgtatgggctatatggcaaccaatcagccggttcccgccagcaccaccatcaacctgctgaacttcaacgacttccacggccgtatcgacaagaacctcaccgtgccgttcgccgccaccatcgagcagctcaagggcgaataccctgactcatcactgctgctgtccgccggcgacaatatcggtgcttcgctgttcaactcttcggtgcagcaggaccagccgaccatcgatgtactcaatgctttgggcgtcaaggcctcggcggtgggcaaccacgagttcgaccaaggctatgccgaccttaccgatcgtgtgatcggcaaggagggcgcgcgcaacgcccaatgggattacctcggtgccaacgtgtacaagaagggcaccacaaccccggctctgcccgagtacagcattcaggaggtgaacggcgtgaaggtcggcatcatcggtgcggtcactcaggaaaccggcacattggtggctcccggtggtgtcaaggacatcgaattcggcgatccggtggaagccgtgaaccgtgtggccaagcaactcaccgacggcgacgaatccaatggcgaggctgacgtgattgtggccgaataccatgagggtgcagcctccaatgaagatgacgccacggccaagcccacgcttgacgagcagaaggccgccagccccgtattccagaagattgtggacgataccgatgcggcagtgaacgtgatcttcactgcacacacccacatgaagtattcgtacaccgatcccgcgcacaacaaccgaccgatcatccagaccggtagctatgccgccaacatcggccaagtggtgctcacctacaacacggccaccggtgcggtgtcttacgacaagtccggcaacacggccgtgcaggtggcttcgcagcccgccgacaaaaatgatccgcactacaacgattacgccgaatacaacgatggcctgctcgccgccgcgaatccgactgtcgccaaggtgaaggacatcgtgtaccaggcccttaaggtggccgatgaaaagggcagcgagaaggtcggcaaggtgtctgcggatatcaccaccgcattcaaggacggcaagcgtgacgaccgcgcctccgaatcgaccatgggcaatctggtggccgatgcgctgctcgattcgctcaaaagcgaggaccgcggcgcggccgaaatcggtgtggtcaaccccggcggtctgcgtgccgaattctgcaagtccggcaccaatgacgcctgcacgctcgatgccgacggcaatatcacctacgcccaggccaacgctgtactgccgttcctgaacaacctgtggaccaccacgcttaccggcgcgcagttcaaggaagcgctggaacagcagtggcagacgaacgcggacggcagcacgccatcgcgcgcgtatctgcaactcggactgtcccacaacgtgagctacacgtatgatccggatgccgcgcaaggccatcacatcacctcggtgaccgtcaacggtgagcctctggacctgaaacgcaactaccgtatcggttcgttcagcttcctgttggagggcggcgataacttccgcgccttcgcccaaggcacgaacaccaaggacaccggtttggtggaccgcgacgcctggatcgactatctcaaggacaacgatccggttgccccgcgctacgaccgccgtgcagtggccgtcaccggtatcccgaccggtgcggtcaaggccggtggctcgttcaccctgcacttctcgaagctcgcgctcacctcgctgggcgtgcctgacgagacgaagctgaccgccaccatcggcgagcagatggtcggcgaagcgcaggttgcgaatggcgataccgccgagctcaaggtcacgattcccgccggaaccaagaccggtgatatcagcctgacagtgaccggtgcgaccaataagaccacggtcgctctgcccgttgccgttaccggagtgtccaccgggacggacgacaaggataacggcaaccatagcggtagcgtcaatgccaatggcagcaccaagccacagcagaccgaacgtacggccgataccggtgcctcggttgcgttggttgtggttctggcgacgctgttcgctgcgggtggcgtcaccatcgtggtcaagcgtcatgatgcggcgcgcaagtagcgcttgaagccgcgtgcgctggtcggatgcttcagcatgatgccgacgatttgccggtcggtgatgatctctttctcgtagcagattgtgccgtcttcctgatagctcaggtatgtttcgggccgtttgccgcttctttatgtactgcaaacggacgggggattggccgatagggatgagagagaacggagagagtatgaagtgccaggtatgtggaacggagatgccggagggaagccgattctgcacggaatgcggtgcgccgatggcacagtctgcgccaagcccaagtcctcagtcgatggatggcccgacgctggtaccggctgctccccagcaggtgccagcgggttcgatgccgttgcccccaagtttcaacacggcgactgcacctacttcgacattgtcgacggcgccaggcaacggtggcgctgcgcagccgcgttccggtgggtctgccggaaagaagatattgctggggatcgtctgatccaggcgtgataagcggcagcaacgttacggatgacgaagccgaaaataatgcaagcaaggcattggattggcaggtcgagcacgacaaggactccgcagagctgttctattccacgtataccgcacagctgtccagcaagcgtaagggtatggaggctgaaggcaagacctggaactaccgcgatattcttgcgcaattcatcacgatgcacaacaagaattcaaacgtactgcttatctggtcgggtgactggcccgcctacagcagcaattccgacaaatactatgtgattcttgccggtgagggcttcgactcgacagatgaggcttggaattggtgcaaagccaacaattacggtccgaacgactgcatgcctatagatttgcagtaacaagcgaaatgtgaatgtcgctacgttgctaggtctcctgagttacaagacgtacaatcgggagcatgaccaaggacgacgacagaaccaacgagcctgaagaggccggcaagtggggtacggccggaaaatcctcaggaaagaacaacaagaacggcaagggaaaggaatccaaaaccgatcgacggatcgacaaggtattacagctcgcggcggatcgcataggcaccatcgactccagtgccagcgtgcctgaacgactggcgcgtgcggcgaaatccagtgaactgctcagcgccgtatggtcgttgccgcccgctcaacgtcttatgttccaccacggcatgcaggtcactgatgtcgaaggcgattccactcccggattcgacggcaataaagaggacgccgagaagttcatttcgatcagctcctccgaaatcgcccgataccagcggctcatgtacgcgaatggcgtcaaaggctcggcacggcggctgctcatcgtgctgcaaggcatggatgcctccggcaagggcggcattgtgcgccacgtgttcagccaaggcgacccgatgggcatccattaccatggcttcggcaagcctacggccgaggagctcgaccacgacttcctctggcgtgtgaagcgtgaattgcccaagccggggtggattgccgtattcgaccgctcccattatgaagatgtggtcatgccgcacgtctatggcacctatcccgaagacgtatggcgtgcccgctacgaccagatcaacgatttcgaacgtgaactggccgccagcggatgcgccatcctcaagatcttcctcgtggtaagccaggaagaacagaaaaaacactttcttgggaggctggatgatcccaccaagttctggaaattcgatatctccgacctcgaggcccgcgaccgatgggatgagtacatgttcgcttggcaggaagtgttcgagaaaaccagcacggccgccgcaccgtggtacctcgttccggccgataaccgctggtattcgcgagccgtggtctccgaactgctgcgcaccaccttgaagaacatgaacatgacctggcctcccctcgaacccgaggtggaccccgacgaggtgcgccgccggttggcgtgagcgatcctcccattggcggagccaagcgcatggcacagctcttcgcatggctccgcccgctggcgggaggcgtcgcatagcgacggagggcggctcgtgccgtcggaataggccactaggtagactgagcattatgactgacgagaaggaatacggatccctggggcggctggcccccgaatgggacggcgacggacgcgaacggaatcttacggccgacgacatctacgaacggttcttcggctgggtggaagacgtcaagggcatcgagccgtggccgcatcaggaagaggccattatggacctcttggccggcgaccatgtgattttgaataccccgaccggttcgggcaaatcgctggtggcgctcggcatgcacttcgccgccctatgcactggccgccgctcctattacaccgctccgatcaaggcgctggtgtcggagaaattcttcgacttggtcgaagtgttcggccgcgacaatgtcggcatgatcaccggcgacagccacatcaacgcggacgcgccgatcatctgctgcaccgccgaaatcctcgccaatcaggctttgcgcgaaggcacccatgccgatgtgggcctcgtggcgatggacgaattccattattacggtgatccggagcgcggctgggcgtggcaggtgccactgctcacgctgccgcagacccagttcctgctgatgagcgccacactcggcaatgtggacgccatcgccgacaagctctccgatctgaacgacaccccggacgtggatgtaatcgccgacgcgccgcgaccggtgccgttgagctacgaatacacgctcgacccgatggaaaaaaccgtggaactcgccttccgcaacggcgaaaccccgatttacgtggtccacttttcgcaggacgccgcattggagaccgcgcaagcgctcgcctccaccggtgtatccagcaaggaacagcgccaagccatcgcagaagccatcaaaggcgtcaagttcaccacagccttcggcaagattctgcagcgactgctgcgcaccggtgtcggcatccatcatgccggcatgctgcctcgctaccgccgcctggtcgaacagctcgcccagcagggtctgctgccggtgatttgcggcaccgatacattgggcgtcggcatcaatgtgccgattcactccgtggtgctcacggccctgaccaagttcgacggcaccaagatgcgccgcctgcgcgcccgcgaattccaccagattgccggacgagctggccgtatgggattcgataccgagggactggtgatcgccgaggctcccgaatatgaaatcgaaaaccagaaagccatcgccaaggccgggggagatccgaagaaactcaagaaggtcaagcgcaagaaggcgccggaaggttttgtgacctggaaccagagcacgtttgataagctcatcgacgctgaaccggagaccctggtcccgcacctgaaaatcacgcattcgatggtgctcaatgaagtggcgcagggcggtgacgcccgtgcccgtatcgacgatctcatcgacgattccgcgcaggcccccgaccagaaggagcatctgcaccagcgggccgacgagatcttccaaaccctgttcgataccgaagtcatcgaaaccgaggaccgcaaggacggcggcaaggactactacatgacccttgatatgccggacgacttcgccctcgaccagccgctctccccgttcctgctggccgcgctcgaactgctcgaccccgagtccgacacctatgcgctggacgtgatctccatggccgaggccacgctcgaagaccccaagcaggtgctgcgtgcccaggagcgtcaggcccgagacaaggcgatggccgatatgaaggccgacggactcgactatgacgagcgtatggataagctgcaggagattacgtatccgaagccactggaagacatgctcgaagccgcgttcgatcagtaccgccacgatgtgccgtgggccaacgactactggctgtcgccgaaatccgtggtgcgcgacatggtggaaaccgcctccgacttcaccggatacatcacccgatacaacatcgcccgctccgaaggtaccctgttgcgctacctctcggacgcctaccgcacgctggcgcgtaccgtgccgcccgaaaaacgtgacgagcaactcgaagacatcatctcctggctgcgcgtgctcgtgcgctccatcgactcctcgctggtggatgaatgggagaacgccggcgattccgccgaccagtccgaggcggcggcctccttggcggcgcccggcgcaaaaagcgcggtggtcgaggaccgtcgtggtcttaccgtgctggtgcgcaatgccttgttccgccgtgtgcggcttatggaccttgaccagccggacaagctcggcgcgctcgacaaggactggggctacggcgtgcacgaatgggaagatgtgctcgacgactactacgacgagcacgagtacgtgggcatcggcgccgaagcgcgctcgcccgaactgttcatgttggatgacaagcacgagaacgacgagcatacgtggaaggtgcgtcagattatcgatgattccgatggcgaccacgactgggccatcgaaggcatcgtggaccttgacgccacccaagacaccggcgaagtagtcttccacgactacaaggtgagtaactgattcctggctcccctctctgagggaagccaaggtgcagctcgaacgtctgttcgaacactggggtactataggacgttatgagtgagaacgatttgtttggggcggctgatgcgccggagtcgatgacacggccgttggcggtgcgcatgcgtccacgcactttggacgaggtgattggccaaacgcaggtgttgggccagggctcgccgctgcgccgcctcgccaatccggccagcaaaggcagtctcaccgcgccgagctccgtaatcctgttcggccctccaggcgtcggcaagaccacgctcgccaccatcgtggccggccaatccggccgcgtgtttgaggaactctccgccgtgacctccggcgtcaaagacgtgcgcgacgtactcacccgcgctcacgaacggctcgtgtcacgcggccgggaaaccgtactgttcatcgacgaggtgcatcgcttctccaaatcccagcaggatgcgctgcttcccgccgtcgaaaaccgcgacgtgacctttatcggcgccaccaccgagaacccgagcttttccatcatcaaaccgttgctctcccgttcggtggtcgtcaagcttgagtcattggagcctgatcagctcaccgaactggtgcagcgcgcgctgactgatgaccgcggtctcagggacgaggtcaaagccacggacgaagccatcgccgatatcgtgcgcatggccggtggcgacgcacgcaagagtctcacgattctggaggccgcggctggcgcggtcaccggcgacgaagcccgcaaaaagggcgcacgccgacccatcatcacctccgaaatcgtggctacggtaatggacaccgccaccgtgcgctacgacaaagacggcgatgaccattacgacgtgatttccgcattcatcaaatccatgcggggctccgatccggatgccgccatccattatctggcgcgcatgctgaaagcgggtgaagatccgcgcttcatcgcccgtcgcatcatgattgccgccagcgaggaagtcggcatggccgccccgcagattttgcaggtcaccgtggccgcggcgcaggccgtggcgctggtcggcatgcccgaggcacgtattattttggccgaagccacgattgccgtggccaccgcgcccaaatcaaatgccagctataacgccattaaccaggcgctcgcggacgtggataccggcaagatcggcgctgttccgctgtatttgaggaacgcccccaccaagcttatgaaagagtggggcaaccacgagggctacaagtatgcgcacgattggcccggtgccgtggcgccacaggaatatatgcccgaagagctgcgtggcaccgagtactaccatcccaacgatcgcggctatgaacacgaagtcagccagcgtcttgccaagattcgcccgatactgcatggtggggaacccgggcgggaggcgtcgcgggccgcggactgacggtcttaggcgcgccggcgtgaggcgcgaatgcggaacgcggtggccagacagcaccagccaatcaggcagataaccgtcatcgtggcaaacgtccatgtgccgccgacggcagtggcgtgagcaaactcagcggtgccttcttctcctgcgccggcctgagccacggaaagaatcgtggagaacagtgcggtaccggcagcgccgccaaactgaagacacgtgttgaaaatggcgttgccgtccggcttgaactcgggagagacctccgacaggccactggtcatcacattcgcattgccgatggaatagaacagaccgaaaatgaaatagaatccggcgagcagcacgggcgtaagctgcatcgagaacaccagcataagcactgggcccaaaatagcgatgccgatcggaatcagaatcggcttgaccgcgccgaacttatcgtagaaccagccgccaagcggggcacagacagcgccgaccagtgctccgggcagcaccagagagccggccacaaatgccgtggtgccgagcgagagctgtgccacattggtgatgacatagccgtagccgatggcgaccaatggcagcagcagatatgcgcaggcgtgtaacagtacggcgggatccttgagaatgccaaggcgcagcagcggggagaaggcacgcttggaactcatggcgaacacgatcaacaaggcgaggcccacaatcagactgacaatggcgataatgccggagcgtgtggctgacttgccggacaccgccgcactgatggccacgccaccttggttgagcgccagcaccagaccgaccaacgcgacaacaatggacccaagctgaatcgggtcaagataggcagcctcggtcggtgtcttctgctcaatgcacttcatgccgatgaatgctgcgattagcaccagcggaatggcgatgacgaagatcgcgcgccacggcagcactgtggtcaccgcgccgccgacggtcgggccgatggccggagccacggtaatgaccagcgatcctacgcccatcaatcggccgattttcgaacgaggagactgctccagaatgatgttgatcatcaacggcgtggccacgcctgagccaatgccctgaataatgcgggcgacaatcagcagcgggaaggcttgggcgacgatcatgatcagcgagccaacgatggccagaatcacagccgcaagaaaaatggttttcagtgcgaatcggcgcttcaaaaacgagctgatgggcatggtggcggccaccgccaacagataaatcgtggtaatccattgcacagtggccgtgtcgacatggaattcgcgcatcagtgcggggaaaagcacggtcatcacggtttcggtcagaatgccaatgaaggcaagtgagccgacagccacaatcgcgccgataagacgtgtgggaatcttctcgttatcaatatgctgctcaggcatacatgctcctaaacgttcggttgcaatgtatggaatgtaaggtttaccaaccggcgtaggtacctgtgcgtgcggataaaccggcaatcgtactgccttggctgcacgctatggaatcacaaaaccacctgtgagtgtacggttcggggcggacgctacggttgatgcgcaatgggctgtcccttggtttggtggggtttgatggggcgggttcggcattggtccggcggggcgggttcggcattggttcagcatgaggaaacacgcgataatatccgccctgccgcctagtttggtgagccatgggtattgagaacacgcataagctgattgtcaactgcctgccactcaacgaaggagaacgacgggctttcgccaaggcggcccgcgatgtgccgcaggaattcgtgggcgacgaagcgcaccgcggcgacatggtctggtcggccgctgttcccgaggagcttcgttcccaagctaccgcagtcatcggcaacttcccggtctcgcaggccgctcaatacacccgtcttgaatggttgcagaccttcagcgccggtgtggatgtgtacatccgcccgggtgtgctgcctcgcggcaccatggtcaccaatgcgagcggcgcgtatggccaaagcgtgtcggaacacatgttcgccaccatgtgggcattgatgaagaacctcaaccggtatgcctccaatcagcacgatcatcagtggcaggatgaaggcccggtattgagcccggaaggtggcatcgcactgattatcggcgtcggcgacatcgggtcgcatttcgctcagcttgcccaatccgtaggtatgcgtaccttcggcgtgcgccgtcatgcggacgtgccggccaagggcattgaaaagatgtatggcttcgagcggctggaagcactgctgccattggcggacgtggtggcgatggcggtgccgcgctcgccgcagacccatcatctgctgaatgcggatcgtctggggcgtctgaaatccacagccatcgtgatcaatgccgggcgtggcgacgccatcgatcccgaggccttggccgacgccttgcacaatggacggctccacggtgccggattggacgtcactgagcctgagccgttgccggcggaaagtccgttgtgggatgagccgcattgcctgatcaccccgcatgtggccggcggcaatcatttggaaaagacttccgaacacatcatccgcatcgccctgaccaacgtttcccgctatgccaaacagcaggaactgttgaatctcgtgcgatactgattcgcctgtatcgggtgtacatgaactcatgtacacggccggcgtgtcgcatcccgctacgactgcggcatcgaaatgatacctgcagaggcgtggttgatcagaggcccaatgaacgtggcccgaggtcagtctcagtctgatagttcgtagccgttggcgtctttatgccacggcgagccgggcttgctgcacagaatgatgatgccttcaacaaagccccagatggcggctgcgattgggccaagtccgagcagaatccagccgacaagcgtcagcagcagctgggccacggccttgccggtgttgccgagatagaagttgtgcacaccaagtccgccgaggaagatgcccaacaggccggcagccaacttggacttggatgattgccacaccggggcggcggcatacggagcggcggtgtattgcggctgtgcgtaggcattcggctgctggtaggcctgtccatagccgggctgctggccgtagcccgctgcgggctgtgcgggctggccatactgcggctggccatactgcggctgagcgtactgagactgagcgtatgcgccggcgggctggccgtattgcggctgctgctggccgtagctttcggcggcgggttgagcgtatgcggcgggctgtggggcgccatagccctgaggctgccgtgcggcatcttggccgtacgacggctgtgccggctgtgcaggttgtgccggctgcggaacactgtccgaaccgtacggttgttgttgattatcagtcatgtgggtctatcccttctcaatcgggaacggcagtaccttcttaccgtttctgcacaacatcatctcacgttttgcctaatagtaaaacctgccgcgctacgattgggccatgaaaagtttcctgaccagctggttgattatgactatcgccgccgccgtcatggtcgcggtgactcccggcatgaccccggtgggggagcctccgattctcggcatcgccgcgttcgctttgttcatggcgctgattaatgcgtcaatcaagccgattgtgcatctgatcgcactgccgtttgcgattctgtctctcgggctggtcaccttgattatcaattggctgttcatgcgactcgccagctggctggcggtcagtctgttcggcgtgggcgtcttcgtacacggtttccggtggtcggtactggggtccttggttctgaccattgttgcgggaatcgtcgggtccatcttggatcagtgacggtgctcgctgggcgaatatgaataatggcggttggaatcggactgattccaaccgccattactcatatcaagctacgggatcgagcagagcgaacgctactcgcgcaccaagcggatatgctccacatcgtcgcgccgggagcgacggaacagcacgaaacgattgccgatggactgcaccacttcggcgttcagctgctcggcaagctcggcggcggcttccttggcggtcaggccagaaccgtcctgcacggcgcacttgatgagctcgtgcttctcaatggtttcatcggcctgattgacggccgactcggtcaaatcgttcttgcccacatagaacaggggcttcagcgagtttgccatcgcgcgcagctgcttgatttgcttcttggtcaatgccatgggaatttccttacatctttcgtataaccacaccagcatagcaaccggtgctgtctgtgctgtttgccgccctacagcgcgatgatggcggcgatgtaggcgatgacggcgacggcgaacacgagatcttgcgcggcgatggtcagggcacgccagtgggtgcggcggatgctctcctcgtagcagcgggcgtcaagtgcgaggctcaggttgtccgcgtgacgcaacgtgccggcgaaaatcggcacgataatcgcgctcatcgccttgatgcgctgggccagcgaaccggtttcgatggaaccgccacgcgcggattgggcatcgacgatggcacgggtctcgtcggtcagcgttggaatgaatcgcaatgccagactcatgaccaacgcgatctcctgggcgtggatgccgagccggttgagcgggctgatcagggtggcgaaggcgtcggtcatggcggtcggcgtggtggtggtgaggaacaccgcgcccaagatgatcaccaacgcgaaacggcaggcgtacagcacggctatggccacgccctgatcggtgatgctcagcgggcccagcgccaccaccggcgtgccggtgcgcaccacaaacagattgaccacgcccatcagcaccagcagaatcagaatcggatgaatggattcgagcacccgtaacgggttcaggcgtgccgccgcgataacggccagggtgatggcgatgcccagcgcaagctggaggggtgtgttcaccgcgaacatcgtgaacatggcggccaggaagcccaccatcttcacgcgcgggtcaagtcggtggatcaccgagtgcgcgggtttgtcaggggagacggactcggcggggaaggcagtctcggttgccgagatgctctcagcaccagccgcgccggcaatcggcatacgtaccacgcgatcggcgatatgcttggcctccgctcggtcatgggtgatgataagcacggtcacgccgcgcgatttgagcgtgcgcaacagctcatggatgcgctccttggcctggacgtccaggctcgcggtcggctcgtccatgatgagcacgtcaggattgcaggccagcacgccggcgatggccaccaatcgctgctgtccgccggacaggtcgaaaggggagcggtcggcaagatgcccgatatgcaacaggtccagtgattcgcgcacacggtcggccacctcggcctcggcgagcccctggttgcgcgggccgtacgccacgtcctcggccaccgtgtccgcgaacaactggtgctccggatgctgcatcacgtaacccacatgccggcgcaattgcgccaattgcctgcgattcgccggcttcggccgtgcgttgctaccgcgtttgccggtcgaggccaccggaacgccggccacctcgatgctgccggcggtcggcgcggccagcgcgcacagcatgcgcaccagcgtcgacttgcccgaaccgttcacgcccatcagtgccacggtttcaccgcgcgcgatggtgaacgacaggtcatcgataaccgcccgtttggccgaaggatagcgataggtcagatgcgagacgcgaataatggggttcgtcatatcaccgatgccgtcggagagcagcggcagttcggagccgtcttcgcgcttccgctggcggggtctgtcgttcgtaggacgactgggggcggcttctgtgccgataccaccctcagtctcgctttgcgagacagcctccgctagcgggggtcgattatcggcggctgcagtgacaccaacgattcgcccggcctccatgtgcacgatgcgatcggcatgaacggtctcatccggatgatgcgtgacatgcacaatagtggtgccgcgcgcctgcaaatcatccaaaatgcgcataacttcggcgcgtgcggattcgtccagcatggcggtcggttcgtccaataccagcatcgccgggttcatggccagcatgccggcgatggcggcgcgctgctgctgtccgccgctcatacgggtcgggtcggactgacgcaagttcgccaaccccacggcctgcaatgaatcaacgatgcgctcgccgatgagcccgcgctccagcccgagattctccgggccaaaagccacgtcatcctccaacacggtggtgaccagctgatcctcgggattctgaaacaccataccgatgccgcggcgggcagcgcgataggcgttggcattcgggccggctgcgtacacgcgctgttccagtagcgtcacttcgccaccgtccggcgcggtcaatcccgcaattagacgggccaacgtggacttgcccgatccattcggaccgaccaagcataggcgctcgccggcatggaccgtgagcgaaacgccatccaaagcccatgaagtgccgcggtcatagctgaaacgaatgtccttgagtacggcggcggggggagcgggctcggcggaatcgtggaactcgtcggcgtcgaaggaatggggtgcaacggtcatgaaacagcaatccgtaactgataggcgaaaacgcagaatcccggcaagggccggagttctgcgttcttgttctttgagtggtcgttgagtggtcgttagtcgtggcgggcataggcccgtctcaggccggtcactgctgcttggacagcaggttggagaccggcttgtagatcaggaaggtgatcacggcgtgaatcgccatcttagccacgttgaacggcagcagaatcggcagaatcatcgcggccacagcctggtagggcatgtgcgcgtaaatcggcgtgatgatgaggttgcccaccagcgccaccacgatggccagcaccgcacccaccagaatgccgatggcggcacccttgcgcgtacggatcttacggtagatgaacgcggccggcacagacaggaacagcgccaccagcacagccatcagcgaaccccacgggtcggcgaacatgtgcggcacaaagccgagcacagacacgattgcggcggcggccggaccgtacgcaaagccggcgatcaggcagacgatgccggacgggtcgtacttcagccaagtgaccggcgtaatcgggaattcaatgaagctggtgaccatcgccagcgccacgaacagtgcatacatggcgatacggcgcgtggaccagcggccggaatcggccacaccagtggtgtgcgagccgagtttggcgctggtgctggcggtggacgcgctggccgaaccctcggcctcgggcgccacagaacgaacaacttgcatgcggatacgcgaagatacgctcataatgagccctcgtttcttccatccggactataccgttggctccggaatctcaccggatcagccgcttgcgcgggtcgcgggcttcccgtcatccccgttatgaaacccggggtacaggttaccgccagtaaggaattgcaccttccctgaaactgacaggcttattcatacgccatgcgccggacgtacgcaacccgcgtttcactgtgcagaaattcgtcttgtgccggtcaagtgcaacaatgggagccatggctgaagtgaagaaacccaacaacaccattgacaagcttgccctgatcgtcaccacctacaaacgtcagcagctgctcgaggtactgttcgattcgattctggcgcttgagcaggcaccgtggcgcattgtcatcgtggacaatgagcagtccgatcagacggcggacatggtcgctgcgtttgccggcaaggtgaccggccaatggggcaccaccgtggccgaccagtccggcaacgaagagcgcgtggtctatgcgccgcagaccgagaacctgggtggtgcgggcggtttctccgccggcgtggccaaagcctacgagctgggtgccgcatggttctgggtgatggacgacgatgtggccgtgctgccggacgccattgccaagctgtccaagtggaccgacaagcacgaggtgattcagggatcccgattcgattacgatggcggcccgttctactggcagtacgacttcattgtgccgctgggcattccgaacccgatcgcgcccgccgcattcggcccggccggataccgagtgatggacacgctgtgcttcgaaggcggcctgttcaaccgccgtgtagtcacggaaatcggtctgccggacccgcgcttcttcatctactgggatgacacgatgtatggctaccgcgccagcaaggtcaccaacccgattgtggtgcccgacgtgatcctgcgccgtacgcgcgaaatcggcaattgggatatcgccggcgtgcgccagctcaactccacgtccgacatgaaccggtaccacatcatgcgcaaccgcggatacatggcccggtacttcatgacctacggcgacttccgtccgctggtgtttggactgggcaccgtgctcaccgcggccaaggaagtcattcgcctggtgatggtggatcgcgaacacctcaagaccggtttggtgcagattgccaagggctggtgggactcgcgcaagctgatgcacgaccccacctggaagcccatgccgtcgctgaagtagccgtagtagtggctccctcatcagagggagcttatttacggtcacttatgaatgaacaggccaccgtcgccccaggcccactggccttggccggcaccgatctggaagtgcagcttggcgatgcccatgtcattgaacgcgtggtgcgcgtctcccgcactctggtcgatatgcgcggcggcggtatcgtcggccggattatacgagaaggtgatcggctgacggttcatcgcgcgcgacacagagtcaggccgccacagacgccgaattttcctagtatcgaaatcgcgcgcattgcccattgggggggcttgaaaaacgatacggatagggtacgtagtgaccggcggcgatgcacacgtttgcacaattggtgtgtaatggtttcgtgttgagcacaattcgcgttagactgggcgcaaccctacgaactgatgaaaacgtatggaaaggaaggtcaacgatgattgaaactgcacaggctttcggtgttgacattggcggttccggcatcaaggccgcacctgtcgatctgaccaagggcgatttcgccgagccgcgattgaagattctcactcccgaggtctccacgcctcaggccgtggccaaaatcgtcaagcagcagctcgaccacttcgaagtgcctgaatccgcacccgttggcatcgccttccccgcgccgatcaagcccggccagaagctcgacttcatggccaacctcgaccagtcttggattggcgtggacgttactgaagtgttctccgaagcctgcggccgcccggtcgtcgtggtgaacgacgccgacgccgccggcctggccgaagtccagttcggtgccgccaagggccaggatggtctggtcatcgccaccacactgggcaccggcatcggcaccgccttgatctacaacggcgtgctcatcccgaacaccgaactcggacacatcatcctgagcgccaagcatctggacgccgagaagtatgcctcctccgcgattcgcgagaacgaggaactgggctacaagaagtgggccaagcgtctgaccaagtactacggccttatggaaaagtacttcaacccggacctgttcaccgtcggcggcggcgtgagccgtcagagcgaaaagttcctgccgtacgtggatatcaagaccccgattgtgcccgccaagctgcgtaaccaggctggcatcgtcggtgccgcctactacgccagcaccaagcagcagtgagctgagttatttctgctggcgcaggagccgtattgaccatgtgtaaggccgtccaagtatttcgggcggccttttttaatgagtaattcgttcattaggtcgattatgtgttcattaggtcactcccattccaaacctgaattgcaatgggctcggaatggcggcgtttcaagcatcaacaattgtgaggctcgactagcagtgacctaatgagcgcgaaaatgacctaatgaatgtagctaggccgttattcgatgtggattgaagtcatagtatgtctgacgactccgctgccgtgccgcacgattgtcgtagtgctggatgctggtggatatgaggcctcgatatacctggctcggcaggggtggttttatcgtggagggtatgagcgtgcatttctcttctcgtgtggatatttctgcgccgaatcccattgcggcggccgaggcggcagccaaggcaaacggcatcgcactcagcaaactcaacgattccaatccgacccgccacgggttggcacccgaattggtgccgagcgtgtatacggccgacccgcgtggaccgcgtgcggcacgagaatcattggccgcattcctcaatacggtaaacgtggtagacgcaagcagccctcagttggcttcgcccgccgccggcgagggcaggaacgagcgccatgccgctttcaccaatgtgaataccgccatcgagggcgccgacccggacgccctgtacctgctgagctccacgtccgaggcgtattcgtggctgattaagttactttgcgatgccggcgacgcggtgctggcacccaaacccggctatccgctgattgagtcgattgcacggcttgaatgcgtcgatacggtcgaataccagttgcaattcgacggctcctggttcatcgacatcgccgaactcgagcggctactcagcgagcccggtggcgaacgcgtcagagcattggtactcatcaacccgaacaatccgaccggttcgtacgtaaaaccaaccgagcgtgcacgtatcgtgacattgtgccgtgagcacggcatcgcccttatcgccgatgaagtgttcttcgattactctctcgaacctttccccggcgacgcacggctcgcgggggagcgcggcgtgctcaccttcgccctagacggattctccaaaatgctggccgcgccgcacgccaaagtcgggtggattcaggtgtccggacctgccgaggacgttgccgaggcccagcgtcgactggacgtcatcgccgacgattatctgccgatgggcgacatcatcgccgaacggattcccgcattattgaacgccgcgcccgcacagaccagacgggtgggggagcgcgtgcgcaataacctggccaagttgcacgagttgcttgacgccgatcccaacgggctggtcagcgtgctacgggccgaaggcggctggaacgtgctgttacgagtgccttccgtcatcgatgagaacgaactggtgttgcggctgattgacgagcaccaactcaccggacagcccggctacttcttcgacatgacctccaatggatacctggccgtttccctgctgcccgaaccggacgaattcgagcgtggcatccgcgccgtgctcaataccgtcgccgctttgctgcgataggccggtgtttgccggcaccacacctgtactccacgtacaatggcggcatgggattcttgtttagaacgaaagaactgccacgcccggcatcgctgacgttcactttgaatcaggccgggcatacgtatgatgatgggcacgtgggacttgctcccacggacatcaccatcagcgagcggcgggtggccgtgatcggactgaacggcgcaggcaaatccacattgctgggtctgctggacggttcgttgaaggccaacgccggcacggtgaccattgcgggcggtgaggaacgtcttgacccggctgtgaagaaggacgcgaagcgcatcgataatctggtcggcaaagttcgccgcgaggagattccgaacagtttctaccaagcggcgaatatttccgaggctgtttccgaagcgttgaaaaagcacaaggtgcccgagtcagaacgtcatgcgcgcatcggtaatctgttcgcgcattttgatttggcgcaggtctccaaggccaaggccggcgaattggactccgagaaacggcacctgctggctattgcggccgcgctgagctttgagccgagtgcgattgtggcggatgagccgagcaagggattggatgagattggcaccgcgcatgtggccaaggcgttgttcagctacaacaagcaggtgattttcgccacgcatgacacggatatgatccgccggcccgaatacgccatcgaccgcatactggtgctggacgagcactcggtcgtgtttgacggagcgccggctgaggctgtggcgttttatgaggatctgattcgccgccgatacgagactagagcatcgtgaaccaagactgaacctgatgccagagcgtcggattgttgtcgatcatcgaatcgctgcgcgactgcacgaagcagctcagtatggctatgcccagcgcccacaatacggccagcaccacgacccagcgcatcagccaacgccacggagtgacgcgggcgatgccatcgcctgaagcggcgtcgttggcccccgccaatgaccggctcggttcgcgcccattgaccagccacagtagccccggtatggacgccagcgagatcagccagccgaaatcggcggaataccgccatcccaaaccgccgacgcggctgtcgaatacgaccagcaccgccgccacggccaagcaagacatcagccatggccgcatgccgtgtgtttccaatctgcgcagcaggggcagcgccaaagccatcaaggtcagtggcgtggccgtgaaaatcgcgccgaccatcacctcgtaataaccccattgcggcatcggggcgggagagcccgccagccacgggaaacgatccatgaagcgcagcggcaggaacaggtaataccagatgttggcgggcatatccgcggacggggtggtataccgggtcatatcggatatggagaactgatacgcattgccgaaattgaacggggaatcgaaccgaaccatgttccacgccatcagaggcgtcacgacgagaatggcgggaatgattaccgccagcggcgcgcgcaacgcctgcaacggcttgatgcggcgtgtgcgcagaccggtgcccagcgcgcgaatctgcggccagaacagggggaacgcaagcaatgcggccaaggtgaacgtcggtcggcatccgaaattcgccgcaatgcacaaggcgcccaaggccagtcgtggcagggagagaggcttggcatcgcccgcctgccatcggtccgatggtctcagcggacggcgggacgtgtccgcgccgagccatagccatagtcccagcgacgtcaacgtcagcgatgcggcgaacggtatctgatagaagttcgtgcgatacagcaaataccccacttgcgcgctcaccaacgatgagaccactactaacgatgcggccgccaccgaagtcttcggcatcacacgatggatgacgcgcagcaccagcaaggagaagaagatgatgaacagcagcacgagaatatactcggcggcggatgtcggcagattatgaccggccagcagacgataggggacgaacagcagcactgcgggcaacacgccaaaataggaataccagtgaccgtcataatacgcgtaatcccagtagagcggactggctccattggcgagtagctgggcacgtgtggctacgtcataggggtgctcggtggcggccagttgttcgggaaccggcaagtcgagccagggccggccggcgaccagcgcatcggtcacatgcccatactggtcgaaatcataggtgtaatcgccggaaacgtggaagacgagcgaagacgcgtaccacagttcgtggatgatggatacgccgataagcagggtaggaatcgccagaagccccacgaaagcaagtcgttgccgagtgctggacgggtcaagcgtgatacgccacaggcgcgatcccggcctccagacggcaatcatcagcaacaccaaggccatggcgagcacgcgcatccaattgatgacgaacggtacgcgcacgttggcgcgggcgtcggtgaccggtacgatcgcgccgcgctcttcctgaatccaaatacgcacgatgccggcacccggcgccttgacataatggctgcgaatagcgtcgggattcatcgactgggccttgccggtgatgccatcgacatccgcgcgcacatgaatggtcgccagcggtttgaagacttccttatcgtcgttcgctttggattcggcctcggcctgctcgcgggccttatcgatgaccttgctgctctcggtatcgatgcgtaggtaatccgacgtgccgtccgcggtcagttcaagataggccttggtcggatcggtgacggtcaacatgccatcattccggcgcgtgagacccgaacccagcgtgttatgcacggcgttcgtatccgtgctcgctctgagcgtacgccagaacggcaggttgaacacgatgcactccatggcggcgatggcggcgacggcggccagcaaggcgatcagcaggcgcaccaaacgcagccggtgccgggtatccgggcggctgggcaggtgccgttcatgattcgacggcatcggacggtctgcgcgagtgtggtctatggaatgcacgcatttattctataggctttattcgggcttgatgtcgggcaaacaagagacaatgtgaatcatgccaaaacgtacatcggaccatgggaagcacaaccgcacgccactgctgggcgggctgaaggattcgatgaacgcgctcgcggccgatctgggactgtccaagccgaagaagcacgatacgaatccgttcggcgatgccttgcgggagaccagtgagcgtaaaggcggcattatcgacgaactgactcgccatgcagtggcgctgagtcctgtaatcaagcgacgcaccttccccgaattggagaacgtgccggaagggctggtgcttggatgggcgcagctgccctccaccagaggccgtggcttttcgcttggcattttccccgaccgcgatcattttgcgcaggtggcgttcgccgatacgcatggccgcgtattcgtgggcaccgaccccaacatggacgtgcaggatatgcaggcgcgattcatgttcggcaaggaaaaggaagtgactctgccggacggtgagcggctgggcgaaagcgacgagccgcgttcacgttccggtttctcccgtgcaggccatggcctgggaagtgcgctgcatcatgggcgtggtttggggcgtggccttggtcatggtgctgacggcgtgaaggccattaccggtggcgtggtggggcgtgacgacaccggacgcatgacgtggctcgcctcatggctcaaggccggcaaccggtacacgcttgagcagatgcgtgccaatctgccgcctgtgatgcgtcatgatttggaataccgcgatgccattaccatcgcgttcttcgccacgtatatgttgccgcagatcaatggtctgctcatcggattcggttccggcaatatcttccgccgtctcaaccgtgaggcgccaatcggtgcgattcgccgttcggtgcgtgacactttggcggcacgagcccacggcatgcgggcctccggtctggaggatcacttcgccgatctgatgcgcgaagccggcgccctcgacaccacgccgggactggaagcggtgcatggcgccgaaccgttgcacctgtacacctcgacgtattcgagcggctatttctttacgtgggataagtccttggcattcgggcaggcgctgaaatccttgaagatcgaaggcaacctcaaccgattcgctgcggtgagcgcttggctggagcgcaacgcttccttggggcgcaaccctacggaagatacggtgacccgtgccgaggccgcgcaaatcgacatgaaactcattgagaaccctgcgattatggcgcttgacccgtatgatggcgagcaggagcgtcgggccgtgctgagcctggtcgatatcgccgcacgcacggctgggcagattcgcagtgaattccctgatcctcgagatgtgctgacccagcagaacgtgccggattcgggtgtgacgaatgctgcgggcgctgaaagtactgagagtgttgagggcgctgtagagcggaccaataagagcgacaccaacactcaagccgctcggccttcgtattcgccggcgaggagcgacgaatgggtgtatcgtcagaccctctcctcactgttgcgccgattacggttgccgtatcggtttgatgtggagttccggtcgcgcttggattcgggtgaagtggccattggcttcaccactgccggcacctcgatgatgcccgatagccggtatgacaccactcgccgtacgtggcgtgcgctgagcagcgccgaacgcgcgtcgatgagcgccgcctacaacctgcgtgtcggcctgatgatggcagcgctgagtttcggcaccagcgaatccgtgcgccaggtgtcgttgcacatcgattccattggtcttgaagaggcgattgccgaacaggattccgccatcgaggcgatgatgagcgaggccctaagcgccttcgaacatctgcgcagtggcgatttggggcgtgtgggttccaaagccgaccccaaagatggtgatttccatggcgacccgacccgccccatcacccatgaggagacgttcgggcaggcggcgtccggtgacgaacgcggcacggccgggggaataggcaacggtaccggaccgtctgcggatgctacggatcaggccgcggccgaatccactgacgccgatggcgccgcgtccatcgattcgcagttcgaagacctgatgaagggcgtcgatatcgacgaaatggcgttcggcatgccggacgataccggcgcaggcgacgacctgggcggtatcggcggcgagggcgtcggcactgacggtgctgatggggccgccggcgtggacgatgatccgatgaacgtgctgcgccgcaatcccaccgtgcgtaatatggtcaccgtcaccttcacccgtgatgccttcctcaagcgactggacaccgatgggcttgacaatcccgaggaaacctaccgcatgttcggtgccgtgatggacgtggacggcgaaggcggcctgaaacccatcagcgccgacttcgacttggcggacagccggttctctcccaccggatcccaggaggagcccgaactggccgaccgtcaattcagcccggcgaccgctcacgtgctgggcgcacagaatagtgccggactggctatccagcgagtggacttactgcagcatggcgtcaacgaattccacgatatcgccaggaacacgtcgctcggctccgtggaaaaggcccagcgagccatgcagatcatcgaatcgatatgcgatcccgaactgaccggtttggcctctcaggtcaccagtgcgttgatcgatggcaaggacaccccggacttcacgttcacgcttgccgacgatcttgacaaggagcgtctgcgcgcccgagacatgctgttctcgggccaagccgatcaggccatcgaagcggccgaagcggctgtggcccatttggatcaggtgtatgcggcaggccatggcgtacctcgatacttcaactcctatgccgagcgcgtggtctacaaccgactgttcgccacattggacgagcgtacggtgctcatcccggacaatctgttctacgcacacatggagctggctgacgtgttgagccagatcaagggtgccgaggcggccatcccgcacctcaaccgtatggtggcgtacgcgcccgcctacccgctctcacatctgaagctcgccatccaactggcccgcaatgaggattgggattcggcacgcgccgcctgcctgaatgctctgcgcgtggccttggaccgcgacgatgccgcgttcgcctactaccggttcgcgtacgccgaatggatgcttgaccggttcgacacagccgccgcagcctacattatgagcgatcacatcgctcccggggccattggttcgttggaaagcgaactgcaggaactggtttcccgtgcggactcgcagtgcatgccggtgcctgaatcggtggagacggccgcccatgtgcttgccacgcatgatctgccggtctggccgcataacgaagtggccgacatcgtgcgtgacgccgcccgcgtgtgcgtggatgaaggcatgttcgtgccggcccgcacgctctcggtggccgtggcccgcatgaatgacggcgaaggcgacaacatcgacatcatccaagcccagttcctgcgctcactatccgcgtagccgcctgaggggagttgacggtatagccggccgaggggagccgagcccgctaggatagacaaccatgagcacgaacgaacaactggcatgggatttcgacgatggggatgtggccgaggtccggcctgataccggtattgcacgttttgcccctggctccgaacaatggatagccgcactgcagcccactgacgacgacgcgatacgcctcgaccatttcgacgtgaacacgatgaccgctgaggccgccgcccgcctgtgggctcgcgtggccgcatgggtggaatccgatcagatcgcctactacatcgacgactcacccgtcagctccgacgccgcctacgacgcgcgcatgcgttgcctcgaacgactcgaagcggcgttcccctcattggacaatccacagtcgcccacccatcgcgtcggcggctccttctccaacgacttcgcctccgtgcgccaccccagccgcatgatgagccttgatgacgtcttctccatcgaagagctcaaggattggtacgattcggtgattcgcgacctcgattggcccgaatccaagcccctgcccatgagctgcgaggtcaaaatcgacggcctcgccctgaacctcatctatcgcaacggcgtgcttgaacagggcctgacgcgcggcgacggcgttaccggcgaagacatcaccctgaatgtgcgaaccatcggctccattcccgccaacctcggcggccccaaggaagacgttccggacttcgtggaaatccgaggcgaagtgttcatgcgctgggatgacttccacaccctgaacaacgagcaggaggacgccggacgagcgccctttgccaacccgcgcaacgccgccgccggctcgctgcgtcaaaaagaccctcgcatcaccgccacccgtcgcctgagcttctatgcgcatggtctggggcagctcatctggggggcggaccatccgcgcggcacccatgatgtggtcgccgaccagtcgcaggcctacgatctatacaccaggtggggcgtgccggtctccccgcacaatcgtgcggtgacctcattccaggagatcctggacatgatcgagtactacggcgagcatcgcggcgacatcgagcacgcgctcgacggcattgtcgtcaaggtcgatgacctgggcctgcagcgcgccctcggtgccacctcgcgcgcgccgcgctgggccatcgcctacaaatacccgcccgaagaggtcaacaccgaactgctcaacatcaccgtgcaggtggggcgtaccggccgtgtgacgccggtcgccgtgctcaaacctgtctacgtggccggctccaccgtggctcgtaccacgctgcacaacggatttgaagtcaaacgcaagggcatcctgatcggcgacaccgtggtggtgcgcaaggccggcgatgtgattcccgaactggtcggcccggtgcttgaacggcgcaaagggcgtgagggccagctgcgcgaattcgtcatgcccgagttctgcccttcatgcggcgcgaaactggcacccgccaaggagggtgacaaggacatccgctgcccgaatgtggaaagctgcccggcccagttgaccgagcgcgtgatttcgctggcctcacgcaaggcgttcgacatcgagcatctgggtgaacagtcggccatcgctctgaccaacccggaggagaaccggcctgattcggtggcgacctacgcgccgaacatcaccgaggtgctggtcgcccccggcgaagagcccgaaccgtatgagccggtggaagggctggaattgccggccgcgcagaagccggtgttgtccaacgaatccgggttgttcgacctgacctccgccgatctgcgcgacgtgcgtgtgtggcgtgaggccgcaatcgtcgaagtgcatgagacggtcggtgcgaacggtaagaagaaaaaggtgcgtaagcgtgtcggtggctctggcctgtggcatcaggtgcccgccttctggaccgcgcccacgccggccaagaagctcacggccaagcagttggccgaacgcgcgcaaagggaggccgcagtcgaatctgccggaacacagggaggtgccgccagcgagacgaccggcgcacctaccggggctgaggctccacttggtactatgccgggctttgccgcagcctcctatcccgagtatgacgtgccggccgacgcggtcatcgtgcgcgtggaccacaagaccacgcgcaccggcgtcacggatgtgccggtgatcattcggcccggcgaaaacacgcgcaagatgttcgacgaaatggacaaggcccgtcacgccgacctgtggcgtgtgctggtcgcgttgtcgattcgccggctcggtccgcctaccgcacgcctgatcgcctcggcgatgggctcgctggcagccatcgaaaacgccacgattgaagatctgacggccatcgacggggtgggcccggaaatcgccgaatcggtggtgaactggttcgccgccgcccgcgagcccggcgactggcgcggcgcgactttgcgtgcttggcaggccgccggcgtgggcgtcgacgaggccgagaccagttcgttgccgcagacgctggccggcaaaaccgtggtggtcaccggttcgttggaaggctattcgcgcgactccgccaaagaggcgattatcgagcgcggcggcaaggcggccggttcggtgagcaagaagaccgattacgtggtgatcggcgcaaacgccggctccaaggccaccaaggccgaggaactcggcatccccatgctgggcgaagcccaattcgcccagctcctagccaccggcaccatctaaaatagccccctcagacgcttcattaaccccctctgatgagggggctgtcagcctttaggctgactgggggagagaaaaagcgaatcccgccccagtgtgacttactccactccctctggcatgccgccgcatcacacgctagggtagaacaggccctaaaggaggatacggatttatgagcgacgcacgtcagatcgaagccgacatctacgaacgcctgagcaaggtcatcgaccccgagctcggtcgttcggtcaccgacctcggcatgattgccgctatcgaagccgcgcccgcatcgtcggacgccggcacttacgacgtcaccgtgcacgttgagctgacggttcccggatgcccactgagcgagaccatcaccaaccagatcaatggcgcggtcagctcctatccgggcgcacagctgctgcctcatatcgaagtcggttcaatgagtcgtgacaagctggccgatctggttgccgacctcaaggccgaacgcaagcggaaccccttcagcaagccgggcgtcaagacccgcatcttcgccatcgcctcgggcaagggcggcgtcggcaagtcttcggttaccgcgaacctggccgccacgtttgcggccctcggcttcgacacggccgccatcgacgcggacatctatggcttctcactgccgcgcctgttcggcgtgcacacgcagcctaccaatctgaacggtatgcttatgccggtcaccgcgtggggcgtgaaactgatctccatcggcatgttcgccggtgccgaccgggcgattctgtggcgcgggccgcgactgcagcgctccttggaacagttcctgtctgacgtatggtggggcgagccggacgtcctcttgctcgacttggctcccggcaccggcgacatggcgatttccgtggcccaggcgctgcccaacgccgaactcgtggtggtcaccaccccgcagccctctgcctccgacatcgccgtgcgctccggactcgtggccctgcaggtgccgatgaaggtgcgtggcgtggtggagaacatgagctactacgagcacaagggcgagaagctggagattttcggtgccggcggcggtcagcgcgtgtctgaacagttaagcgcggcgcttggctatgacgtgccgctgatggcccagctgccgctggaacccgaagtgcgcgagatcggcgaagcaggccgtcccgcggtgctggatgtcgatggcgccttgcgcacggatggcattggccagaccttccgagggttggctgaacggctgttggcagtgtgagcctgcgcagcctcacacttttgtaggcggctggcgtttaagtccggctcgctgctggtgggcgaatcgcttgaccacagcacccgcgacctggtggtcgaggcagtggagcgcactgccggcgtggataggctgcattaacccgcaggccattcacatggacgaggacgccgtgccgcgctgccttggtatggatgggggatctacgtcgagcccgatgtctggcgggcacctcgcggtaaatagcggcatagcgcattatcggtgcgatgctaagaggtaatggcccatgagcggttccaatcggcgagattgcgttgccgggacaccacgacatgggccatctcgataaaacgatgccgcgtgtcggctgttctcaggtcatccgcagtgacgagaatggcgatccagccgagcagttgcaatgcgtttcgctttgccgcgtcaattcgcatttgtgccggatcggcgtgataggctccctgatattcgaacgcgacgcggcagtccggatatgccatatccaatatgacgtatgagttgccgatattcacgcgatagttggcggtggggcatcccaagcccgaatccttcagcatcccaaacagcgtgttttccggcggagaatccgtgttctctgtcatgtagggcagtgcctcgtggcatttgttacgacctatgaaccgcggactgatttccaagtaagtatcgaaatccttgcgagtggccattctgcgccgtttatcgcggctcatcaaagaggctccaatggccgcaagttcctccaatgtggagtattgggccatctgagcccacatcatgaccggcgaggcaatccagaaatgttcatagtcctttttgcggatatccagttttcccttaaacacatggaagaccacgcctttgattcgtctgcgtttgttggcactggaaacacaggcgtgcacggcatcaacagatagcgtgcaatgtcgggggatgggcgcgccgtagtagttggccgcattgatgtatcccaccagcaatggaccttttgaacggcgcgcagcatcattgcaacgttcacgttctgctcggcgtcggccgacaatatcctcatgcataaaagagctcatgatgcgaccgtaaagctgatttggacttgaatgcaagccaggcagggcaatgtggttccagcttatggagttatccacattgtctatttgcgcagagaacggttctcagtagtatctgtgcgctcaaatgaacaagaacataacaatctcacatcatcgcaaatggcgacatggcagtgattagggcatatcccatgtgcgcttcgggcgtagagaagtgcgcacagatattattgagaaccgttctctgcgcgcctactctccggtggagcctctggccacgacctcggtgggcaggaacaccgtgcgctggaacggtcggccctcgatctggtcaagcactagggtggccaagctgacgccgaatgcgtccattggctggcgcacggtggtcagctgcgggtgcagggctgtggcgtcggcgctgtcgtcgaagccggcaatggcaatatcgtcgggcacacgcacgccgcggtcgagcagataattcatggctccagcggcgatgcaatcactgccgcatatcagcgcgtcgatatgatgctcggcgaggagctcgggcacgctggcgtcggcgccggcaagtcggctacccgacggctcagccagcgagtccagcagccgcacgacggcgttgcggccatcgggccgggtccagccgtcggaccgaatgaccagtgccgggtcgaaatcgccggccatcgcatcctggaatccgagcagtcgttcgtcggaacatggcaagtacggcggtccgatgatataggcgattcgccgatacccgcgccccaacatatgctcggtgagcttgcgtgaagcgagtcgattgtcgatatcgacggtggggaaggggatggcgctgccatagccgacgccggaaatggcgaccggcacgctgatattggcgaatctctgaaatagcgggtcatctttatggaacgtgttgagaatccatccgtcggcgaatccgctggaggcgagtctggcgatgcgtgcgccggccgcaggggagtcggagatcagcgtgatgagttgataatcggcattgccgagcgtctggttggcgttgagcaggatggtgttgatattggggtcggcgattagcgaatccggctgcccgtgcaccacgaacgccacggtttgcgtgcgttggcgtaccaatgatcgggcggcgttgttcggcgtgtagttcacctgcttgacggcggcggcgatgcgctcggctgccttggccgagacatgcggattgccgttgagataacgggagacggtggcgtaggagacgccggatgccgcggcgacgtccatgatagtggccggcttacggggtatggccatgcccgtctccttcctgtcctagggccgttcacagtgattgtaccgcgcgattttcctgatgattccgcatggcccatgtccggtgcctgtggattgccgtgccggcgtatgaaagtcggtaaacattctctgccgtaagggtgtacgaagtaaatagtaaaagagatttaccgatattaagtgaagtacgacacgcacatgatatttgtaaacctttacgtgagtgttatactccttttcgtaaacgtttacaagaaatcaccagtcaatggagacggccagatcaagcgagccgcaacggttcacaactggacgggaaggaacatcatgaagcagcagcacaacgtacgccccgccatccgcagggtgctccaggccacggccatcgtcacggcagcggcccttaccctcgccggatgctcgatgggcgcaccatcctcggacaccggttcgagcgatggcaagctcaccgtctgggtcatgcagggcgatcaaagcgaggccaccatcaaggccatcaacgaccagttcaccaaagagaccggcgtcgaggtcaacatccagaaccagcagtggaaggacatcagcaccaaaatcaccacggctctgtccaccagcaccccccccgacgtgctcgacctcggcaatacgcaggtcgccggcttcgcggccagcggcggcctcatggacctgaccgaccacgctgacgagttgcgccagggcgtcacctggctctccggtctggaagagcctgccaccgtggacggcaagctgtacggcattccggccctcggtgccgcccgcgcagtggtctacaacaagaagacctgggccgcggccggcatcaacgagccgccgaccacctacgccgagcttgaagccgacctgcagattctcaaggacgcgcaccaaggcgaggacttcaccccgttctatgtgccgggtgccgattggaagaccgccatccagtgggtgtgggacgccggtggcgactacgccgtgcagaaggacggcaaatgggtcagctccctgtccaccaaggaatcggtgtccggccttgagcagtggcgtgaattccagcacaagtggtcatccgaagcctcccgcccgctcgacaccgatagccccgacaccagccagctcatggccgaaggcaagatcggcgccgtaatcggcaacagcgcctccatccgcgtgattcaggaatacaacaaagacatcaccgccgacgaactcggctccttcccgatgcccggcctgagcggccagaaccagccgtcgatgatggccggctccgtgtggggcgtggcccagaagagctccaagcaggatctggccctgaagtggatcaagatcgcctccagccctgacatccagaacgactacgtgttcgccaaggacggctacctgcccaacaacgtcgaaggactggacaaggccatggcctccgacgacttcccgaccgccctgaccggcttcttcgaggccgccaagcgcaccaaggccacgcccgcctccccgcagtggaccaccatcgaaagcgacggctcgctgaccctgttcaaggacatcgccaccgacaccagcaaggccgaggcctccgccaagaagttcgacgaacacgccaacgagctgtatgccaagtgatgggttggaccatgacaagctcaacgcaactcgcgcacggcgaggccccggcctcacggccggctaagaaacgcggcaatcgcgccccggcgttcctgctgacgcccgccggcatcgtcatcatcgcactggtggtcatcccgctgggattcatgatcttcacgtccttcacggatttcagccagcgcacgctgttcaccggcgaatttgacttcgtcggcctcaagcaataccaatccgtactcaccgacccggccttctatgcggccctgctacgcaccttcggcttcaccgcagccctcgtggccggcagcgtgctggccggcatgggagtcgcccagctgatgaccaaactcggcggtgtgatgcgctacctggtcatcttcgtgctcatcttcgcgtgggccatgccgaacgtcgcatcctcggtggtctggaagtggctgttccagcccggttacggcgtcatcaactggctgctcacccagctgcacgtcttcggcgacatgaccaacacctcctggatcgacaacacctggctcgcatttctggagatctggctgctcgtggtctggcaggccgtgccatacatcgccatcacgctgtacgcggccaccacccaggtcgaccagtcctgcatcgaggccgcccagctggatggctgcagcaagctgcgctgctactggcagatcgtcgtgccgctgatctccccgagcatcatggtcatcaccatgctctcgattatctgggacttcaacgtgttcaaccagatctggctcatctcgcagggcggcccacaggacacgaccgccaccatcggcatcttcacctataagaaggcgttcgtcagcttcgaaatcggcaccggttcggccgcctccgtgctcgtgaccatcgtgctgctcgcgctgacctccgtgtacatccgttacctgctcaagtcaggagaggacctatgagtacgtcaatgagtgcaagtcctgcacaggccgtatcgcaggccgcagcgccccgccgccgaaccaaccccggcaagatcgcgcgccgcgccggcaccactatcctcgccctgctgttctgcgtcgtatggttcttcccggtctactggatgattatcaccgccgtaaagcctcgcgatgagatcatgaccacgacccccgtgttctggcccacgcacctctcgttcgacaacttcatcgttgccgtgacccagacctcgttcctgaccaacctcaagaacagcgtggtcgtgaccgccatctcgatcgtcctgtcgatcatcgtcgcgttcttcgcgtgcgcggccctgaccctgtaccgcttccgcggccgcaagccgatcatggtgttcgtactggccatccagatgacctccggcggcatcatcccgcagttcatcatctacaaccagctcgggctgctcaacaaatacagcggtctgatcttggcgtacatcgccatggtgctgccgttcgcgatctggaacatgcgtgggttcttcctgaacatcccgaaggacatcttcgaatccgcggccgtggaaggcgcgaacgactggcagatcctgtggaagatcaccttcccgctggccgcgcccggcatcgtctcgacctcggtgttcgcgttcatcaacgcctggaacgactacatgatcgcctatacgttcatgaaggaccagtcgaagtacacgctgccggtatggctgtcgtccttctcgacacccaccatgggcaccgatttcggcgggcagatggccgcttcggtgatcttctcgctgccggtggtggtgttcttcatgctcatccagcgtaacatcatgaagggcgtgacgaccggtgccgtgaaatagcgtatgccgccgtacctcaccaacgattcgtccgctgatggcggcgcgaccacgtgtcgcctgccattagcggacgaacgataataaaaacagtatgaaaggaacagctgtgcccacattcgaatatacagtcgatgccgcaacgctgtgtctcaccctgattcccgctccggtgacattggaatacacgcatggcacggctatgatcgggtccctggtgacgatcgagaaacgaattcccgaatatgccgccaccgaaggtgccgatgagacttgggaaacactgccgattgagcagctgtccagcgagctcgagcgttactgcggcgtcaccgtccgtacgcgccgtgtccgtgcagccacaggtgaagacgacgccagcgccaatgccgccgaagatgcgcgagatgcgcgtgcgggtgcgccggcagcgatgaacggcaccgtcatatccctgggcctggattcacgattggcgcatgacgaatacacgctggatgtgttcgcctcagataccatcgccgtgcgtggcggcggcgaaagcgggctgcggtacggtctgcagacgctgcggcagatcatcgggcagacctcgcgtgccattccctgcctgcatatccaagacaagcccgcgttcgcggtgcgcgcctacagtctcgacgtgacacgcggacgagtgccgacgatggagttcctcacctggttcgtcgaccagctggccttatataaatacaatcagttccagctgtatgtcgagcatgccttcgcgttcgtcgagctcagcgaggcgtggcgtggcaccgatccgctcacggccgccgacatcacgtatctggacgagtactgcgcgcgtcgcggcatcgagttggtgccgtcgttggccacgttcgggcacatgtacatgaatctgcgcacccgtgagcatcgcgggctgggtgagttccccgaagacgccgaccgcccgttcagcttcatcgaacgcatggagcatcacacgctgaacgccgccgatcccaaggcccatgatttcgcctcgcgcctgattgaggaatacgcgccgctgttccgttcgaagtccttcaatatcggcggcgatgagacgttcgacttgggacgtggcaggtccgcgcaggacgcgccggaagccggccgcgatgaactgtatgccggtttcgtcagggatttgtgcgaaacgctcgcccgccatggtcggcagccgatgttgtgggcggacatcgcgctcgaaagcccgcgcacgatggatctgctgcccggcgacatcacgatgctcaactggatgtacgagccgcagatcgacgagagcaatatccagaccatcgccgcgcagggccgtcgccagttcgtgtgccccgcggtgcgggcttggagccggttcttccccgattatgcgggtgcctggctgaacacgtatcacatggcattggcgggtgtcaagtatggcgcggaaggcatggtggtcaccgattggggcgattacggccacgtcaacgatccgcgtctgagcgtgccgggcctgtgttatggcgctcagaacgcgtggaatccgattgagatcgatgcgcatgagatgaaccgtcggatctccgttctggtgtatggcgacgagtccggtcgcatcatggattgcctcgtccgcatcgactccgatggggtgtcattcccctgggaccttgccgtgcaggtgctggagctggaatacggttccggcaccggcatgctgaatacggatgtggcatcgtatgtggaacggtcgtgcgggggagagctcgtgtttgaccgtacgctgggatgcgccgatgcgcgccgccggctgctcctgcggaaccatgcccgactcgaacgacgccgggattgcgaccgggcgttgatcgattgcggcagtgcggttgttgcggtgctcgatggctcggcacgaggaggattgaacccggaactgctgtgggtgatgctggatgggcagcggttgttcaatagactgggcgaggaactgctggtactggctggcggcgaggacgcctgtgacaccaaggatgtgaccggccgtgcgctggatgcctcgcgccgcgcccgtcttgccgccgatctggagttgtggttcgaacggtaccgtgtgcagtggctgtccatcggccgctacgccgaattggcgcgtatcgcccatgtggtgtggtcgtttgcggacatattgcgtaggggagcgctatagggagctcacaaaaattcggttctgctgagaacaaggtgaggcttacgcgccgtcaaacgcacatggtgatttcaaaaatggcgaattgctgccattcttgcacctgtgcgtttgatgggaaatgtgcgtatacctcacatttttgcataaagcatgaaaatgtgtgagaccggcgtatataacgtatgataaagagtcaacattcgtggtgtggtgggtccattaagggggtgtggtggtggcaggtatcaaagatgtggcggcacgtgccggcgtatcgattagcacggtgtcgtatgtgatgagcggaaagcgctccatcaaagaagagaccaaacgaaaggtgctgaaagcggcgaaagagctgggatatatgccgagtcgcactcaggagctgcggcatagcggcccgaccaaggttctggcgttgagttcgccgctccatgaatacaccgattactcgaattacgccgtgttcttctttgcgctcgccatacgcgccaagcgatatgggtatgaccttctgctgctcatgcacgaatacggcgatcaggaactgacccgggtcgccgccgaaggcatggtcgatggcatcctgctgttggatgtgctgatgtgcgatgcccgtgccgatgtggctcgcgctctcgacatgcctgtggtggcggtcgggtacccgagcaattccgatgcggtgtattcggtggatttggatttcgagcgtatgggtcgcgaggcgatggagaaggcgtatgcgctggggcatcgccatgtgctggtgtccggcgtggacagcagcgcgtatgaagacggctccaattacctggtccgttttcttgacgccgcaaagaaaaagggcgatgatctcggcatatccgtgatcttcaagccctctaccggcaatgggcgtgacgacgtcaatctgatgttggatgagacattccttgaagacccggcgatttccatgatcatttgccagacgaatgcggcgcatgtggccaacgtgctcaacggtctgcaggatcgtggattgcgcgtgcccgatgacgtttcggtgatggccgcatgcacgcatgggctgggatctttgccgcgtggtgtggatgagatgccgatgatgccgaccgaaacctgctcgcgtgcagtggatctcatgatggaggtgctcaacggcgaccgtgacgatgtcggccgtgtggagatgcttccttcgcgttatatcgcacgtggcaccatggcgaaatgctcgcgcagctgacaggagctcgggtgtttatggctattcgccttatgtgaatagtcacattttatgcagtattccgaacatgaattaacagcgttaagaatgagagcgctcacatcgaaaagtcgttgaaattaacgtcgaaatttatcgaaataatttgagaacgtcgttgccaatccgttatatttccagtggatggcatttcgactggtttcaataatcgtcgaaatgttctctcatcagtaaagaagctgaaaaggagaaaacgatgaagtcgactcgcaaatttatcgccgctggacttgcagttgcgaccatgatcggtgttgctggctgtggtggcagcggtgaagtcgcacaggaggagaaccccacctccatcaagatctggcactacgaggaatcgaccacagcgcaaggcaaggcgtgggacaaggctatcgaaatcttcgaaaaggagaccggtgtcaaggtcgaattcgagaagaaggccttcgaacagattcgccagaacgcctcccagatcctcaactccgacgacgctccggacgttatggaatacaacaagggcaacgccacgtccggcctgctcgccagccaaggcctgctcaccaatctcaacgattacgtgtccgaatatggctgggacaagatcattaccggttccttggccgacaccggcaagtacgatgagcaaggcgtgatgggctccggcgactggtacggcatcaccaactacggtgaggactgcctgctctacttcaaccaggacatgttcgacaaatacggcatcgcgattccgaccaccttcgacgagctggaaagcgcgatggccaagttcaaggagaacggcatcaccgcactgtccgtcggctccgccgagtacccgacccagcacctgtggtggcagctggtgctctccaaggccgatgacaagttcatcaaggcctacgagatgtacgacggcaaggtcgattggaattccgaaccgctcacctacgcaaccgagaagatcaaggaatgggtcgacaagggctacatctccaaggattccaccaacctcaaggctgaggacgccggccagaacttcatgaccggcaccaatccgatcttcttctccggcacctggtggcacgctcgcttcaaggaagaggccgccggtctgaatgtttcctactccaagttccctgacaccaagaagattgtcggctcctccggtaacgtctgggtcattcctcagaactccgccaagaaggatctggctgccaagttcatcaacatcaccctgagcaaggaagtccagaattacatggccgagcagggtggcctggccatcaactccgacgtcgattccatcaaggatgagggcaccaaggaattcgtggcccagttcgatgacgccgtcaaggaagaccagctcggcttctacccggattggccgacctccaccttctacgatgagctcaatgcctccctgcaggagctggtcaacggcaccgccgacgtgaagaccgcgctgaaccagatgaaggacaactacgacaagggccttgaatcttccggcatcgtcgtcgattagcattcgattctttcctcttcccttcctccaataggcgaacgaaggcgtgtggtcggtttctccttcccttgccgccacgcgtctccgttcgtgtcccaacaatcttgcatgctctacgtttagaagtgtctgatgaaaacaaagaccaataaagccaagcacccggaagaaaccgcaatgtcgcgcatcccgggcagcccttcgaatcgtttctggttgtacctgattcccggtgtggcaatgctcacctggatcatcatcgttccgggcatctggaacatctatctgagtttcactaactatcgcggcattaggccgccggtctgggccggcctcaagaactgggtccgactgatgaaggacgataccttctggatttccttccgcaactcgatctggatgatcatcgccatggtggtgatcccgattctgctcggtctgatcctctcctcgctgatcttcgacgttgtgcagaagaagttcagccccaaggccgcgtccacgatgcgcgccgtctactacttcccgcagctgctgcctatcgccatcggctccctggtcatgggttggattttccgagctgagaacggtgctctgaactcattgctcagtgccataggccttggaagcctgcaacatgactggcttggcaaaccggatacggccctgatcttcctgatgctcatcatggtctggattcaggtcggctatccgttggtcatcttcatgtccggcctgcagcgcgtcgatccggaactgtacgaggccgccagcctcgacggcgccaactggtggcagcgcttcagggccatcaccctgccgtccatcaagccggagatcttcgtggtggccctcacctgcaccatcgcggcactgaaggtgttcgccccggtgtacatgctgaccaagggtggccccggcactaccaccatcgtgccgtcctactactcctacacccagttcttccaggtacagcaggtcggctacggcgccgcgattgcgaccgctctgacagtcgtcatcattatcgtggccatcgtgttcaccaaccttcagcagaaggtcgaagctgaggacggagagtgattgaaaaaatgagcactatgagcgcagctgaattgaagaaaatcgccaaagtcaagaagaaccgcaccgccggcgactggctgatcatcgtactgctgattatcggcggcttggtgatgctgttcccgttcgtcgttctttgcctgaacgccttcaagacttcggccgactacaacgccaacggcccgctgtcctggcctgcctcgttcacgcttgatggcttcatcaagttctggacccgcgtcaacttccccgaaaaggtgtggaactcgatctggacctccggcctggtggcaatctttgccgtggtgctgtccgtgttcaactccttcgccctcggcatcggccgagtcaagggccgtcgctggatcattctgttgatcatgctcgcgaacatgctgccgcaggaagccctcctgtacccgctgtacatcatgttcaaggaaatcggcctgtacaacaacccgtggtccatcgtcatcatcttcaccgtgatccaaagcgcattcggcacatacctgttgtcgtcggtgtacggcaccttcccgaaggcgattctggaagcggccaccatcgatggcgcaagccgctggaagattctcaaggatatcgtcttcccgatttcgaagccgaccctggccgtcatgctggtgttcttcttcatctggacttggaacgactacatgattccgatggccttcctgatcgacaactcctcgcagaccgtcccgatcgccatcgcctcgctgtccggcgaccgtctgatggatgtgacgaccacggcctccgcctcgctgatcagtatcgtgccgaccttgattttcttcctcctcttccagaggacgctgtcgaacggcatcaccaccggcgcggtgaagtaaggtcattcgcacaacaggcaattcaatcaacaagcagtacatattgattttggtttcggccgccttgttccctgggggtcgaaaccacctctccaccaaggagcagcaacaatgaagttcaccaacggctactggatgattcgtgacggcgtcgacgccctctacgctcgtgaagcctacgaactggcggcggatgccaccaccgaaagcctcaacgtcctcgccccgacctccgtggtgcgcggccgatacgataccctgaacctgcccacattcaatgtggacatcaccacacctgcggaaggcgtgattcgtgtgcgtgccgaacactggcagggtgccaccgaataccccggattcccgctcaacgccgacaagcccggcagccgggattacgtgactgtcagggctgatggcaatggcgacggcgaagtcggcgtcaatggcgcggacgtcacgctgaccaccggcgggctcacggcgaaggtcgtcaagggcgcgccttggaaccttgccttccttgatggggacggcaaggtgctcaccgagtcagcaggcaagtcgctggcccggttcaatcttggtgccggggcgaacgtcaccgcccagccggtcggcgaattcggtgtgagcatggacggctccgcccatgacgagtccgacgtgttcaccgccatccagctgcatctgtcggtcggcgaagacgtatatggcctgggcgaacgcttcggcgcgtacgtcaagaacggccagagcgtcgacatctggaatgaggacggcggcaccgcttccgaacagggctacaaggacatcccgttctacatgacctccaatgggtatggcgtactggtcaacaaccgcggccacgtctcctttgagatcggttccgagaacaccgaggccgtgcagttctccgtgcccggcgaggccatcgacttctgcgtgatctatggccccacccccaagcagattctcgaccgctacaccaagctcgtcggacgcccggcgaatgtgcccgcatggagctacggtctgtggctgaccacctcgttcaccaccaaatacgacgaggccaccatcaactccttcatcgacggtatggccgagcgtgatattccactggccgccttccactacgactgctactggatgcgcgagttccactggtgcgatttcgagtgggacaaacgtttcttcggcgacatcgaatccacgctgaagcgcctgcacgaagacaagggcctgcacatctgcgcttggatcaacccgtacatcggccaacgcggcgaaatgttcaaggaaggccgagacaagggctatctggtgcgcaagcccaatggcgaagtctggcagaccgacttctggcaggccggcatgggcttggtggacttcaccaacccggccgcctgtgaatggttcaaggacaaggtcaaggtcctactgaatcagggcgtggacgccatcaagaccgatttcggcgagcgcatcccgcgcgacgtcgtctggtatgacggctctccgaagctctccatgcacaactggtacacccagctgtacaaccaggccgtgttcgaagccatcgaagaaacctacggcaagggcaacgcctgtctgtatgcgcgctccgccaccgtcggcggccagcagcagcccgtgcattggggcggtgactgcgagtccaccttcaacggcatggcccagtccttgcgtgccggcctgtcgctgacctcctccggcttcggcttctggagccacgacatcggtggcttcgaaggtgcgttcccggatccggccgtctacaagcgttgggtggcgttcggcatgctcggctcccactcgcgactgcacggttccaccgtgtaccgtgtgccgtggctgttcgacgaggaagacgagaagaacggcgtcgcattggtgcccggccagaccgccgtggatgtggtgcgcgagttcaccaagctcaagcttgaactcatgccgtatgtctaccagcttggcctgcagcctcatgtgaacggcaccccggtcatgcgttccatgttcgtggagttccccgatgacccggcatgccgcacgctggaccgccagtacatgttcggtccgtccatgctggtcgcccccgtgttcacctactccggtgaggtttcctactatctgccggacggcgtgtggaccaactggctgaccggcgagaaggcgcagggtggttggcgcaaggaaacccacggctacgattcgattccgctgtgggcgcgcgatggcagcgtcatcgtcaccaaccccggcgaaaccaagccagaccgcgtgtacggtgagaacgcgctggtctccgtgttcgtggatgatgtggagaccgccgaagccgttattacggaaatcgacggttccgccgtaaccttcaccgcgcgccgtacgccggctggcatcgaggtcgcgagctccgatggccgtccgttccgtgcacgtttgggcgcgtctggcgatatcgtcgacgttccggatggcagcgtgatgctgtgacgcgtgctgtgcgtgacgtgcgtggtgcatgtggtgctgtaacacttcggtgttgcggcaccacgcttttgtgctgatatagggatttgtgctagtcgaatccgcgaaatgttcagtaaatgttcacgtagcgaaatcggcatagaatgcgagcaaacgcataacggcacggtgctgttcctgcgtacaccaacgccaggcgaaccgccggaaagaaggggtctccatgattgagacagcggacgatatcaagacgattgcgaacgtcggcacgggaacaatgggccatgcgatcacgttgcagttcgcgctggccggatatccggtgcatctggtcggccgcagcgaggcctcgctggagaaggcgatgaaggcgatccgttctgatgccgaggacttcgccgaagccggactgctcaaggccggcgacaccgtggacacggtgctggcccgcatcaccggttacgccgactatgcgagcggcgtggcggacgtggacttcgtcatcgaatccgtggccgagaaccttgacgtcaagaagtccgtctgggccgaagtggagcacgccgcccccaaggacgcgattctgtccacgaacacctccggcctgagccccaccgcgctgcagtcggtgatggggcaccccgagcgcttcgtggtggcgcacttctggaaccccgcgcagttgatgccgctggtcgaagtggtgccgggtgaaaagaccgatccgaaggtggtggacatcaccttcgacctcatggccaagatcggcaagaagccggcaaagatcaagaaggaatcgctgggctttgtgggcaaccgcctgcagctggccgtgttgcgcgaggcgttctacatcgtccagcagggcatagcggacgcggccaccgtggacgacgtgatgaagtacagcctcggccgccgctggaacctggtcggcccgatcgccagcatcgacctcggcggactcgacgtgttctacaacatcagcacctacctgttcgacgacatggacaacggcaccggcccgagcccgctgctcgccgaaaaggtcaaggaaggcaacctcggtgccaagaccggtcagggcttcttctcttggcagggcgaggacggcaagcgcatcatcgaaacccgcaacaaggccctgctgcgtgcgctgaaggacgatgccgcggaagcgtaaagcgcgagcgacgaattctcgcgtaacgtgtgctacgatggaaggctcccttcggggagccttcgttgtgcttgcgttgttcttcggtccaacttttcgacatgcgtatacgttgttgatagcgacaattgcggaaaacgcttacagtatgatgtgcacacggacaacaagccgatgattgcaaggagcggtgacgacgatgacatccacagaacacaatacgcgagccgacatgttggcccacatgggcagccttcagcaggccgcctacgtgcgcccgatcgagtaccaggagggccgtgcccacggtctcaaggccatcgaggtgaagaacggcccgctacgcttcgtatccatggccgaccgcgccctcgacgtctgccagttcgaataccgcggcgagaacctcaccttcctgtccaagccgggcctgaacggccgcaaccagttcgacaccaacgggctggaggcgcagcgctccatcatgggcggcctgttcttcacctgcggcttcgagaacatctgcgcgccgtacgtcacgcctgagggcggcaagtacccggccggcagattcccgatgcacggccgcatccgcaccacgccggccgagcatgtgggctccgacgcccactggaccgccgaaagcgactacgtgctcgaggtctccggcgaaatgcgcgaggccgaactgttcggcgagaatctggtgatgcgccgcaagatcaccagcgtgtacggccagccgtcgatcacggtcgaggatgaggtgaccaacgaatccttccgcgacgagccgctgatgtggatgtaccactgcaacttcggctggccgttgctcgccgaaggcgccgaagtcgtgatccccagccgcaaggccaccccgcgtgacgagaccaccgcagccgacaccacgccgtggaacgaaatccaagcacccgaggcgaaccgccccgaaagcgtgtacctgcacgagctcgccgccgacaagaacggccgcagcttcgccgccgtggtcaaccgcaagctcggacttggagtcgtcatcgacttcgacgccagcctcttcccatacttcatggaatggaagtcgatgggtgcgggcgactacgtggtcggcctcgaaccctcgaactccagcgtccacggccgcggctggcacgagcagcgcggcgacctgcacaccatcgccccgcagaccagcgaacgtaagtccctgaccttcaccgtcatcgaaggcgaggccgcgattgacgggctcatcgcccgccgcgacgccctgcttggctgaattgtgagataatatcggccgatatgtgaacggctgattagcgtggggagcatggttacccgggattcggaacagtatctgcgattcaaacgggagcacacgctgccctcgcatgaggcgattatggactggtatcgcggcaccggcatgcgtccgtatctgcaggcgcttgacgacgccggccgcaagaagttcgaggccgaagtgttctcccaagtccgcgaggaataccccacacagtcggacggcagcatcatcttccccttcccgcgtttcttcttcctcgcgactcggtagaagctcgccggattcgtgtactgggcggcgcgacctgtttcccgcgccgccagctgtgggttgacctcgctactgggcttgcggtgatgccgctggctgctgcgctgcttccgattgcgatggcatttgcatatgcggtgcgatgctggggagtgtgccgtcatgcatgcactgcttcaatatgaggtctcgctgggcgatgaggtcgtcttcgatctggtcacgcacgtcgcgcacggacgagaaatacaggtagaacgtggcgtgattgtagccggcgagttcggtgatctgacgcaccgagatcttctcgatcggcttggtttcatacagcttccagaacgcctccttaaggcgattgaccgtctgctgcgtaagttgcgggttcttcttgattgcgattcgcggtatggtgatttcgcataagacgcacaaccccatcgattcgtcggtcaaattcgtgaccttctcgatgcgatgctgtcgctggtggtcacgcaggacgtgctgttggaatcccagggaaccgcgcacgcggcgcaatcctcgggactgttcggcatcgggctcggcgtggtggccgtgatcatcggcctgtggatgttgctgagacgtaagtggacggcaacggaataggaatagtgacagcggaatagcgcgcgtgatattggtacgcgacgtatcgtaaaagcggctacaatacttacggcaaaagtctttgcaacgagaaggaagacatgactgagcggcgtcgagcacggatgaggattcgtcgtcaacgaatttacgttgtacggcgcattgtggttgcggtatgcgcattgttgtgctgcgttcttgccgtcttctcgacgattgacgcccaacgggtgtggccccgcggtgagtcggtcgcacaggggcaggcagaggttcaggggcaggcgcagaaggtgagtcaatccgcgcaacagtcggcatcgcgagtgtctgcatcggcctcatccttggaccgccagcgggtaccggtctttaaccaggcgattcaggagcagcgtgacaaggaagcgcaacgtgcgcgatggacgaatcccaccggcaagcagcctgatttgtcgcaatactccgatctcagcgtgaaagtcagtatcgccaagcaggaagtgtatgtgcaatccggcggtgagaccatctacacgatgatcgccagcaccgggctcaacgatacgaccccgcgcggcaactatgttatcgggatgagaggcgatcacttctacaatcccgcagaaggcatgggtgctgattattgggtgcgattcaacggcccgttcctcttccactcggtgccgaccggggcgaactccggcgagtatatggaagaggaaggcaacaagctcggtcagccggcctcacatggttgcgtgcgactcactgtggccgatgccgaatggttctacaaccaaattccggaaggcacgccggtcaccatcgcctgaggcttggcctgagatcgatactgaggctatcgtgctttaggcgtctgatattggtcgtcggtagtgaagcaggtgcgatagaccatggccatgatcagaccgtcggccagcaaggtcagcgcggcgatggcaccgaagaccacgaactggtatttggcggcgttcagcggatctccgccggctatcacctggcccgccatcatgcccgggatggtcacgatgccgctggaggccagcgaagcggtggtgggcagcagtcccagccgaatcgacgagatgatggatgggcgggcggactcccatgccgtcgcccccaaggccagcatcatatccacctcgtcgcggcgttcctccatgctttcatagaatcggctcagcccgacagcgagcgcggaaacggtgttgcccagcagcatgccggtcaggggcaccaccagctggggcgcataccacgggtgcgggcgcacgatgagttcggtgaccaacgccagcatgagcagcatcgtgatgaccaggctcaggaagatcggtccggcaagacctttggggatgccgcgcgcgcgggatatcacgatctgcaccgccgcgaccagcatgaccgtcatcagagcgaacaccatccacacgctgttcgaacgaatcacgtagctgatgatgaatcccatggcgcacagctgcacgagggcgcggcatgccgaccacatcagggtcctgccgatgcccatgtgcatgagttcgctgacgatggccgccacggccaccatgcccaacgccagaacaagaccccaggtgtcgatgtcgtaggcgccgttcatgggcgcacctccttatcccgcgtcagatcggtgagccgtcccgcatcgagcatcagcgtgcgggtggcgcgtccgtccggcggacggtgtcggatgcggatgatcgccatgccgtgtgcggccgcgtccgccatgatcgcggccactttggacgcgttgtcgtcgtcgagtccggcgtccacctcatcggccagcagcaccttcgggtcggtaagcagcgtgcgggccaacgccacgcgtgccgcctgaccgcccgacaggtcgtgcggggcgcgcgccaggtcgatgtcctcgcagcccatcgcgtccaacgtcgtgcggatgcgctcgtcgggcagcagctgctcggccttgccgcccttgccgcgaatcgcgagcgtccagggcaggcggatcgcctcggccacgtccttgccggtcaggatcggtttttgcggcagataggagacgtcccgccgccattgctgcgcgctgaattcgtcactgcccacgccgtcgaggacgaacgtgccgtgcgcgtgcgggttgagtcgggcgcatgcggtcagcagactcgatttgccggagccggatggacccaccagatcgatgatgtcgccgcgttccatgctgaaggacaggttgtcgaacaccgtgcgttcgtcatccgccggcgattgcgcggggatgacgcaggacacggatatggcttcgaagaaggatcgcatattcatccagtctagtcgggggtcacgtgggaaaccccagcgttcacttcctgtatacccggtgtggcataatagccaaggcaatttttgggctttgcctaagctagtttgaatttgaaataggtgaataacgtggcacagactactaacgacatcaagaacggatccgtcctgaacctggacggacagctgtggaccgtcatgaagttccagcacgtcaagccgggcaagggtcccgccttcgtacgcaccaccatcaagaacgtgctctccggcaagatcgtcgacaagaccttcaacgcaggcatgaagatggaattcgagaccgtcgacaaccgcaccctccagtactcctacgaggacggcgacaacttcgtgttcatggacatgaccacctacgaccagatcatggttccgaagaccctcgtgggcgacaaggccaagttcatgctcgaaggcaccgactgcctggtctccttccacgacggcaccccgctgagcgttgacctgccgggctccgtggtcctgaccatcacccacaccgagccgggcctgcagggcaaccgctccaacgccggcaccaagccggccaccgttgagaccggagccgagattcaggtcccgctgttcatcaatgagggcgaccgcgtcaagatcaacaccgaggatggttcctacaccggccgcgagaacaactgatctccgcatcctcaacagacgaccgaccgtataaaggactaggacagcagcagtatggcacgttccaccgcgcgcaaaagggctctgaacaccctgtacgaagccgacgaaaaaagtcaggatattctcgccctgcttgacgagcgcatcgcacatcccggtgcccagaccccgcttcccgactatgccattgaaatcgtcaagggcgtggccgagcaccgtcgtcagatcgacatgaccctggacgaacactccacgggttggaaggtccgccgtatgggcgtggtcgatcgcaacattctgcgtatcgccgcttgggagattctgttcaacgatgatgtgccggacaaggtcgccatcgacgaggctctggcattggccaagaccctgtgcgatgacgattcgcccgctttcatccatggcctgctgtctgcagtgtgcaccgccaagaacgcagcaccggcaccggagtccgcggcagaagaggccgatgaggaatcgtccgattccgatgccgccgcatccgagccgaccgatgagggcgatgtttccgattcgcccgattcgtccggtgcatccgacgagcccgctgccccgtccgctgagattcagccgacggtcgattagtcatttgttgttcagcctccccattcgggaggctttttcatgggcggacacttgtgtcgccacacattctcaagtcggcaccttgccgacagccccgccagcggggtgagactttgcgcccaacggcgtgtgagtctgcgctggccgttaaccttggtacgaatacccgaaaaacataagggggttttggtgagccagaacgagtccgggaccatcgcaattccgatgtatgacaagga

SEQ ID NO: 1145 - DNA, 5268 bp, Unknown
  R81_24m  MAG No. k141_6845
ggcttgtctctcagacagctctatctacaataggtgcagattccagaaagtcaacatcggcgtgtcgtgtcattttcccacggttctaaaacgtgaatcggctcacgcagcgaggggtttggggcggagccggagtcggggtgataacgcgccataaatggccgttataggaatgccctgaaccgttatcccgaatattgacataataggaacatgcctatcaagatccccagtggcctgccggccagagatatcctcgattcggagcgcatcttcgctctggagaagcccgaggcggagcgtcagcgcgtccgcccgctcaaactggtggtcctgaacttgatgcctaagaaaatcgagactgaaacgcagctgctgcgtctgatttccaagtcgccgctgcaggtcgaaatcgacttcatgaagacctccacgcatgaggccacgcacgtttccgccgatcatctcgtcaagttctacgaaaacctcgatgcgttcaaagacaactattacgacggttttgtggtcaccggcgcgcctgtagaacatatgccgttcgaagatgtggactactgggacgagttcaagacgattctcgactgggcctccacccatgtgttctccaccatgtacctgtgctggggtgcgatgggcgcactgtactaccgctacggcatccacaaggtggattaccccgagaagattttcggcgtattcccgcagtacctgcaggacgaatactgcttcctgaccaatggcttcgacgagattgatctgcagccgcactcccgcctcgccggcgtgaacgaaaacgaggtacgtgccaaccatgaccttcagatcttgacttgggggccgcagtccggcccgggcctaatcgccacacgtgacttctccgaagtgttcgcgctcggccattgggagtacggcaagtacacgctcgccgaggaatacgagcgcgatatggccaagggcatgaccaacgtgcccttcccgaagaactacttcccgcatgacgatccgaagctggaaccgttgttcgtctggcgtgcccacgccaatctgctgtggcgcaactggctcaactgggtgtaccagaccacgccgtacgacctgaccgaggtgccgcagctcagggctgagaagaagctcggtactgatcgttcgattcggcatgagccgggcgggccgcgtgaggatgacttcaagccgtttgttcatgacggatacggggttattcagggctgagcgttcgcaccgtggacggcaatccgtccacgatacggacaacctgatgaacataatgccacacatccgccatatgcgaccaatagcgcgcgaagccggcgaaacgcccgggaaagccttgcgccagtaggcctcggaaaagactcgccggtgtaatattgactttgtctagacacaggcaaataatcactcttcagtcattcggagtcgaatgcccagcgtcgactccccgtccgcgcccggcatgctccatccgaggggcgcgaaagttacgagtacgtcacattcgcacatctcttgggtttaaactgacacctgatattgaagaagcaggaggcgtgatatggtcggttcgctcggcgcaggattgctgttggctgacgaggcaggcgctcatctgccctcggttggtgacttccttcccccggagattctgttccagggaactccgtttgctatcaaccgcattattttgattcgtatcgtggcaaccatcgtgctgttggtggtgctcggcgtgaccgcaaagcgcgccaagctcatccccggccgttggcagggcgtggtggaatacggtcttgacttcgtgcgtgacaaggtcgtctatgacgtgatgggcgaggttcgcggcaagcgctacgtgccgatgatcaccaccatcttcttcacgattttcatcttcaacctgtgtggcatcatcccgggtatgaacatggcggccaccgccactgtggtcatgccgctggtgttcgccatctggaccatggtccagtattggatcgccgccgcacgttcgcaaggtcttggccattatctgcgtcacgagctgttcacccccggtgtgccgtggccggtctacatcctgttgaccccgattaacatccttgagttgctggtcatccgtccggcctccctgaccatccgtctgttcgccaacatgatttccggccacctgatggtcgccacctgcctggcattcgcacagtactggatcgtcgatgcagccaacaagctgcaaggcatcccagtcggcgcgatgtggttcgtcagcggtcttgccatgacgtgcttcgaggcgttcgtcgccttcctgcaggcttacgtcttcgccattctttccaccgtgtacatcaacctaagcttcccggaggagtgaggttcaaccccctctttcggaacccggcctcgcctaggtaggcaggaccgaacgaaataagatttataacgtcgccaagtacgttagaaaggaaacacaatggatatcatcaccctcgcagcggtcgccggcaacctgtccgtcatcggttacggtctcggtgcggttggccctggcatcggtctgggcatcctcttcggcaaggccatggaatccaccgctcgtcagcctgagatgtccggcaagattcagaccatcatgttcatcggcctggctctgatcgaggtgctggcactgatcggcttcgttaccgccctgatgttccactgatcgaacgttttctcagtcgaatacagaaggcaaaacgaatccaccagtgaaaggaggacttcataatgacgctcgcagaaggcggaattgatctgttcattcccgagacctatgacattgtgtggtccctgatcattcttgtcatcgttgcggtgttcttctacaagttcttcatgccgaagttcaatgcgatcttcgacgagcgcgccgccaagattcagggcaacatcgccaaggcggagcaggctaagaaggacgccgacgaggccaaggccaagtatgaggcccagctgagcaccgcccgtgtggacgccgccaagattcgcgacgacgcccgcgcagaagcgtcccacatcatcgccgacgctcgttcccgcgccgagtccgatgcggcccagatcaccgcatccgcacagcgctcgatcgaatcccagcagcagcaggccatcgtctcgctcaagggcgaggtcggtgctcttgccaccgcgcttgccggcaagattctcggtgccaagctggaagacaacgacgtgcagtcctcgatgatcgattcgatgatcgacgatttggacgccaagaagtgaccgtgaccattcgtaaccagaaagggaggtgaccatgcgaggagaggcatcacgtattgcagaccgcgagtcgcgtgattcgctggccccgaaactgcgcgacacccgtgaggacgcgtggcggatcggcaacgaactgttcacgatcaccaaggtgctcgatgacagcattcagctggaacgcgcactgaccgacccgtcccgcccggttgccgacaaggtggccgtcctgaaggaactgctcggtgacaacgcgcatcctatgaccatggagatcatgaccgacttggtctcccgccgttggagccgtgcgcgcgacatcgccaacgcggtggaggacttcggcgtggacgccatgatgtactacgctgacgccaccgacgccacgctgcaggtatccatcgagctgtccgagctgcattccgcactgctgaacctgccggtcgtccgctccaagctgtacgactgccaggccaccagcgaggcccgtgtgaagctgttccgcgaggtgttctccggcaagaccctgaacaaggtcaccatgaggctcgccgaacacgccacctgcaacctgcgccgccgccgctacttggagaccatccagtggctgatcaacaagttctcccgccacatgggcgagtcgatggtcaccgtgaccaccgccaccccgctgaagaaggagcagattgagcgactggtcgaggtctactccgccaaggtgggccgccaggtgcacatcaactcggtggtcgatccgaccgtactgggtggcatgcgcattcaggtgggcgacgaagtcacggacaacaccgtggtcgcacagctgcagaacctgcatcgcaaggtgcagacggaggcgactccggcctgaccggccgagccaatccgtccaacaccacacacaagcaaagacttgactgaacaataaccaatagaaggagtgatcatggcagaactgaccatcgatcccgcctcgattcgcaaggccctcgacgacttcgtgtcgtcgtacaagccgagcgacacccccacccaggaagtgggctatgtcgccacggccggtgacggcattgcgcacgtgacgggattgcctggttgcatggccaatgagctgctgacgttcgaagacggcacgctcggcctggcgttcaaccttgacgcccgtgagatcggcgtggtggtcctcggcgatttcgcaggaattgaggaaggccaggaagtgcgacgcaccggcgaagtgctctccgtgcccgtcggcgacggctatctcggccgtgtcgtggacccgctgggcaagccgatcgacggcctcggcgagatccagggcattgagggtcgtcgtatcctcgaagcccaggcccccgacgtgatgcaccgccacccggtcgacgagccgctgtccaccggcctcaaggccatcgatgcaatgaccccggtcggtcgcggccagcgccagctcatcatcggcgaccgccagaccggtaagaccgccatcgcgatcgataccatcatcaaccagaaggccaactgggaatccggcgacccgaagaagcaggtccgctgcatctacgtggccatcggccagaagggctccaccatcgcctcggtgaagcagagcctggaagacgccggcgccatggagtacaccaccatcgtggcctccccggcagccgattccgctggcttcaagtacatcgccccgtacaccggctcggccatcggccagcactggatgtacaacggcaagcatgtgctcatcgtcgtcgatgacttgtccaagcaggcagaggcctatcgttcgatttccctgctgctgcgccgcccgccggggcgtgaagcctacccgggtgatgtgttctacctgcactcccgcctgcttgaacgttgcgccaaggtctccgatgacctgggcggcggttcgatgacgggtctgccgatcgttgagaccaa

SEQ ID NO: 1146 - DNA, 7432 bp, Unknown
  R81_24m  MAG No. k141_7583
acgctgatcggcgcgtcgtcgggttccctgacggtgtcggtgctgcagctgctcggcgcgcgactgctgaccggtgcctcccgcaatccgctgctcgcaccgttcgcggcgttgatcggcgcgctggtgtggttcaatctcgtcgcccaggtcatcatgctgtgcgccgccctcatcgcggagtgccgacgggaatgctgaacagccgcccagaccacacggtatggtggggcgcatggctgattacgggaacaactttgtgcaactgcataaccacacgcactattcgctgctcgatggtgcgtcgaagattcctgatttggccaagcgtgcggccgaacttggcatgcctgcggtcggtatcaccgaccatggcaacatgcatggcgcctacgagatgtacaccaactgcgtggccaatggcgtcaagcccatcatcggcatcgaagcttatgtgaccccggaaaccgcacgtcaagacaagtcccgcgtgcattggggcaccgaagcccagcgccgcgacgacgtctccggtggtggtcttatcacccacttgaccatgtgggccgaaaacgacgaaggcctggtcaacctcatcaaagcctcgtccgtggccaacctcgaaggtcgcgtcatgcgctacccgcgtatggataaggaggtgctcgccacctattccaaaggtgtgatcgcctcctccggatgcccttcgggcatcatccagacccgtctgcgcctcggtcaattcgaggaggccctgcgcgccgccggcgaattccaggacatcttcggcaaagacaacttcttcatcgaactcatggatcacggtctgacaatcgagacccaggtcaccaacgacctgctgaccattgccaagaagctggacgccccgctgctggccaccaacgattcccactacgtacacgccgaagatgcacaggcgcaggacgccatgctctgcatcaactccggttcccgtcttgacgatccggaccgattcaaattcgacggcaccggctactacatcaaaaccgccgaagagatgcgcgaactgttcaaggaccatccggacgcctgcgacaacaccctcgccatcgccgaacgctgcaacgtgatgttcgacgaccacgaagacggcgcgttcatgccgaaattcccctgccccgaaggctgggatgagacctccctgttccttaaaaaagtcgaggaaggtctggagaagcgttacgacggcaacccgccgctcgacgtattgaagcaggccgactacgaatgtggtgtgatctgccagatgcagttctgcggatacttcctcgtggtcgccgactacattcagtgggccaaggaccacggcattatggtggggccgggccgtggctcggccgcaggcgccatggtcgcctattccatgggcattaccgagctcgatccgctcaagcatggcctgattttcgagaggttcctgaaccctgagcgagtgagccttcctgatatcgatgtcgacttcgaccctgaaggtcgtgcgcgagtcatcgaatactgcggcgaaaaatacggcaccgataaggtcgcccagtgcgtgatctatggcaccatcaaaaccaagcaggccttgaaggactccgcccgcatcatgggctacgagttctcggtcggtgaaaaagtcaccaaggcgctgcctcccgcggccaccggcggcaaggatatcagcctgcatgacatcttcgacccgacagccaaacgctacgccgaggccagggaattccgagaactctacgattccgacccggacgccaagcgcatcaccgaagaagccaagggtatcgaaggcctgatccgacagaccggtgtacatgcctgcgccaccatcatgggtagcgcgcccatcaccgacacctcgccgttgctggaacgcaccgatggcaccatcaccaccaccttcgaataccacacgtgcgaaacgttggggttggtcaagatggacttccttggcctgtccaacttgacgatcatccacgacaccctgaagaacatcgaggccaacggcaaacccgccatcgactacaccaagattccgctcgatgacgccgaaacctacaaactcatgtcccgaggagacacgctcggcgtgttccagctcgattccgacggcatgcgttcactgctgaaaaccctgaagcccgataacttcaacgatatttccgcacttatcgctctgtaccgaccgggcccgatgagtatggattcgcacaccaactacgccaagcgcaagaatggcctgcagaagatcacgccaatccaccctgagcttgaggaacctctgaagcaggtgcttgacgagacctatggtctgatcatctaccaggagcaggtgcagtccgccgcccgaatcctcgccggctattcgctgggcaaggcagacgtgctgcgtcgagccatgggtaagaagaagcccgaagtgctggccaaggagaaggtgccgttcttcgccggtatgaaggagcacggatattccgaagaggcctcccaggccgtgtgggatattctggtgccgttctccggctacgctttcaacaaagcgcactccgccgcatacggtctgatctcctactggaccgcatatctgaagacgcactacccggtcgaattcatggccgccctgttgcaaggtgccgccaccaacaaagacaagaccgcactgtacttgggcgaggcccgccgcatgggcatccaggtgctctcgccggacgtcaacgaatcggtgtacgagtactcggcagtcggcgacgtcgtccgattcggtcttggtgccatccgtaacgtgggtgacaaggccgtggccgatatcatcgccgaacgcgaaggcccgcgcggcaagttcgtgaacttcatggacttcatccgccgcgtgcccctgaccgcgctgaaccggcgattggtcgaatcgttgatcaaggccggtgccttcgactcgattgacccgaaccgtcgcgcgctgttcaccgtgcacgaggccgccatcgactcggtggtgagtctgaagcgcaaacaggcggagggccagttcgatttgttctccgatgccgaggatgggggagcggaggccatgggcgacgcttccgtgaccgtacccgatcttgaggaatgggacaagaagaccaagcttaacttcgaacgcgaaatgttgggcctgtatgtgtctgaccatccgctctccggtatgcagtcgattctcgcgtccttgcgtgaaatgtccatcgcgcatctggttgatcgagccaaaacgatgggtgaaggacagcaggtcacgttggctggtttggtcaccaatgtggaccggcgcgtatccaagaagggcaacccctgggccatcgtgaccatcgaagacatggaaagctccatccaatgcatgttcttcggcaaggtctatgaagcggccgccgccgaactcgccgtggacgccatcgtacagattcgtggccaagtggagttgcgcgacgaaaccgtttctctgagagccacggaaatgcagattccgaccttggaagccgaggatgaacgtccgttggtcatcacgctgccgccggtggcgttggagcgccaacgcatgatgcaactcggtcaggtgctcgctaatcatcctggttactgcgaagtacatcttgcggtgctggatgagaagggtaacgctcaggtgctcacgtttggcgatcgtttccgcgtcaagcgggatacttcgttgtttgctgagatcaagattctgtttggccccagctgcttgcctgccgcctgattggcgggtttcgcccctggcctctccctcatctggctttgctggggactccttcatcagagggagctaaggcatgtgccaccgtacgatgtgcgcgactattgtggaacgtatgggcatggagatggcggatactggtaacaacgatgacgagcgacaatggattgccgcgatgctggaacggctgtctcattcgcagttccgcgccaaattcgctttgaccgacaaagaacgagcctatgcccgcaccaaaggcaaggcgaccatcgatcgtcatgcgcgagaaatgttgcgagaccgcataggcgcagccgaaccgaagaacgacggcaggcagacgccatggcgcggccatccggtattcaccgctcagcatgctaccgccacatgctgccgcggatgcatcgaaaaatggcatcatctgcccaaaggccgtgaactcaccgaagcggaggtaaaccgacttgccgatttggtcatggcatggattgagcgggaccttatcaatcatccggttcggtgaagcacccagcatcctcagtatgcctgtatgccttcaatagttatgagccaacagccaacacaggcctcgaaaaccgtagacgcaaggtattggcgaatacggcagaacgccgaacgttgcctatggcgtgttcggcaataatgtgacatgatgtctattcaagaagagttgacgaagcgtcaactctaccccaaggaggcggaatatgtactacagcagcggcaattatgaggctttcgcacgcccgaagaagccggccgacgtggacaacaagcatgcatacatcatcggtaccggactggcggcattgtctgcagcctgttatctggtgcgtgatggtcagatgcctggcgagaacatccacatccttgagaaggacccggtacccggcggcgcctgtgacggtcttgatattcccggcctcggctatgtgatgcgtggcggccgcgagatggacaatcatttcgaggtcatgtgggatctgttccgctcgatcccctccatcgaaaccgagggcgtcagcgtactcgacgagtactactggctcaacaaggaggacccgaactactcgctgtgccgcgccaccaaggacctcggcaaggacgcggggctcaagggcaagttcggcctgtccgacaaggcttcgatggaaatcatgaagctgttcttcaccccggacgaagacctgtatgacaagccgatcaccgatttcttcgatgatgaggtgctgaactccaacttctggctgtactggcgcaccatgttcgccttcgagaactggcactccgcgctggaaatgaagctgtacatcaaacgctacattcatcacatcggcggactgccggacttttccgcgctgcgtttcacccgctacaaccagtacgagtcgatgattctgccgatggtcaagtatctggaatcgcatggcgtcgaattccgctacaacaccaaggttgagaacgtggaattcgcgattggcgggggagccggccccaagcgcgagcacaccggcgtaggccaggacaccatccaaaagattcaggccacctccggtttcttcaagcgcaaccctgccagcacgcccaccaagaagcttgccgtgcgcatcgacgtggatcacgagggtgataaatcctccatcgacctgaccgagaacgatctggtgttcatcaccaacggcggttgcgtggagaactccaccatgggttcccagaactcgcccgccgtatggaacccagacctgaagcccggcggcggctgggatatgtggaagcgtatcgccgaccaggacccgagctttggccatccggagaagttctgctccgatccgaatgccaccaagtggatgagcgccaccatcaccaccctggacggcgagattccgccgtacatccagaagatttgcaagcgcgacccgttctccggcaaggtcgtcaccggcggcatcgtcactgtgcaggactccaactggctcatgagttggaccctgaaccgccagcagcagttccgcgaccagcccaaggaccagctgtgcgtatgggtctacggcctgttcccggacaagcccggcaactatgtgaagaagccgatgaccgaatgcaccggtgaagagatttgcgaggagtggctttaccacatgggcgtgccgaccgacaagatcgaggcgctcgcaaagcaccacgccaacaccgtgccggtcatgatgccgtacatcaccgcgttcttcatgccgcgcgcggccggcgaccgcccggacgtggtgcccgatggtgccgtgaacttcgcattccttggccagttcgccgagaccccgcgtgacacgatcttcaccaccgagtactcgatgcgcaccggtatggaagctgtctacacgttgctcggcgtggaccgcggcgtgcctgaagtgtggggcagtgtctatgacgtgcgcaacctgctcaacgccaccgtcaaattgcgtgacggtgcaccggtcaccgatatgaagctcaacttcattgaaaaggccgtggtcaagaaggtgctcaagaaactcgacggcaccgatattgccaccctgctacgcgaataccacgtaatctgacatccatccggctcccctcaaggtgaggggagccagcacgcgaagcgtgactgggggagttgctcacaacggagtgttaagagaaagacaaaaacatgactgattctgatccccagttaatccgccacgccaccatcgacgatctggacgcgctggccgccatggaattcgaatgcttcccggccgccgaggccgccgaccgctcgtccctgcgcgcccgaatcgagacctatccggaatgtttctggctattgattgatggcgagatcgtcatggcgttcatcaacggttttgtgaccgatcggcgcgacttgaccgatgacatgtacgaggatgccgcgcagcacaaccctcaaggtgactggcaaatgattttcggcgtggatactgcgccgaagtatcagcatcgcggttgcgccagtacactcatgaggaaagtcattgaagacactcgtgcagccggccgtaaaggcctggtgctcacctgcaaagatcgattggtcggattctatgcgcgattcggatatgaggacgagggcatttccgattccactcacggtgacgtggtctggcaccaaatgcgcctgaccttctaatccccttttggcttccctctttgatgctgggtcgtttaaaaaacagtccggtggactgtttttttagacgaaggcgagacgatagtcgagccataagggcgcgagctttgctcgtccgtaattgcgggtgagctgtccgcgtgatcggactgaggggagttgaacgtggaatgaattgttgcgacacgccggtgaacatctgatttcgttacgtgagcccataaaaagccggcgtatcctgatggtaacggcgtgattcaagctgatttcgacacgccgatagaacgccgtcgttgcaacgatttgggcttatcttcgtgcgcccgatttgcgcgagtccgtgaatgcgtgtaagttatttccttgctgccgctcagcgagtggttctcctccggggagctgcgaggtgggtgagtggtggtggtttgagaactcaa

SEQ ID NO: 1147 - DNA, 2849 bp, Unknown
  R81_24m  MAG No. k141_7675
cggctcggcatacggtgccatgagcaccgtagactcgctcggccatgtgccggtgtccgtggccatcgacgatcgcgatacccataagcatgagggcgacccgcagcacccgcatgtgccgtggcgcaaaaccgtcatctatgagatgcacgtcaaaggcttcaccgccaacgcaccgtggctgcccgaatcattgcgcggcacgtacgccggactcgcacaccccaccacgctcgcctatctgcagggtctaggcatcacatccatcgaactgctgccgattatggccaagcaggacgagctcttcctgcaagaacacggccgcaagaactactggggctactccaccctcagctacttcgcccccgaaccctcctatgccaccaaagcagcccaagagaagggcgcggccgccgtgcgccaagaagtcatagacatggtgcgcgcgctgcacgaggccggcttcgaagtcatcatggacgtggtctacaaccacacatgcgaaggcggcgtcgaaggcccgacggtctgctggcgcggcctcgacgacctggcctactatcgccatcaaaaatccaataccggtcgactcgaagacaccaccggttgcggcaatacgctggacttcaccaacacgcatgtggtcacctttgccatcgactcattacgatactgggccaagcgtatcggcatagacggtttccgtttcgaccttggcgtcacgctggcccgcctggaaggcgaattcacccatcatcacccgttcctctacgccctgcgttccgatctgctgctgggcaacctgaagctcattatggagccgtgggatctgggcaacctcggctggcgcaccggccaattctccgtgccgttcgccgaatggaatgaccgcttccgcgacacggcccgcaccttctggcttgaggatgtggacggcggctccgatttcggtcgtatcagtttgcaggagatggccacgcgactctgcggctcggccgatctgttcgccaccgaacccgggcgcggcgctccggcctccatcaatttcgtgtcctgccacgacggtttcacactgacggacctcaccagataccgctccaagcacaatgaagccaacggcgagaacaataatgatggctcgtcggtgaaccattccgccaatttcggcgtcgaaggcgtcaccgatgatccagacgtcatcacggcacgcgaacaggcggccatgaacatgatcggcatgctgctgctctcgctgggtacgccgatgatgctcgccggcgacgaattccgcaacacacaggacggcaacaacaacgcctactgccaagacaacgacatcacgtggctgaagtgggattggatgtattccaccaacaagacacgcgaaatgcgtcgcctgaaaaccgtgtctcgactggtggcgctacgtaaatcactggacctgtatcaccacgaggacttcttcacccgactgacccaactcggcctactcaagccctcaagccgcgtgcagtggttcctgcccgacggcaccacgccgatggagcgtgactggttcgatctgggcgtacgtagcttcaccatgcgattgctgtccaacagtgaggtggacgtgtgcattgtggtcaacggcaccgctgacgaccgcacattccacctgccgccagacactcactggacgcctaaatggtgctcggccgaaatcaacggccgccgagccgggcatggcattcaggtcgaggaatgcgatttgaacgatgacaccaccgtttggacgcagcatgtaccggacgccagcgagacggtacgcacgctggtcgaagaagtggccatgcagcgcacggaatcctcgactgaggatgaagcggataccatcgaattcgcgatgccagcaacggatcacgccgcaaacggcacctcgtccgcgcctcgggatgaggtatcagctgatatgcctgatgcccctgtggatgatacgccggacactcccgtcgacgacaatgtctggaccatgccggcgctgagcatcacgctgatgaaacaggtgtgagtcacactcaaaacagcacgacacaaacacaaaggctctccgcggaattccacggagagcctttgtatgctcggtacaggacaagcgaaattaacgcttggagaactgcggggcgcgacgtgccttgtgcagaccagccttcttgcgctccacgacgcgagcgtcgcgggtcaggaagccagccttcttcagggcggcgcggttggcatcacgatcgatggcgttcagagcgcgggcaacgccgaggcggatagcgccggcctggccggtggtgccgccgccgtcaacgaggacgatagcgtcgaacttgccttcgagcttgagcagaacaatcggagagttgacctcacgctgcagcaacttggaggggaagtactcctccagggtgcggccgttgatggtccacttgccgtcacccggaaccagacggacacgggcgacagcctccttgcggcgaccggtgccgtagcccggctcgatcgcggaggtgccggtgccagcgccagcgttggtctcggtggtgtagttggtgagctcctcttcggtctcgacaacctgggagtcgttggtgttttcagccatgattcttatctcctctcaggtttcacttggcctgctgcgagacctgggcgatctcgaagacctggggcttctgcggggtgtgcgggtgctcagcgccgcggaagatacgcagacgatcgagctgcaccttggccagacggttcttcggcagcatgcccttgacagcttccttgatgatgcgctcggggttcttctcgagcagctcggcgtaggagtc

SEQ ID NO: 1148 - DNA, 17771 bp, Unknown
  R81_24m  MAG No. k141_7699
gcaccggcgccggagccggagccggagccggagccggagcgggcgccggagcgggggtcaccggagtagacggcgtaccgccctggttaccggtatccacccggttggcggcgtcctgctgttccttctggtactgacgattgtaggaatcgacctgggaagcgatcagtacggtctgggccgcctgcttggcggattgggaatccagactgtcgatcatggaagacagttcgtcacgccttgtttcgccctcctggcgtagcttgtccaaagcgtcacgttcgctttgcgcggtttcggcggcggtctgtgcggaagcggccttctcatcggactgggtcttgagcacagcgatctgcttttcgatggccgccagacgttcgccacggttcttcgacgtgctcagtgaggtcgcggcggaggaagccgcattcgcctcgttgcgggacaacgcgtcccgggactgcatggagttgacgaagtcctgtgtgctggtggcacccgtcaccacgctcatcacgtcggaagcattcgagccgtgcatctcgtcacgggccagctgggccacggcggcgtgcgcgtcatcgtagtccttgccggtctgcttgatccgctcctcgagcgtctccttgtctttctgcgcggcggaaagacgtttggatgcggcgtcggcctcgtcctgagcggtggcggcatcctcgttggcctgcgtgaccttggcctgcgcggcgacaatcttgttgttggtcagatcgtccagctcaagtaccttattcgccaggtcctggctggcaccggccagctgctgcttgagttcggcctcgcgctgtaccgacgcggcgtgctggttctgcgcattgatcaggtcggaataggtgtctgcctgggcaggctgtgccgagctgaacgccagacctcccacacaggctgcggcggccaccagtgccgccagtgcgggcttgatcacacgtacgttcgtcatatgtgaatagtcctttcgctcacttaagccaataccataacatgcgaacctgagaggcttgcacacgatgtcatcacatttctcgcgggtaagccggtcgcgttacgccctcaaataacgccgcaacgagatggttgaagcgatgatggacagcagtatcgcgcccacaaccaggaacggcgatatcaccagtaccgtgagctgattcacataaggaatccatgtaacggatttcgccagccagccggtgacgaacacgttgacgatagccgaaagcatcaggcacgagagcaccgagccgatcagcgaggcgatggtgccctccagaatgaacggcagacgaatcgtccagttcgaggcacccacgtacctcatgatttcggtttcggttcgtctggatgcggcggacatacgaatggtggttccggtcagcaggatggcgaccaccaccatcacgccggcgagcacagccgtaaccgccgtggctcggttgagcacggcgaacaccgggtcgaagatctggcgctggtcggtgacgtcctccacgccctccttgccggagagcacttcggagaccacctgatatttggtggggtccttgagcttgagccagagggagtcctgcatatcgtccgcggtcagcgtacggccttggaattcaccgttcgggtactgcttggtgaaggtgttgtcgtagaaatcctgcttgctgacatagtcgatgttggagaccacgtcgttgagttcatcgcgaatggttttctgcagtgccgtgatctcattggctgagggcgatttgccggaagcacagttcgcggactggctggtgccgtcgggacatagccacaccacgacctcgaccttgtcgtaccagtcgcccttggctttggtgatctgcgcctgagtaagcaccgaagcgccgatgaacaggaatgagatgaaggtgaccagcgtcagcgacagcagcatcgacaggttacgggtgaggttggcccacgtttcggacagaatgaatcgtgctcgcatgatgatcccccttactccttcgcgccctcagcgggttgatcgtcggatgtttggtctgcggcggactgctcgtcggcggactgctcgttggccggcggtgcgggtggttccggcggtgcgggcggctccggcggggccggcggctcggcggcggatgacacggacgtatcggcaaccgcggcggtcgcggcggactcgtccttgaacgggtcgaacgcctgggtgctttccagggcggcggcctgctcatccaacgaaatgcccttgccccaggtcagcgtgtcttccagcggcgcaaacgtctcgccatagcggccggtgcggccggaatgcacggaattggccaaacgggcgatgccttcagacggctcgtcactgccctcgatggccttggtcgccgccgccagcacatgatgggcggtgtcggacttggcttcgacttcggcatccgggaagaacagggcggaatcgtaggagccatgagcctcgtcacgcacgatcttgccgttgtgcagttcgaccacgcgcttgcgcatcgagttgacgatctcttcgttatgcgtggccatgacgatggtggtgccggtgcggttgatggcgtccagcacttccatgatgcccagcgaagtggtcgggtcgaggttgccggtgggctcgtcggccagcagaatctgcgggtgattcacgtaggcgcgggcgatggccacacgctgctgctcgccaccggagagctcatgcggatagttcttttccttgccggtgagccccacggtattcagcaccttgggcaccaacgatttgatggtggaccgccgcgtgccgatcacctcaagggcgaacgccacgttctcccatacggttttgttattgagcagcttgtaatcctggaacacgaagcccagcgaacggcggtactgcggcacttgacggttggtgatgcgccgcagatcgttgccggccacgcgaatctcgccgctggtggcctcctcctcgcgcaacagcaggctcaagagcgtggtcttgccggagccggacgcacccacaaggaacacgaaatcaccgcgttcgatatcgaggttgatgtcgtcaagcgccggtcgggtgcctttgggatagatcttggacacattgtccagtgagatcagtgccataatgctgtttactcctcggtttcggcggcgcggcgctgttcatggcgccagcggatgccggcctcgatgaacgcgttgatgtcgccgtcgaacacggcctgggtctggctggtttcgtagccggtgcgcaggtccttgaccatctggtaggggtgcagcacgtaggagcgcatctgatcgccccagctggccttgatgtcgccggcgagctccttcttcttcttggcctcctcctcgtggcgcagcacgagcagtcgggactggagcacggccatggcggaggcacggttctgaatctgcgaacgctcatcctgcatggtcaccacgatgccggtgggaaggtgggtgatgcgcacggccgagtacgtggtgttcacgccctggccgccggggccggaggagcagtaggtgtccacgcggatgtccgtatccggaatgtcgatgtgatcggtggcctcaaccagcggcaccacttccacggcggcgaagctggtctggcggcggccctggttgtcgaacggggagatgcgcaccagacggtgggtaccgccctccacggacagtcggccgtaagcatagggggcatccacctggaaggtggcggacttgatgcccgcctcttcggcgtaggaggtgtccatgaccttggccttgaagccgttacgctcgcagtagcgcaggtacatgcgcaacagcatctgtgcgaaatcggccgcgtcgacgccgccggcaccggagcggatggtcaccacggcggaacgttcgtcgtattcgccatcgagcagggtctggatctccatctggtcgagatccttctgaatctcgccgatttcgctttgcgcctcgtccagagagtcctggtcgccctcctcgtggccgagttcaacgagcgtttccacatcgtcgatgcgctgggaggcggagttcagacgcttcagctgcgattccgcggcggacagccggctggtgatcttctgggcgttttccggatcatcccacaggcccggggccgcggcctgcgtttcgagatccttgatatcggccttgagccggtcgacgtccagcgccttggcgatggattcgtatttggcgcgggcttcgccgatcgcctgggtaaagtcaaattctgccatcgtggtttaccttactgttggttctttgagattctttgggaagtcacgtccttgttgacagccttcgcacattcctctggcgttggcgggcattgccgcgccacacacgcatccgcctgcaatccatgctgccagaaggttccgggcctgccttgccgatagccggccgggcgacctcacaaatccctcgcatcagacgtgttcaactgcgggcacgaatatgcgaaggcaacgtcaaagccccgcgtaaatcgccgggatgatcagggagccgagcatggccacagctatgacgacacacaccacacgcacgatggtgcggcggcggttctcacgctgctgtcggccgtcctgatagttactcacgagaccaatagtgtactcaccgcttacgaccgcaggacttgccgccgacgccagccctgccggcgggcccccacggccctttcctttgcgctttcagcgccgccagatggtgtttcatggccaccagcatgatgtgcgaatcctcaaggcccaagtggcgttcgttgtgggcggaatcaagcgcgccctgacgtttggcgtaggcgtcgagcgtgttgtctccgtaaggatgctcgttggtgggtaccgcgccggggtcccactgccggctcatcggcagggtatcgatgatggtgatgcgcccggcacggtagctttccgcgtatccggcgacgttcagcatgaaccagctatgttcgaaggtggcgttatgcgccacgtacggctgctgggtaagccgcgcgagcaggccggcctgggcttggggccattcgtcgaagagtcggtacccggcctcgctgctgcggccgcgtacatcgatgccggtgagtttggcgatgagggcgttgccgagcgccgcgttttccggcggcacgccaaaagcgagacgggactggccgtaggcgtcgccggcggcgtaatagccctgctcataggcgtatgtctcaggttcgccggccgggcgcggactggccatgttcatgaactcgaagccgacgtcgatgatgtagtcacgcgccggatcgatgccggtggtttcgatgtcgatgcccatcaccgcgtccacgtcgcggccgggcagataggcgtcgcgccagtcgggcttgggatggtggccggtagcgttgccagacgaggcggcaccacccggcgaagtcgcgccggagagattggcgcgggccatcgccgcatcgcccgcacgctcctggaagcgctgggccttacgtcgttcggcgcgtgcgtcaagaatcgccgccgtacggtcttggatatcgtccaaggcgactgttgtggggaacttgacatcgctgttttcggcagcagtgtttccggcagatgcgtcaccggtttcaccgctcagattcagcatgccttggtcatcgttcgatgggcggctgccggagtacggcctgagcacggcaacggtagtcctcccccgccgttcgcgactgaccacccataggtgttgctgttcgcccagatgcaacagcgtgttgatgttgtcgttgagccgacgattggcgtaggcgagcgcgcgaggcagacgataggagccgatgaatcgatcgtaatcggtcatgaatgtgctgttgcattgggcgatgattgattccagatgctcgcgtgtggcgtaatcgatcttcaatgcgtcgtggatagcttgtggcgtcagttccggttggtccaacccgagctgaggctgtgctgcggtttcgccatattgctcaccatctgcagcaagcgccagcaatacgctgatgccatgcatcaggtccagcgaacgcacccagtcccagtcaatggtggtgccgtcggcgtctttgggcatggacgccgcccattggggaatgtctcccttggcggcgtccagccatgtgcggtcgatcatagtgcgaagccgagttcttcggcggcctcggtgggtaccgggtcgtcgcaccaataatcctcgaggttttcggtggtggtcagcgaacggatttcggcgcgatcgatatacagttcgccgctcaaatgatcggtctcgtgctggaagatgcgtgcgggccaaccgtgcaacggctcgctgtggtgcttgccgtcttcatcatcccattcggcggtgatgtcgagccaacgcttgcgcacggcctggtatccgtcgaagctcaggcagccttcgtagaacgaggcggttttgtcgctggtgggtttgtagctcggattgatgatcacgtggaaggggaattccgcgatttcgcgcggatcatcctcgtcgtcgcgcacgtggtcttcgaccacggcgagcgcgagccccaagccgatctgggtggcggcgagccccacgccgggcgcctccagcatggtggtgtgcatcgtatcgatgagtttggcgagcgtacgcttggaaagctggccatggtaggccaccgtccgttggcgcaacaccggttcgccggcctgcacgatgggcaggagcttctccttgccgccggttttgatgagttgttcgacatcacggttgagttcgaggtcgactttggcgttctttccaaacattgcttttccttagggaagggtgctacagcgcgagttcttcggcgacgatcttggcgaggcgggtgcagacttcgtcggcgtaggcctgggtggcggcttcggccatcacgcgtacgagcggttcggtgccggaggggcgcagcagcacacggccggtgtctcccagcagttcctcctcgcgggccacggcatcctggatgcgcttgttggtggcggcggctttcttgtccacgttcggcacgttgatgagggtctgcggcagctgcgggaagtcggcggcgagctccttcaggctcttgccggacttgacgacctcgttgcacagggtcagtgcggtcagggtgccgtcgccggtggtggcgaattcgcggttgatcacgtggccggactgctcgccgccaagcgagtaatcgcccttgagcatttcctcaagcacgtaacgatcgcccacggcggtttccacggtcttgatgcccatgtctttcagggcgagcttcagaccgaggttgctcatcacggtgaccacgagggtgtcgtggttgagcttgccttcgcgctgcttggcacgggccagaatgcccatgatctggtcgccgttgatcatgttgccgtcttcgtccacggcgaggcaacggtcggcgtcgccgtcgaaggccacgcccatcacggcatcggtggccttgaccatggcctgcagctgctcggggtgggtggaaccggcgttcttgttgatgttgtagccgtccggcgaggcgttgatcacgattacatccgcaccggcacggcgcagggcttcgggagccaccacggaagtggcgccgttggcgcagtcggccacgatcttcaggcccttgagcggcttgggctgggttttgtcatcgttcagcggagcgatggtggccaccagatgatcgatgtacaggttggtggcggtggtctggtcgtggctcacgcggcccacgccggcaccggtcgggcggtcccagtcctggccgagcacggcctcgatgtcgtcttccttctggtcgggcagcttgaagccgccgcgtgcgaagaacttgatgccgttgtcgggcatcgggttgtgggaggcggagatcacggcacccatttcgacgttgagcacggaggtcaggtaggccacgccaggagtggggatgatgccggcatcgatcacgtcgaagccgccggcggccatgcccgcggacagggcggaagccagaaaatcaccggacacacgggtgtcacggcccacgagcgcgcggcggcgtccctcaggctgatcgtcttgggtgccggcgtcgccgagcacacgcacggcggcatcgcccaaatccaacgccagacgtgcggtcaaatccctattggccagtcctcgaacaccatcggttccaaacatcttcggcatatgaagttccactccttgtatcgcgttacccgcaccatcgtagtcgttgtgctccaccctaggacccgactcggcaaaaaacgccacggaatctgctctaggaccagacaatggcattcccgatacccgcaatgtgtgagagaatacaagaatacagtagacctttgggagtttattgagaagaggaagcaccctatggcatcgtcgcatcgccacacgcccgccggaccgtccatgatgccggcaccgccgcgcatagcaccacacgttccggcgccaacgcccgtaccttcgattgcgatgggagtgccagccaatcagccctcgccttccgcatcatccccgcgcgtggccatcactgtggtgtatggcaaacgctccgcgaaactcaatgttccgtcgacacttccggtagctgaactgctgcctgatatcgccaagaaactaggtgtgttcgatccgactctggtgtatgccggctaccgactgacccgtgacgacgaaaccgccatcaataatcccgcttcgctggccgatcaggccatccgagacggtgaacgtctcaaactcgaggtcaacgccttgggcgatcaggatatcgtctacgacgatgtggttgaggcggtggccgattcggtggagcgttctcatcgaccgtggaccagtgccaataccacagtgaccacaatggtggtcagttgtgtgctactgggtgtcggagcgatttgtctggcattggccccactatccatcatcaatgctggcgtagcgggcattaccgcagccgctttactggcgattgccacggtactggcttcgcgccatatgcatcggcaggcactggcactgtcgctagtcgcctcgcttttggccggcgtgaccggatatcatctcatgggttcactgttcaatccctcgttctacgggttcccggccgttggtatcggtgctggtttactgctggccggcggcatttcatgtttgctgcttacagtgaacagactgtacgcgttgattcctgtcattatcggcgcagcactggtgattctcggcattgtgtgtgtaacgatgccgcactggtccactcgcgtatggatcgtggcagtggctctgctcggtctggctgccaatgcgctgccgtggctcagcctgtcttccgcacgattgtctgtggacagccccaccagcgaatcggagattttcgcgctgcccaagaacatcgatatcagcgaagtgcgtaataagtaccgtatcggctccacgctgctgttcgacctgcgcgctgccaccagcgcactgatcgtgttcggcacgcctctggctgtttccagtgcaagcccagcaggcgtggcacttaccttggttctgttcgcagccatgctgcttgattccaggcgcatctatgcacaatcggaaatgctgatcaccgttatcaccgcaggtgccggcatctgcctgtcttgtgccgcatgcacggtgtttcaccccacgtgggcttcggtggtggtgggcttgttctcactgggagcgttgctgtgcgtcatcggcacacagctgtctaagcacgattccatcgccatgacccgtctggctgacgcctcgaacgtaatctgtgtggtggccaccctgccgctcgcctacgtggcattgggattgtgaggaggggccatggcgaataagaaggacctgcaggacgcacaaaactattcgcgggccaggctcattactgccttcacttccggtatgccggatggcaaggagctgactcctaagaaaggcctgacgccggtgatggtcagtatcggcctgaccgccatcatggttctgatcagtgtgttctatggcatcatcagccctggcctgccttcagactggagcaataacaaactcattgtgggcaaagacaccgcatctcgattcatcagcgtcaacggtgtgctgcatccggtaatcaacaccaccagcgcacgtctgctcatcccctcagacgaataccgagttatcaccgtagacgacaacgaacttgaaggtattcccatcggctccagcgtaggcattgtgggcgcaccggatattctgcccaaccggtcgaggctcgtatcgaaattcctggtgagttgtcttgacaccgagcgcgcctcaaccaacaatctcatcaccaatgatgccgtgaccaccccggccaggggccatgtaccgcgaatcattgtcgcacacattgatcggcgtccacaggcaagccaggccattcgtcaccttcatgctgtcatgatttccgtggaaggccggggtgagcgctgcagaagcgcagacgatggccagtggggtctgttcgtccgtccgccatggacagtggccggccgaatacagcctcatgcctgtgggacggcacgcggatttggccggtttccgcgcggcgtcccgcaggaacgtgggatggtagagaaatcaatcgtttgacgttcgtggcgttccacactatcaaccgccagaaccgcgcaatcacgccaatccccgttacggaccataatcatcccccgggctctctgcgggacggcagacgaaaaaccgcgaaatccgcgcgtcgtcccgcacttcgcccggtccacgaacaggacaagcatcaccgatagaccgaacacacatctacagccgcgacaagaaccccaacagctagccgcccgccccggatatcgccgtccaatagtaaatcgagcccaaaacgcaaacccaaagcactgactcagataataaaactcggattttccaccacagacagcgagaaactctcccctataccaagtagcgtacgtgccaccttgctcgatagacgaacaatgagaagtatcggtcaacgggcatgccgggcaggtcgatgggctctggcgcgggaacgaagacggcgtaccagcacgaatgggccggcaaacgtgatcgtatacaacacgacggcgaggaacacgctgagccatgcggtgaacatgcccaacggcatctcctctaccggagtggtctcggctatgcatgcaacgatctatcactccgatgttgtggtcagtatgcgcggcagttgttcgtcacggttgaggaaagaacgcgtttggcaacgaagtagcgtacgccggccttcctcagtgcgggtgtataccatggtgcaatgcgtcaggcagcggtccaactgtcggcgcagtatttcggcgtcctgctggcggcgggcaaatatggacgggcatgggaagcttacaccgtacgtgcgcacgccccattccttgccgatgatgacatatcgcggattgttgatgggcgcgagtagctccttcataacgccggcgaacagcacctgctcgcgccgcgaaccaccaatcagcatggcacgcaacgccgtgaatctgcgacgtgtctggcggatcgaggaagtcactcacctctttgcctaccgcgttggtttctaggcgctcaggttccgcagtcgccaaatgccagacatcggccaccttatcggggtctgcggccacgctgcggttggcggccatgctgtatgcttcactgcatcagtgtaaggcatgaatcaataggttttgagccccagatcgatggtgagaatgatgccggcgattacggcggcggcgcgcatgatgtttgcgggaatcttgcgggtgatgggcggggcgatgtacccgccgatgaagcagccgatgcacagcatgatggcggccggccaatcgaccgcgccttggatgatgaataccactgaggcgctgatgttcgcgcctgtgccgatcagggttttcaatgcattgatcttgtggaatgggccgattttggcggcatcaagcatggcgagagccagggtgccggcgcccgcgccgaagtagccggagtagatggcgactgccaccacgcccagccatacccaccaggaatcctggctcatgggctgcacgagttgttccggcgggcggtgaggtgcggtaggggtggttgcgcgcttggcggcatcagtggcatcggtggcttcagtggcttcgatgtgcttgagttgcgcggtggcatccgcggcggcctgcttggcctgcatgcggccgcgcggattgatggcgatgatcagcgagctcagcaaaatcagcactggtgcggcgaattcaaagacactcgggtcgagtttgagcaacagaaacgcaccggccaccccgccgaacgcgccaatgaccacatacgtaatggagcgtaccgcttggcctttgagttctttgcgcgcgcccatcacgccaccgatgcccgtgccgaccacgccaacggtgttagaagcgtttgccaatacaggcggaatgccgaacgcgagcaaggccgggtatgagaccagtgacgatgcgcctaccgcatagcccacgaatcctgcgccgattccggccaacagaatcagtagtaatgaagttatggaaaagcccgcaatcattccccgtatccttgtcgctcatcaaccggcacattgccggccttgagcgagaatacgctgttgaggattggttgcgggttttatgttggaatgtggacgtagctcctcgcggaagcgattccctcagtcgcctgaggcgacaactcccctcgcacccgaggggagccagaaggaaatcagagcgcttcgttgtattcgcgaaccttgagggtgcggtgggaggatgccacgttttcgacgatcagacgcttcagggcgttgtcggcggcaatgtgctcgtccagccaggcgtcaccgagcttgaccagcgtggcgggatcggcgtaacccgggtacaggccgttgagcagggcctcggccatgtggtaggtcttgttcgcccagatccagtcgacggcctcgaaataccgggcggcgaacggctcggccaggtcgtggcgcggggtggcggagaagccacgggccacggcttcgagctgggaattggtcagctcgtcgttgtggagtgcctgatcccaagcccattccttggcttgcgtcgtggccatggaggcgcgggcgccgtaggcgaactcgcggttttccgtggtctccttcttggcgagctgcgcgtccacgtcgtcgttggtcatctcgttgacggaggtgagcgcttggacgatggtccacgtgaagttgttgtcgatttcgaggccttcaagacgcacggtgccgtccagcagaccgtgtgcgttggcggcgaatgcggcatcgccctcctcgccatagcccaggtaggcggtggcgagctggaactgggtgtccgagccggcttcggcggcgttggccagggtccacagctcggcggccacgtggcgcagcacatcgtcgcggcgggctggcgccacgtagtggtgggcggtggtgctcatgcaggcccgcgcgtaacggaaggtggtggattcggtttccgtggccagaagacgcagggtcatgtccacgaagcgttcggccgggaattcgccgtcacgggtcatatcccagaaggcgagccaggtcacggcgcgggccagggcatcgtcgaaacgatgcaggttggcttcggcgaatgcctgggattcggcgtcgaaacgaatcttggtgtaggtcaggtcatcgtcgttgaccagcacgaatgccgggcgcggcttgcctgccgcggcctcgacgatggtggtttcgccatccacgtcgagttcgaactgctcggtgcgcacgatcttgccggtttcggcgtcttcgttgtagaagccgacggccaggcgatgcggacgcagcaccgggtgttcggccggcgcgctctgggtgagcttcaattcggcgatggtgccgtccgcgtttacggtcaggccggtggcgatcgtgttgatgccggattcctccagccacttggcgctccaggccttgagatcgcggccggaggtcttctccagttcgctcagcaggtcggccagggtggcgttggagtaggcgtggcggttcaggtagttgtggataccttcgaagaactgcgtgcggcccacgtagaatgccagctgcttcagcacggaggcgcccttggcgtaggtgatgccgtcgaagttgacgtaggtgtcgttgaggtcgttgatcggggcgacgatcgggtgcgtggtgggcagctgatcctggcgcaacgcccagctcttctcaccggagcagaaggtggcccaggcgtcatgccattcggtggcttcggcagtggccagcgtggaggtgaattcggcgaaggactcgttgagccacaggtcgttccaccacctcatggtcacatagtcgccgaaccacatgtgggccagctcgtgcagcacggtcaccacgcggcgctcggccagcgcgtcggtcaccttggactcgaacacgtaggagtcacggatggtgaccatgccgatgttctccatagcgcccgcgttgtattcgggaacgtagatctggtcgaacttggcgtacgggtagggcacgccccaggtcttggcgtagaacgcgaagcccttcttggtgatgtcgaacaggtagtcgacatccttcgcgaaggccttggccaacgactgtcggcagtactgggccatcggcacggtgcgaccgtcttcgttcaggtattcggtgtgccattcggcgtacgggccggcgcagatagcggtcaggtaggagctcatcaccggggtcggctcgaagtcccacagacgggtgctttcgttcggcttgtcgccgagggtgccgtcgagggtttcgcgcggatcgtcctcgatggtggcaaccggcatgttggaggtgacgatccagctggcgggagcgagcaccttgaaatcgaaggtggccttcaggtcaggctggtcgaacacggcgtagacgcggcgcgcgtccggcacctcgaactgggagtacaggtagatgttgccatcggacgggtcgaccgagcggtgcaggccctcgccggtgttggagtaacggcacttggcttcgacggtgacctcgttcttctccttgaggtcggtcagttcgatgcggttgtcctggaaggccacggctgggtccagggacttgccgttgaggtcgatggatgtcacttcgtcggcaatcaggtcgaggaaggtcgacgaaccaggcttcgcgttgaagcagatgagcgacttggaaccgaagttcttcgcgccgaccgtcaggtcaaggtcgacgtgatagtgaatcggcgcttcgataacggccttacgttcttcggcttcaatacgagtgagattagaaccgggcatgacttcaattactccttacggtcgtccctggataatccggactacttggtttctacggtttcgacgtcctgagcgatgtcggccacgacgggcacgatcatcggcttgcggtgcagctggcgcgcaacccagctgccgagcgtgcggcgcatggtctgctgcagcttgtaggtgtcacgcgcgccctgcatcatctggtcgttgagctgttcgacgatctggtgacgcaccttgtcgaactcgctttcgtcctcggccacggcgttcaggtagatcttcgggccggtgacgacctcgtggttgtcggtgtcgaccaccacgaacgcggatacgaagccctcggtgccgagaatgcggcgcttttccagctcgtcatcggtcagctcgccgacggaatcgccatcgacgtacacgtaaccgcacggcacggagccgacgaccgcggccttgccgtgatacaggtcgaccacgtcgccgtcttcggccaagaccacgttctgcgggtccacgccggtcttgacggcgatcaggccgttggccaccaggtgacggttctcgccgtggatcggcatggcgcacttgggcttgacgatgttgtacatgtacagcagctcgccctcgttgcagtggccggacacgtgcacggcggcgttgtcgcggttgacgaccttggcaccgagctgcacgagcttgttgatcaccttgtagacgccgtgctcattgcccggaatcagggagctggcgagaatcacggtgtcgaactcgttgatgtggatgtcgcggtggttgccgtcggcgatgcggccgagtgcggccatcggttcgccctgggaaccggtgcacatgaagacgagcttgtcgtcctgaatgtcgttggcctgcttcaggtccacgacggtgccttcggggatgtgcaggtagccgaggtcggcggcgatggacatgttgcgcaccatcgaacggccgacgaacacgaccttgcggccgtacttgtgggcggcgtccaccacctgctgcacacggtgcacgtgggaggagaagctggcgacgatgatcttgcgggtggcctgggcgaacgcttggtcaagggccgggccgatggaggtctcgggcttgacgaagccgggcacctcggcgttggtggagtccatcatcagcaggtccacgcccttttcgccgatcttgccgaattcgacgaggtcggtgatgcggtggtcgagcggcagctggtcgagcttgatatcgcccgtgtcgatcagggagccggccggggtcttgacgtagacggccagggcgtccgggatggagtgggtgacgttgacgaattcgaggtcgaaggggcccaccttgagcttctcacggccggcaacctcaaccttggtggggttctggtggtgttccttgcacttggcgtccacgaaggcgagggtcagcttggagccgatcagcgggatgtccggacgcagcttgagcaggtagggcacgccgccgatgtggtcctcgtggccgtgggtgagcaccagggcgtcgaccttgtcgagacggttcttgatgtagctgaaatcgggcaggatgagatccacgcccggctgctcctcctcggggaagagcacgccgcagtcgatgagcagcaggtgaccgttgtattcgatcacgttcatgttgcggccgatttcgcccaagccgccgagcggcgtgatgcgcatggagcccttgcggtacttcggcggggcgatcagcacggcatcctgctggggtgcggtggcctgccgggtggcgttgatcttacgggacggcgtacggctgttggatccgttggcgttgcggccgcgcgcggaaccgcgacggcgagaattcgtgttcttgcttgttttcttttgttcttgtgccataacctttttgggatttctgttgtggtgcctctgctctgtcatgcaggggcggcgggctggcaacccgtatgcagcgtttcgggcttacagcagtccggcagcgcgcatgccctcttcagccttgtcaagctgagtggcgtcgggaccgatgttcggcagacgcatggtggtggaggggataacgcccttgaccttgagcgcagccttggccatgacggcctgatagccgtcgccattcaacgcgtggacaaggggggcgagctggttggcgaggcgacgggcggtggtgatatcgccgcgatcgaatgcctggacaagctgctgcatggggttggaggcgacgtgggcaatcaccgaaatgatgccgacggc

SEQ ID NO: 1149 - DNA, 16025 bp, Unknown
  R81_24m  MAG No. k141_7856
gcgctcgtcgaccgtgaaaacaacgattacacggtaaccaacaccgccaagaccgaatcggcgaaaaccggtgcgagcgttgccatcatcgccgtgatcgtagtcgtactggccgccgccggcatcgcaatcgccgtaatcgtgcgcaagaagaacacttcggaagacgacgtggagcagaactccacggaacagcccttggaacaggtttcggagcaggcctccacggaacagccttcctcggacgatagcgagtgatgttcgaaacacacggaaaacgtgccggcaaccgtctgcacgaacgtcaaacagcggatagcgacgccgaaaacgtcgcatccgctgaagtcccagacaccgaaaacacagccaccgaaaacatggctgcggatacgcccaccgacgcggtgaccgatacggcagaccaggccaacgaagcagatcagactgacacggcagacccgtccagccaatccgggcaatctgattccgcatcccagtcatcggaaacgatgacccgcgtcgacctgcgcaaaaaacgcaaaaaagacaatctcggcctgaacctcatcatcgggttcctagtcgtggtgctgatcggcggcctcggcctcatcgcctacccgtccgtggccgactggtggaaccgaatgcaccagtcatacgctgtcgccgggtacgtggccaaaaccaaagacatgtccaaagccgagaagaagaaactcctcgacgccgcgcacgcctacaacctcaaactcgccgccaccagcgaccgctggcatatgaacgccacacagaaagagcagtacaagaacacgctcgacatcaccggcaccggcatcatgggctacgtgaccattccccgcatcaaagtgaaactgccgatctaccacggcaccgatgaaggcgtgctgcaggtcgccaccgggcatttggcaggcacctcactgccggtcggcgggccgaccacgcacgcggtgatctccggccataccggcctgccgtccgcgcgactattcaccggcttggacgagctgaaaaagggcgacaccttcgcgttccacgtgctcgacgacacctacacgtaccaggtcgatcagatcaaagtagtgctgccggatgacctgagcgcattgaacatcagcacctcaatggacttcgccacgctcataacctgcacgccctacggtgtgaactcgcatcgactgctggtgcgcgggcatcgcatcccgaacccgaccacgccggacaacacgcaatacgatgatccgaccaccatggtgttcaccacgatcatcgtcgcgctgctggttgtcgccatactggtggcgctcgtaaccgtgctcgtgcgcgtgcgtaccgcccgcgaatcgaccggcgcgcacaactccggacgcgcctaccgcaagcgaaagcccaaacatcgcagcaaacgctagcgtatgacaatgtgcgttgcgctagtactgcaaaactatgacaagcgttaatccagacagtgcttttcggaatgccctgttagacccacattgacatgtggcagttggattgttggcaccgtcaagcctgtcaataattcttgaatacaccgactcaggggtcacgaaccacaaaggagccaggacgtttctaacgtgccgaaatttcgtcgatcagcttgagctcctcgtcgctgaagtgggtgttcttcagcgcgccgatgttgtcgagaatctgctgaggcttggaggctccggtcagcacggaggtcaccttaccatcgtgcagcagccatgccaggctcatctcggccagcgtctggccgcgttcggcggccagattgttcaggtccacgacctgcttgtgcagtttctcggtcagggcggaatcgttgaggaatcgcggatcgtgagccatgcggctgtcggccggaatgccgttgagatagcggttggtcagcaggccctgtgccagcgggcagaaggtgatgaggcccttgcccagcttgaaggcggtctccttcagaccgttctcctcgacggtgcggtcgaggatgttgtatttgttctggttgatgatgaacggcacgtgcaggtcggcgagaatcgcggcggccttctccatcgtcggaccatcgtagttggacagacccacgtacagggccttgccggagttcacggcctgagccagcgcgcccatcgtctcctcaagcggggtttccgggtccgggtggtgatggtagaagatgtccacataatccaggcccaggcgttcgagcgactggtcgaggctggcgagcaggtacttgcggctgccgaggtcgccataggggccggcccacatttcgtagccggccttggtggagatgacgagttcgtcgcggtggtgcctgaagtacttggcgagcagcaggccgcagttcttctcggcctggccgggttcggggccatagttgttggccagatcgaagtgggtgatgccgttgtcgaaggcggtgaagatcagggacttcatctggtcgaatggcgtgatgtcgccgaagttgtgccagaagccgagtgagacggccggcagcttgaggccggaggtgccggcgtggttgtaagtcatcgtgtcgtaacggtgcgggttgggggcatagatggcggttggctcgaacattgagtctccttacaatgtcatttttgttcttacgaatgcttacctgcgatgggcaaaccgacgccgattgagtggcattcgtaagtgttcttggatactatggttccagttcaagtgaacttgaatgcaaacggctgcgacgcttcggcgtgtcgccgcagtaaggagtcatggtgttctacaccattcgtcaggtggccacgcagttccatatgcagccctctacgccggtgaagactggccggattggcgcgagtacaaaaaccgcgcctattccattgaatgctgaggccatcgagtgccgagctggatgccggctgggcactaagaccgatgtgcgtcgatcgtgggcgcgtctatccgagtaaggccttgctcggcagtgcgcggtcgagcagccagacaacgagcgatatcacgaagaacgctatggccagcttgccgcagctaatgccgaacccttgccagccgagtgcgtcgaggttgatgaagtcgtacggatacggactgccgccggccgccggtccggaccccggccaaatcgtcgcacgggccagcacgaagaccaagtatgcagggaagtacgccagccacgagaacatgtaatgccagcggaaacgccggtgcgggtcgaatagcacgaaatcgataaccgccataatcggggcgattttgtgcagcatcgtattggtcatgatgccaataacctgtggcacgtatgccgggtcgtccggaggcatcaggaagaacgccaccagtgcggtgactatggcgtacacagtcaggcatcccttaggccatgcaggcggctgaatacctttgagcagtgtggccgcgccggcccacagcatcacgatgcccagcacgaaaccggtctggaacgtgaaatacacccagaactgcggtttggaccatgcctcatatgtgcccacgaagcagaaaccggcgatcgcaaagcgccacaacgccacgatgaatctcatgcatcgagtctaccgcttcgccagtgggctgtatggctttgcccggactacacttaggtgcaacttcaccacttatgtaggaaaggccttgcaatggtcgattattcgccggctctgatgaccgacatgtatgaatacacgatgctcgacgccgctctgaaagacggtaccgccgaccgcaaatgcgtgttcgaggtgttcacgcgtcgcctgcccgaaggccgtcgctatggcgtggtggccggcaccggccgcattctggatgcgctggaacatttccacttggacgaagcggacctgaagttcctggccgaccgtcacgtggtaagccccgagaccattaagtggctggagaacttccacttctccggtacgattcgcggttaccgcgaaggtgagatgttcttcccgaactccccgattttgcaggtcgaaggcacgttcggcgaatgcacgctactggagacgttgattctatccgtgctgaactacgattccgcagtggcctccgccgcctcacgtatggcgtcggcagccaaggatcgtccttgcatggatatgggcggacgccgcactaacgagtgggccgccgtggccgccgctcgagccgccgtagtgggcggattcaagggtaccgccaatctgctggccgcccagctgtatggtctgaaggccattggcaccgccgcgcattgcttcacgttggtgcatgattccgagcgtgacgccttcgaatcgcagatcgaggcattgggcaagaacaccacgctgctggtggacacctacaacatcgaggaagccgtgaaaaccgccgtcgaggtggccggtcccgaactgggtggcgtgcgcatcgactccggcgacctagccgccatggcccagcgtgtgcgcaaccagctggacgccctgggcgccacgaacaccaccattaccgtgaccaacgatttggatgagtacgcgctcgccgcattgcagaccgcgccggtcgactcctatggtgtgggcaccatgctggtcaccggctccggcgctcccacttgtgcgatggtgtacaagctcaccgaacgtgaaggcgctgacggcacgatggttccggtcatgaagaaatccaaggacaaggccacagtgcccggtcgcaaactggcattccgctcctacgaatacgcgttagccgaagccgaacacgtgatttccggctcggaggagaagctggccggtttcacgcctgaaccgacgtggaagaacctgctggtcgactttgtggatcatgggcagatcgacgctcagtggcagggccatgacgccatcatggccgcccacgactaccacgccaaggcgttgtccgaactgcccatcaccgcgcagagcctcatgaagggcgagccagtgattcctacggagactcaggttctctgacgagaactttcgtctccataggaatccgtcgcagcatagctgctccccttacctacggacagcccactgggctgtccgcttaacggttcgaccacagagaccaaagtcctctgaccgtatctcactggccgcatccctttggttacattggctactcttccctctgtctgtgttggccgcactcctgtggtcgccgccgaggcggggagatccaacccccggtcgcacccccgtgtttgcaccccctgtggctgtgtcccggggctgtattggccgcgtcccctcgggctgaactgcgtcccggttcgccggacgtggttccagctgagggtggccccccttgtttttttttggggggggggtactgttcaccggggaaatatgtatatgtgcatgctgttgcaatgtacattttgttgtcagttgacaacgtcttgattcagatgaattggcgggaaatggccatttgtcttatccaattgatttgaagaacgttgtcagttgacaacgttttgtacatggtgcggaacgacacatattcctatcctggtcaggatgccgacgaggtggagtgaaaaaccaaaccatttcagaggatattgcaccgagacgttgtgggattgccgtgttgtcggtgatgttacagagatggcgcagtgttgcgtgaggggtgttgcgtgaggggtgttgcatgaggggtgttgcgtgaggggtgttgcatgaggggtgttgcgtgaggggtgttgcgtgtgatgttgcgtgtgatgttgcgttgggctgattgggaggaatagtgtgccgatagaatgccgtgatgcgtgcagagcaatcgtttgcggagcaatcgttgaagaatcgtgtgaactgatgcgatacgaatcataccgtctctgaattgtgggatatgacgaatcgtatcgtcatgggattgtgggatatgatgattgcggtttgatgaaatgaccgggaaatcggccgaggcaaggtgacttcgatgagtgaaactctcaatgatgagaacgcggcgggcaacgatgacgtatcagagcggcgcgctgtagagcatcgagcgttagaacagtacgatgtcgtgcatcacggtgtggtatctggttgccctgttaattcgtgtgcggctgtgctgaatgaagtgatgtcgcagactggttggaatgcctatgagcttgcacagcgtactggtttggatcggtctgcaattggtcgcgtattgcgtgggcaaagaggtatgttgtttgatgttttggccgaggggcttgagcgggctggttttggtcttcacctagaagccgtggccccctcgcaaacgattccggaagacgaattgcacatgttgttggcgcaactgcgtaggcctcctgatttcgatgcaatagaaagcggagcgacctggtctacgttgaagatgctctgcgtcaatctgattcatgctcggaatgttcaacatcaacgtatatcgttcgtccgagcggttgcacgggtgaacgatgcgtgctggattgcgtttctcgctggtttataccgttttctgcgttgggatatcaacccaaggaacagacgcttgacattggttcctccgtaccggtatggcttggatggatggtggtccccactgccgagcgcggcaattatgcacgtgcttcatcgatatgaagagccgttgcatgacatggactatacatatttgccgttaatcgattacgaactcaacgctatgcagcgcaagcaattcaaccaagatttcatggaatatggcattcttattccagcggacgatctttcccaatcctcatcaggtacgcaggcattgactctgtaagcgagtggtgcataagaaaatagtggcgtgcagccaagtgtcatggaatggatatgtaagcagggaatgacattgcgctggggtttgatgatggttgacgagttgctatccaggcatagagcggatggcgtatgctggggcgcatggttgaaatcaaagacatgcttggcaatcaccaaataattcgtgccgacggccgcaaggtcgacgagctgcgccccgtgcgcatcacccgccacttcaccgacgcccccgaaggctccgtgctcatcgaatgcggtaacacgcgcgtgatgtgcaccgccacttttacccctggtgtgccgcgttggcgcaaggactccggcctcggctgggtcaccgccgaatactcgatgctgccgcgtgccaccgccgaacgcaccgaccgtgaatccatacgtggcaaaatcggtggccgcacccacgaaatcagccgactgattggccgctgcctgcgtggcgtcatcgatatgaaggcgctcggcgaaaatcagattcagcttgactgcgatgtgcttcaggccgatggcggcactcgcacggcttccgtaaccggtgcgtacgtggctttggtcgacgcagtcaattgggcggagaagcaccgccatatcaagtccgccagccgcgtgcttaaggactatgtgtccgccgtatcggtgggcgtgatcaacggcaccccgatgcttgacctgccatacattgaagacagtcaggccatgaccgacatgaacgtggccatgaccggttccggcaccttcatcgagattcagggcaccgcagaacaccgtccgttcaaccgtgccgaactcggcaccctgcttgacttggccgaaaagggcaacaaggaactgcaagccgcccagcgtgccgctttgtccctagactaagccagctccccttcctttaggggaggttgtcggctggaagccgtacggtctgcaatgtccagctcccctgacaaggggagccttcttaaaggagaacccatgcaaatcgtcgtcgcaacccataacgaaggcaagcttgtggaaatccgccgcattctcgaagaggatcttggcgcggatgccgaaaacatcgaactggtgtccgctggcagccttcacctgccggacccggtggaaaccggcgtcaccttccaggagaacgcgctgctcaaggcccgcgccgtggccatccgtaccggtctgcccgctgtagcggatgattcaggtctcatcgtcgatgtgatgggtaacgctccgggcattctgtctgctcgctgggcgggtgctcacggccacgacaaggccaataatgcgctgctgctcgcccaaatcgaagatattccggatgacaagcgtaccgcgcgcttccgctgcgccgccgcgctggtggtcccggacaccgaggccagtgccgacgtgaccggtggagtggctgccgacggcatcaccgtttacaccacggctgcagatgggagccctgccccggtgcatgcccggtacgccatcaagtcggagacagtggaactcggcgacatgccaggtcgtatcatccgcgaggctcgtggcgaacacggtttcggttacgatccgctgttcgtcccggacgaccagcctgccggtcgcgtcagcactgagcctgaccatgaaggcgagccgctgaccagcgccgaaatgactccggccgagaagaatgcgatttcccaccgaggcaaggcgctgaaagccttggtccccgctatcgaggcgctgctgcactaagtcgtctagactgtctaactgcactgagccgcgactaagccacagttgagtcgcggctcagcaactcagcccctcccgaatcgggcaagtgtctagcaagcgcctatgacctagcaagggcgatacgaaagaaggccggcgcttagtgcgtcggccttcttgatgaacaagagccacccgatagaatcgaactaccgaccttcccacgaacgagggggatgctctaccactgagctaaggtggcgtggctccaagagccaagtagagaatatagcactgcgtttgattcaacgcaagccggacgttcagcatcttcgggccattgttctttgagccattgtggaggcaatagtgcgaacgatgtgcacacctcatctgctcggaccccattcgtcgtgtgcgcgttatgctagcatggtgagcctgattgactcggaggcagagggaagcatgcgtgattttgtgctggtgaagttgacagacgaagagttcgatgatttctccgccaggcatccacaaggcaatttccaacaaacctcggcgatgggacgccttcgcgccgcgcaggggatcgacgtcgaatatctggccctcaaggagggcgagaagatcgtcgcggcggcgctgttcgaaactcaccgctctcgattctctacatttgcggccatccatgatggcccgatgtgcgactatcacgacaccgaagcattgaccttcttcatggatgcgctgaaacgccatgccaaggcaaagggtgcttcacagctggaaatcacccctgaatccccgtatcggcttcgcgacaccaatggagcttctttgccggatgaccagaacggcgctcccgacaataagctgatagaacggctcgaggcgatcggcttcactcatggcggtttcaccgtgggctacacggcggttccacgttggcgctacctcaaggatctgaccggcattaccgatgagaaaagtctgctgaagtcctatgacaagcgcacccagtggagcgtgaagcgtgcccaatcgatgggtgtgcatgtgcgtgagctgtcggacgacgagttgggggtattcgcacgaatcgagcagcaaaccgccgaacgtcgtagcttcgaataccgtggcgaagcatatttccaccgtttcaaggaagcgtttggcaacaaggcgcattttatggttgccgagatccacatcgacgaatatgtagcggacatgacggccaagcgtgaagcgctttcggccaaggtggcggcattgaccgccaaaaacgccgaacaccccaccaccaaaaccgaacgtcagctgggggaggagacccgcaatctggcggcagccgaaaagcgcctgaacgaggcggccgagttcgccaaagacggggatgtgctgccggctgcggcatcactattcgtggagcatccgcgcgaggtcatctacctgttctccggtagcgtcgagcagtacaagcccttctacgcctccgcgctgattcagcatgacgcgatgctgcatttctgcgtggaacacgggctgtctcgctacaacttctacggcatcgacggcgtctttgatgatcccgatgacgaggggcgtggtgtactggagttcaagcagggcttcaacggatatgtcgaggaacttccgggcgagttcgtactgccggtcaaaccggtcgcctatgccatgaagcaatttgcgcacaagctgctgtcgcggtaaacggacgcagcacacaggccgttccagagcccagagtaacgatcagagtaacgacaagtaagaaggttcgattatgacgcaatccgatgcaggcgtcgcctcactcacccctaccaagatcactcctgccgagctggatgcgttctccgcagctcaagtgcaaggtagtttccagcagacctcgcagatggccgccatgggtgcgttcaacggtccggtggactatgtgggtgtcaagcgcggtgacaagctgattgccgcctgctacgtggtgtacacgcagtcccgtttcggtttggaaggctcggtctggtgcggaccgctgtgcgattatgacaatccacaggtggttgaggcgatgaccgaagccctgcgtcgttcggccaaggcccatcacgccatcagcgtatcctgctggccggccgcagtctaccgtctgcatgatctggacggcaagccgaccagcgacccggacaccacgatgatggacaacatggcccgcttcggttggaaacatggcggcttcaccgtgggctacgaatccgtggtgaaccgctggaacttcgtcaaggggcttgacggcattcataatgagaaggaactgctggcctcgttctccaagtaccgccgtaagaacatccgcatcgcccaggattccggtctgcgcgtgcgccggctggaacgcggcgaactgagcactttcgtcaagctgtgcgatatgagcgccgcacgtcaaggcttcaagagccgcgatctggcctactatgagcgtctgttcgataccttcggcgacctgatcgagttcaaggtggtcgaaacccatttcgacgaatatctggacaccctgcaatccaagctgaatgcggcctccaaagacaagcgcaacctcgaacgcctgctccagcgcgcgcaacagcggccggaaggcacggccaagaagggtgcctccgacccggcaacgctggaaaagcgcatcgccaccgcagacaagaagatcacggcgctggaaaagaccatcggcgaagtcaatggcatcatcgcctcggacggcccggtcattccggtggaagccggtgtctacttctggcatccgaacgaggtcgtctgcctgtccagcggcgaggacgatcgtttcatggattactacccgtcttccctaatccacttcgaggcgatgcttgactgcatcgcccgtggcgtggagcgcttcaacttctacggcatttccggcattttcgacgccaacgatccttcctacggcgtctggcagttcaagactcgcttcggcggattcgtggaagagcttccgggcaagttcacgctgccggtggacggactgcgcttcggtgtatccgaagccgcacacaagctgctgcatcgctgacaaacagtggcgagcacggacacagaaataaggcacaggtgacgacgagatgagcgcgactgcgaatcgaacagatacgacgtatacgtttggcgtgattacgcccgaagagttcgaccggctttccgaagccacaagccagggcagctttcagcaatggtccgggcaggtccgtcttgccaagattcgtgggcatgaagccgaatgcgttggcgtgtgcgacgcatccggcaatctggtagccggctgcgtgattctgtacctcaatggtcgtttcggtgcagatggctccgtatatttcggccccatcggcattagcgatgatccggctctgctgcgggccatgaccgaggcgattcgtgaatcggcccgtcgccaccatgctgtttccgtggcatgctggcctaacgtcgcctaccgtctgtattcctcggacggacagcccgacggcgagccgaacgatgcactgctgaccggattcgccgatgcaggctgggcgcatggcggattccataccggttatgacgtggtctgccagtggatgtacgtcaaggatctcaccggcatcaccaacggcaaggaactgctggcatcattcggcaaacgcgctcaatggagcgtcaagcgggcgcagtcgatgggtgtgcacgttcgcgaaatcggccccgacgagttcgacgtgttcgccgatatcgaacggcggaccggtgaacgccgcgggttcgcgacgcgcggcgcggactatttccgccagttcaagcaggcgtatggcgcggatgcgcatttcatgctcgcggaaatccacatcgccgaatatgtggcggatatgaccgccaagcgcgaggccttgcagaccaaggtcgcacagctgcagacgaaatacgatgaacgtccgaccacgcgcatcgaacgtcagctgggggaggaatcgcgcaatctcgcggccgccgacaagcgtctggctgaggtggagggatatgccaagaagggcgatgtgctgccggcagcggcttcaatgtttgtcagtcaccccaatgaggtggtctatcagtattccggttcgttggaggagtacaagccgttctatgcctcggcgctgattcagtacgaagcgatgctgcacctgtgtgtggaacagggtgtgagccgctacaacttctacggcatttccggcgtgttcgacgatccgaacgacgagggccgcggcgtgctggaattcaagcagggcttcaacggctacgtcgagcagatggtaggcaaattcacgttgccggtggacaagttccgcttcggcgtgagcaatctggcgcacaagctgctgcaccggtagcagctggcggccgggggacgaacctatgtgggctgcgtctcgcctgaccgtgtgcccgccgtgcgcccgtcgtgtgcctactcgcgcatttgctcacacgcccatcagcgcgtgagcaaatgccatcatcaccagtgaaatcatcgcggtgattgccagcgagaagccggccagtttggcgttgccgagtactttgtcggtgaacagcgtggagaaaatggcgattggagccaacgcgcagatcaccatcacggcgcgaatcgaagccgagaacggcagcaggaaccacgagatcaacgcgaaggcgacactgaacggtatacgccaagcgatgacggccatgacttccttcacatcatgcttggactggggcaaatccatgagcatgcccaccatcagcatcgacaccagcgcgttggcaccgctcaacggctgggttatagaggcgatccaatcgggaatcttcacgttggcgacggtcaacgcgatcatgagcagatacgtgtcgaacggcaccgagccgaagaagctcttgccgatggtgcgcagcaatgcgcggcgggcaagccgtttggcgtcgcgatccttgggcttttcgtacggcaaggtgggaaccgaaccggcgtgttgttcggcaagtgttttgccgggctgaatatgcagcagttgctgggtgagcacattggtgccggcggccaccatcacgcagttgccgatatcgaacatcgcagccggcaccaccgcgcccgcaccccagaatgactggacgaccgggaaagagaaacaaccgagattgaagccggcgccattgagcatcaggaaggcgcggtcggtcacattgcgcttgcgggtggccagaaagatgaacacgatcgggataaaagcaaacaggaatgcgaataccgaaataagcagcagcgagatgtcatgcggattggtggcgaacgagtatacgatggcaccgggtagcacgatgttgaattccgcggtttgcaacacgcgataatccttctgcccgaacaggccgaaccgcttgaacagatagccggcgagaatgatcagcaataggccaaccggcgtaagaatggcggacatacacttctctccttgactcacacaggctcacggcgcacaggctcagacccacaatgctgtgaccattatatttgccgccttggcattgccatatgtagaggcgtccgcaagggcttgcaattgcctcacgcatatacgaagagcctcccggaatcgttggcgatccaatgtttccaggaggctcaagccggtgcgcgagatgggacttgaacccacacgtcaaagacacaggaacctaaatcctgcgcgtctaccaattccgccactcgcgcgtgcatatccgcgtttccacaggtgtggaagatatacaaaaccctaggccggacagccattacagaccagccagcctagggcatccgagccacttgtcagaatcgaactgacgacctgctcattacgagtgagccgctctaccgactgagctaaagtggcttggttcgcggaaggcatttcgccagccgcgcacaagaaattaagtataagacatctccgcgaaaagtccaatcggcggcttggcagttgtgtcgtgaccgctcggttgaagatgacggttgtgccgcgccacgaactgttcgataatgcaaacgatggcaatccgacatcgctgactgatttttgttctgttcatgtccgaatttgtgagtattctgtttggtgatacggagcgcatccgagccgtgagcgaaggcgctccagtcactgatgaaaggaatggaatcctatggccatcaatccgcccgttgacgccacccagacccctgagtgggctgccctgcagaagcactatgacgagcttcaggccgaaggcgtgagcctcaagaagtggttcgctgaagacgccgagcgtgtcgacaagctgtccttcgacgccggcgacctgcacttcgatctgtccaagaacctgatcaagccggaaaccctccagctgttcgccaaccttgccaaggccgtcaagctcgatgagcgcaccaaggctatgtacaccggcgtgcacatcaacaacaccgaagaccgcgccgtgctgcacaccgcgctgcgccgcccggtcgaagacgagggcaagtacatcgttgacggtcaggacaccgtcaaggacgtacgcgaggtgctcgaccgcatctacgccttcgccgacaaggtccgttccggcgagtggaccggtgtgaccggcaagaagatcgagaccgtggtcaacatcggcatcggtggctccgacctgggtcccgtcatggtgtacgaagccctcaagccgtacgccgacgccggcatctccgcccgctacatctccaacatcgatcccaacgacctggccgagaagaccaagggcctcgacccggagaccaccctgttcatcatcgtgtccaagaccttcaccaccctggagaccctgaccaacgcccgtgaagcccgcacctggctgctcgaagagctcaaggccaagggcgccatcgacggctccgacgagaagaacgccgaggccatcaagaagcacttcgtcgccgtctccaccaacctggagaaggtcgccgaattcggcatcgacccgaacaacgcgttcggcttctggaactgggtcggcggccgttactccgtcgactccgccgtcggcacctccctggccgtcgtcttcggcccggcccgcttcgaggagttcctgcacggcttccacgagatcgacgaatacttcgccaacaccccgttcgagaagaacgtcgtggtgctgctcggtatgctgaacgtctggtaccgcaacttcttcaaggtcgcctcccacgccgtgctgccgtacgaccagtacctgcaccgcttcccggcctacctgcagcagctgaccatggaatccaacggcaagtcc

SEQ ID NO: 1150 - DNA, 9773 bp, Unknown
  R81_24m  MAG No. k141_8527
agtttttctttagcgagaggcatctcagcctgatcaagcgactggacacatgcccatcttcgttcaaagaggtacatttgagactttgcagaaagctatctgccttcaaaggggtattgaaactctgatatcgcaagtatgagcgttgatattccaacgaagatactcgcggtctcgcggtctaggtactcctttgaaagcagatagcattccgcaagaccccgaatgtacctctttgaacgcagatagatgtctggggcgctgatcacgcccctcgactgagatatgggttatgttttagcgggtgctgcgcagctcgtggacggtgatagtcccgctgagctccgtgacggtcagctcggtggtgaaatccggggcgttgacagtgtcgcaatcgaagagaatcgcgcctgcgtcttcgccgttgttgacgaacacttcggccacaccgtgatcgtagaagacctcgacccgttcgatctgcttggtggcggacacatagtcgaatctgtcagtcggtaggccggtggaggtcaggtgcacggcagcgccgtcgctgaccaatcgcagcgagacctcggccgtggctccatccggctgagtgcgtgtgcccgaaaccagtgtcgcagagaacgcggagccgagttcggggcggatatccgcgtaataagcgtgattgggcacttggaacgtattgctattgcctgctggcgttgcagtaagaacatcgcccaccaacaggtcgtagacctcttggatcgggcgagagataagccgaccatcgaccacgtgcagttcgcgtggcaggctcatcacgccattggcatagtcaggccgttcgatgcgtacgccgaaccagtcgcacaaccagccgatggcaatacgacggtccacgtcggtgccgttcaccgacgtatgacgatcgaggaaggattgcaccgcgtaatagcatgagccgaaatcgcaccaaccggtgtgctgtacgtccagacgcggagcgtcgagcgaatccgcgataacgcctgtgtaccagcgaattggctggaaacgaccggtcgaatcatgcagtttcatcatcgatccgaccgccaccgccgagccgtccagcgagaaggcatccgggcactcgtaggtataggtttcggcgagtcccgtctcgaacagcagtggaccggcatactcccatgcggccttgcctaaattggtgtcggtggcacggaacaatgccaatgcaggcgtgcgggttgggtcaggctcttgctccccggcggcggcgaacgcaccatcgccgtaccagtattcgccttccggccgcggcgtggagccggagtctcctgcggctggtgcctcgccggatggtagatttgtggccaccacaatagtgggagtgcccgcaagcgcggtaccatcgaacaacgtgttatcagctttcgggtcgcggaaatcaaggccgaaatcttcgttcgggcggcgaatcaccgtggtctccgggctgaaggacaggccgtcggtgctgatggctgtggtctgcgtttccaccacagagccggggtcgccgcggcactcccagtgacgggtcaggaagatgcgaatggcgctcgcctcatcgccgggcacgatatgcccggtctcgtccacggttacggccgaaccggagaatgccccgccgctcagcgagccgtcacggctcagatcttcttgcgggagcagcgtgatcggcagatctgtccagtgcaccaaatcgcggctgaccgcgtggccccaatgcatactgtcccactgccagccgtacgggttgaactgatagaacatgtggtagcgcccttggaaacggcacagtccattcgggtcgttcatccagtgctgggccggttcgaaatgtgcgctcggccggtgcgcggtggcgcgcgtatccggggtgatgatgcggatgcctcgatccagcagattcgcgcctccagtcaggtacgcaaagcccagcgtcaggccttcgcaacgtagtgcgtattgctcgccgggcttgattggcagggtgagtcgcatgcgacggtcggcggcagtcaggtgggcttcgatcggtggtgtgttcggatttgccggggtcaagcgcagggttgccggggcagcattggcacctccggaatattcggcaaacgcctcgaacgcggtgtagccatcggcattgatgatggtcataagaggactccttgagttttcgataccgggaattgctggatataaaggcgccggatgggcaaaaagggaaatcccacccagcacgtattgattcgccttcggccctgcaattgtgggttcgctttcagcgaggctcagtgttgccttcgcttggctttcgcctcgctcaggctgacgctacaaacagtccacaggactgtttgcttaacgcgtcagccctttactcccgaagaggcgattgagctgacgaattgcttttgaaagatcacgaacacgatgatgatcggcacggtgatcagtgaactgtatgccatgatctgaccccacgacgtggtcatctgctggaagtactgcacgccgatcatcacgggcctcaggctctcggactgcactaccatcagcggccagacgtactggttccacatgggcaggaagctcaaaatcaccacggtggcggtggccgggcccgacagcggcatcacgatacgcgagtagatgcggaaccagccggcaccgtccacgcgggcggcctcgtcgagatccttaggaatcgtctcgaaatactgcatgtacaggtacacggagaaggcgttggcgatgaacggcacgatctgcacgggcagcgtgtcgatccatccgcgcgtgaagtacaggccgaactggtccaccaccgggcgcggcagctggttgacccaccacagcagcggaatcgcgtaggtctcgaacggcaccatcaatgtggccagaatgaacgtgaagatgatcttcttgccgcgcacctgcagacgttggatggcgaaggcggccatcgagttgacgattacgccaagcaccacggtcaccagcgtgatgatcaccgagttcatgaggaaggtggaggccggcacgcgggtgaatacctgcgcgtagttgtcgagcgaaatgtgccccaccggcaggaacgccttgaacgagccgaggtccgccataatctcatcgtccggtttgaacgagctgacaaccatgaagatcagtgggaaagcgaacaggcaggcgaacaggatgcgtacgatccacccgcccacggacagccggttgtgcttgtaggcgactttcttggcttctttcgacgtgcgcttgtcgtgcgcggtttggtcggcctgcggggatgcggccatagttgttgcgttgctcatcgtcagtccctttccttacttctctcgagtcagataacgctggatgccggtgatcaccatgatgatgcagaagaacacgagtgtgatcgcggaggcgtagcccatctcctgctgctggaagccggagcgcacagcctcgaacaccacggtggtggtggcgtcgcgcgggccgccttgcgtcatcacgttgatctgagtgaacaggctcatcgcggcgatggtgatggtgatgaggatcatgttgcgcgtggagcgcaggcacggccaggtcacgttcttgaactgctcccaggcgttgcagccgtccagttcggcggcctcgtacagttcgccggggatggtctgcaggccggacagccagatcagcatgtgctggcccaccgcttgccagatggacatgacgatgatcgcgcccattgcggtgcgcgggtcgttcagccagtcgactgcctgccagtgcccgaaggtgagtttggccatgacctggttgagcatgccgtcgttctggtagatgaacatccacagcagggagacgaccaccatcgaggtgacgacgggcaggaagtagaccgtgcggaagaacacggaggagcgcacctgcttgttgatcagcacggcgagcagcaggccgagcccggcttggacgggcaccacgacgaccgcgaacacggccacgttacgcagcgcgtaccagaacgtcgggtcggagaacagtcgggtgaaattgtcgatgccgatgaaccgggtagggttcgggctgattgtgcgcgcgttggtgaatgccagtccgaaggccagaatcaccggaatgccgatgaacagcagcagtaggatggatgcgggcagaagcatcgcccagccgacggcgttctcgtggcgctgttcggcggtggacttccggcgcgtggcgacggtgccggttttgccggcgctggttccgggggtgccggttttgtcggcaccgactccggtaccggacgtaccgcgagtggttgcggttgatgttgcagtggtcatggttggtccctctcagttcttccggtagccgtcggcgccttggatgttgccgtcgatatggttgactgctttgtcgagccaggtgtccacgtcggcaccgttcatgatgtcgccgatggtcttgcggaactcggtggagatgaaattgtatgccggggtttcggggcgcattttgacgtacttcttcgaaatctcggtgaagatctgcatgtcgccgccgtcggagaactcgggcacgagcttctgtgcgccttcggtggtcgggatgttcataccggccttggctatgttggcgatgtacttgtcttgcagggagaatcggatgtagtcctgcgcggcttcaggtgcggggcaggattgggtcatgccgaccgtccacgagccgccgccggtcaccgagccgtggccgaagtcggtcatcggcataaccacgatgtcgtcgtaatccttggcgtacttctggaaagtgctcatcgaccaaatgccgccgtacagcagtccggacttattgttcacgaagtcgagcgcggtgtcggagccgcccttggacgagatgtagcccttggccacgaggtcgcgcatccagtgggcgaattccttgccttccttgccgttgagcacgccgtccgacgactggtagtccgtgcggttcaccaggtcgccgccgaaggactgcaaaatcggtgcgtaagcgtaggcataccattcgcttttgttatcggccgtgccgatttcaaacgggtaggtccattcgccgcttgccttgagcttggccaatgcgtcatccatttcggccttggtccacggctcgtcgaccgtagccacgcggacgccgagcttgtccagcaccgacttgcgggcgaacagggcgatggtggcatcgaaatagccgacggtgtacaggtcgtcgttccacgtgcccttggccgattccatcaggtcgtcggcgcgggacaacaggtccttgtcggtgagcggggcgaggatgccggcccacgcccagtacggggtgttcggctggtccacgtcgatcagacagggcaggttgttggcggatgaggcggagatgatcgagtcgttgtacgagctttgcgggaaggactgtagtttgacggtggccttcttgtctgggctggcgttgtagtcatcgatgatctgctgcacgccggcaagctcggcttcgctgcctgccgtgtgcgtccagatggtgatttcattggcgttggctttcgccgccgcgcgttccgcctcaccgcagccgcccacggtcacaaggcttgcgatggcaagcgttgcggccagagctttgacggctgagcgtcggatggtatggggcatgatgctcctccttatctcttgtttctttcttccttgaataatggggtcgaaccggttcgacatacagtcgaaaccggatcaagtaggatagatgcgtgatttttgggcaggctatcgctgggggtggggccggacccaggattgcttgatgcgcagctggcattcaatctggggtgactgctcgctcagtggcggcggctgaaccttctcgaccgggtatccggcacgaggaaagggatcgggtgcctcgccttcgatgagcgaggccagcttacctactgcccagtagcccatctcgtaatgcggcagttccacagtggaaagcggcggatccagcgcttcggccacaacctggtggttgtcgacgccaaccaccgcgatatctttgccgataatcagcccgcgacgggtggcctcggtgtagatggcccaagcgcgggtgtcgttgaagcagaagaagccgtcgacatccgggtgtttgtcgaagaacgcgggcatgcgggcggcggcgtcgctgccggtgtccatgttgatcatgagttctgggtcgaacgagatgccgtgctcggagagggcgtcgatgtagccggacactcgcccgggctgagcgaccatattgtgcatggtgcccacgtaggcgatgcgggtgcagccggcgtcgatgagatggcttgtggccttgaatccaatgctgtgctcgtcgggcacgatgctgggcgctacttcggcggcatcggtcgaatcggcgagcaccactttgcagccctgcaacgattgaggcagcatcgtcttctgattaaacatgcgtgcgtagatgaagccgtccacgccgaactgccgcagcgtgagaatttcgcgatcggagcttttggctccgctgttgatgcccacggtgagcagcagatatccgagtgtgcgggcggcgtcttgcgcgccctcaatcatgcggccggcaaacggcgtggtggccacttcgtcgctgaggaatccgatggtgcggctactgctggtgcgtagcccgctggccagacggttggtcaggtaaccgagttcggcggcgatggcgcggactcgctcggcgacatcggggctgacgcggccgatatcgcggttgttgagcaccagagagacggtggagatggaaacgccggcgcgattggcgatttgcttcattgtgaccacggttctacctccttgctggcttcattggctggttgtggttggttgttgtgaagttgtccttcattggatcgttatgttaaccacgttaaaaagtcaaacgtttgacgtcaatcgatttacgtatcggagtgtcggttggaatatcaccattttacgctgtgccaaccgttggtcaaaagtttgacttggtgttgactttcagagttcagcttgcggggtggccgagggttttcgtttgtggatgccgcgttccgtgtgaacctcgttattctggatgtgttgtaaacgtgttgaatggctgataatgggtgctatgggcacatttggtttgggtcatgacgtggttgacgtcgccgcattcgccgagcagctgtctgaatccggctcgcgcatgcgctcgctgttttccgttcgtgaggtacgtcaggcggcggatcgtgcacggctgaagaacgatgacgaggccgtccatctggccgccaaatgggcgggcaaggaggcgttcctcaaagcgtggtgcgattatcttggcaatgtcccctatccgttcacgcttgataatttcccgtggcctgaaatcgagatcttggatgattcccgtggtgtgccgcatgtgtctctgggtaagggggcggcgtcagtcttccaaactgattacgcgaattcggctgccggcgctcgctattcctctgcttgttcccctgcttccgataacgggccttatgcagtgatgcaggagcggcggaatgcgcgttcggcgcagcgctcggctctcggtgcggggttgatgccgcatatccatatttctctgagccacgatggtccgattgcttccgcggtggtgacgatttctgtggaatagcgccggtggctcggcgagtcttgggttgtgattatcgaaccggtttgatatattgtaatacaatacgtcaaacgattgatgcgggcaacggatagagacaaaggagtttccggtggctcaaagcaaccagtcggcacaggcaggatccggactggtgcaagcgcggcgatatgttcggcatgaccatgtacaccgacctgttcgccggcgacctcaagaaacttgccgacaagattccgtacttgaaggagcagaagctcacttacctgcacttgatgccgttgattgacatgccgcacccgaacaacgacggtggctatgcggtccaggacttcgacaccgtggacccgaagctcggcaccaacgaagacctcgccgcctacttcggcacgcccgaggcccccgagtgccacatgctatacaacgtctccatcatggtcaacctgtggagcgcgctcgccagccgcgacgtgcgtctgctcaagaaccagatcgacaagctcgactcgctgcccgaaaactgctggttcgtgattctggacgcgatggacgccgacctccaaccatacgagtctcagctcacccatttgtgatttcgacggtttctagctcccctctctgaggggagctgtcgccgtaggcgactgaggggagtcctcggcaaagccgcaatccatcaactagattggctggtcctgctgcaaccacacgcgtttgccatcctcgaagaaatatgtataataactcaagtcgccaaaagcgacgcttaacgcggatgtagctcaatggtagagcctcagtcttccaaactgattacgcgggttcgattcccgtcatccgctccactgaaagaggccgcaaacccttggaattgcttggggttgcggccttcggtgttttcggtgcggaaaacatgccgatgcaagttttccgcccaagtccaccaatttccgcccgaaatgtttgacctaatgtttgacctcgaccgcacgaaaaggaagaggcctgaagcccatgacacagcagaagaacacccgccgacccaacggaagcggaagcgaatggcgcgacgacaacggagtctggcacgcgaagaagagcgccggcgtcaatccacgaaccggacgacgccgctggatcgaggcgcaggcgcagaccaagaccgccgcccgacaaaaactccagaccaagctcgacaaacttcaacgagaaggcgacctgcccctcgcagacgtcccaaccctcgacgtgtggatagaccgatggctcaacaccatcgcgcccaacgtcaaaccccgcaccctcgaaacctaccgatccgactgcaacaccatccgcagcgtcatcggcggaatgcgactcgacagaataacccccgccaccatcgacggaatgtgcgccaaactcgccaaggaacaccgaagcaaaaccgtccacaaccactatctcagactcaggcaggtgctcgacgcagcggtccgcgaacgcctcatcccatcgaacccggcgctcgccgcaacgccgccgcgctacgagtcgcaggccacccagatcctcgaacccggacagccggcccgggcggcgcaggccgcactcgaccccaagcgtcgcaaatacagccacctggcagataccgacgacgaccgcgaaatgtggagcctcatgtggaacatcatgttcgagaccggcatgagagaggccgaaagattcgccatcctgcccgaagagctcgccaccgtcgacggtgtgcacggaatccagatcatgtgggagctccaacgcttcagatccgatgcagaagtgcccaactggctccgctcccgccattacgagggatgcttctggctcgtcgaaccgaaaagcaagcagggcaaccggtttgtgcccgtcagcaaccagacgtggctcggactctgggcgctcgtcggacgcaggcaatgccagcccggccagctcatattcacgcgcgagggacacccgctcaccaacaccgtggaacgccg

SEQ ID NO: 1151 - DNA, 9484 bp, Unknown
  R81_24m  MAG No. k141_8825
tattgtggtgctggtggccatcgctggattcgccgtatacaaggctatgcggccgtccaacaccagcagcagtagccagcaaagcaacatgaccgtggacgaggcctatagcaagctcaagaaagtcagtacccagccggccaacgccgatgacaaggccggcttcgtgatctcgagcaaggggtacggtcagaaggccgaaggggcgcccaccgtttccatctacatggagccgctgtgccccggctgcgcctcggtgaaccgccagcttgacccgacgctcgtcaagctgatgaacgccggccagctcaacatcgatttgcacttcctcaatttccaggacaacaagagctccgacaactactccaaccgcgcgttcaacggtgccatctacattgccgagcatgatgacaatcccgatcacctcatgagctacctctccaacatctacgctgaggatttccagccgggcgaattgtccaattacgagccggtaagcaacgccaagctggagaagcaggccgtcaatgccggcgtgagcgagaatgtggccaccgcggcattcagtggtaagaacgaatacgtcaagtggctcaccgcctccaacaactacacgatcctacgccccgaactgttcaacagctccggcgcgttctcctcccccacgctcaccatcaatggcgaatactgggatctgaagcagctcacgctggcggacaccagcatggtggacggattcctcaagtccatcggcttggactccgatcaggtgggcgtggaaggccagatgccatcgatcggcgccaacaagaagccgatttcgctggccgattaattaccggcgcggctcggcctgaattgaccactcgagaactaccggtatactagagatttgttcaaaacgatttacgcgttaagaacaatcgcctctttagctcagatggccagagcggccgccttgtaagcggcaggtcgtcggttcgatcccgacaagaggctcgacgcgtagaaaagtggcgtattatatgatacgtagatttttctacgcatataattcttaccttgggtaagtactccaggagccttcccccaactatgggcttcctggaatgagggcggagcgtcccccaaccagctccgcgccttcaggggggcgggaacatccccttctctcccgccccctttttcttttctttttttgagctcagaacaatctgacgagcaggaatggtgacggtggccggtgaaaccgcagtacgggccggaacaaccgttacgatgggtggcgtaatcgttcatccagcaggaagagtatggcaatggcacggcgttggaccccgcagcggtttgttacactgcgtcgcatccgcgtaatcgcctgtatcgcggcgaccagtatcgcgctggctggatcattcgcgttcaccgcgcgtaaatccgtagccctgaacatcaacgggcaaaccacccaagtcaccacatatgcgatgacggccacccgtcttctggaggaacaaggggtggatatcaagacccacgatatcgtcactacctcgtccggcgaccaactcgccaatcatgccgtggtcaccgtacagtccgcctaccagaccactatcaacatcgacggcacgtccgttcccttctggaccgtggccaccagtgccgaccagctgctgggatttttcgaggaaaaccagaacaacgccacaaaaatcaccgtcgacatcgacaatgtgtacaaccagctcaccggcggactggtcatcaatcaggatggcccggtcaccgtcattgcggacggcaagacttccgtggcccccaacggcaaactgcccgcggcctccattcttgactccaaaggcatcgtgctgaacaaagaggaccgtgtgagcgtcgaaaaggacggcgataccactatcctgcgcgtacggcgcgtgacgcatggcgaggaaacacgcacagccgtagtgccatactccacacaaaccatcatcgactccaatcttcctgaaggccagtcggagatccgccagcaaggcgtcaatggcgagaaaacccaggtgtataacgtcacgtatgtcgatggcgtggccgaatcggagacgctgaaatccgaaaccgtcaccacgatggccatcgaccagatcatcgccgtaggcgccgccaagtctgataccgataaaggttccgataagaaatccgactccgccgataacggcaaggccgattccggttccaacaatcagcacgagtcgtccggtaacaatgccggcaacaccggcgacaagaacaacagcagctctggcaacaacacgaacaccgataccaacaacaatgccggcaacaccggcggcaacaacaccggcaacaccggcggcaacaacaccggcaacaccggcaacaccggcaattccggtaacactggtaattccggtaacaccggcggcggtacgaacaacaattccggctcttccggctccgattcaggaacaaccaccacgccctccggccgactctggcacgccaccgtagcccaggctcaggcctatgccgccggtgccgccgcgcagcgcgggtggacaggcaacgactgggattgcctggtcaaactatggaaccgcgagtccagatggctgtggtatgccgaaaacgagagctccggtgcctacggcattcctcagtcgcgaccagcagacaaaatggctgcgttcggcgccaattaccgtgacgatgccgccgtacagatcgattggggtctgtggtacatcgcacaaacctacggcagcccgtccaaggcatggcaacattccgaacaaatcggttggtactgatcggttacgaagcccacaaggaacacacgcttatgaacgacaccattcccgccaccggtcacctgttaggtgccgccgatatccgtcgtatcgcggccgatgccggcatcagccccaccaagaaattcgggcagaacttcgtcatcgaccccggcacggtccgtcgtatcgtacgagaggcgggagtgaccgctgccgatcatgtcatggaagtcggccccggcctgggatcgttgacattggcgattctggaaaccggcgccaccatgaccgcagtcgaaatcgatccgccgttggccgaacgactgccgggcacagtcgccgaattcatgcccgaagccacgtcacgactcaccgtcgtcaatcgggatgccttaaccgtcaccccggagaacgtgcctgatttcagcgatgacgcatcgtttacgctggtcgccaatctgccgtacaacgtggccacgccgattctgctcacgctgttggagcgtttcgacaacctcggctcgttcttggtgatggtgcaaaaagaggtggccgacagactcgccgccaagcccggttccaagatctacggcacgccgagcgtgaagctcgcctggtatggcaccgccgaacgggtgggcaccatcggccgcaatgtgttctggccggctcccaatgtggattccgcgctcgtcagattcacccggtatcaggccgatgacccggccgccccgggagcctcgaacagcacggccgacggcggcgcacaacgggaactcgtatttcgtctgattgatgcggcgttcggtcagcgtcgcaagaccctgcacgcggcattgaagaccattgcgccctccgaggcattctccatcgccggcatcgatccgacccgtcgaggagagacgctcaccatcgccgaattcaccgctctggccaaggccatcgaatcgtgtggagatggagatgaggcacaatgagtccggtaatctcacatccacgcccagccgctgcccgacatcagttcgatgagctctcccccatcaccattacggtggattgcccggcgaaaaccaatctcaccttggaagtgggacctgctcacgacgaatggggcggacgccacgaactggacaccacctactgtgcaatcggcgtatacgacaccgtcaccgcaaccgccaagcaacccggagcgggattctctctggagctcgaaggcgcttatttgggcgacttggcctcctcacgcagcgacatgcgccgcaaccatgcggtactggccctcttcgccatggcccaggcggccgagcgcgagccggatgtggcgttgaccatcaccaagcgcattcccgtgggtgccggactaggcggcggttcagccgacgccgcggcgaccatgctggcggtcaatcgtctctgggagctgaactggcctatagagcgtctgcgcaccattgccgccacgttgggcgcggatatgccgttctgcctgaccggtggccttgcatacggcaccggtttcggcgaacgcatcacggatatcgcccccggcagccgcgatgagctggcgctgatagaacagggattcagcggcgaagtattggtcggcgcgtaccagtcgcaactcagcactcctgaggtctaccacacctttgacctcgtgggagccgcagaaggcgaccgcaatcatctgcaggctgcggcaatcagcctgcatccccgcagcgggcaggccatcgacgccgccacgcaggcgggtgccagccatgcattcgtctccggatccggcccctcagtggtcgctttcgccgccgacgaggcagcggcacaacgcattatcgatgtgtggcgcgatacggctgtggtcgatcgcattattcgagccaaatctcccgcacaccccaatatcggcgtcagacagtgacgctaaggtagcaaccagccacccgacccatgaaagaagtccaccgatgacgtatcaggttgatgaacgtgaagcccgcaaggcgtacgtgcgccaccgccagaccatcgtcttttccatcagcggcgcggtattggcagtagtgctggtcatagccctactgttcaatttccacgttttcggcctcggcgaagtggagactccggcccgccagccgaattacggcaacgcggcaccgtgcgcggtcaaggacagcagcggcaaagcgcaatacgtgtccaacgcttcggtcggcatccgcgtgatgaacggcacctctcacggccaattcgccaaggccgtgggtgaggctttggccaatcgtggattcagcgtgcagaaaatcgataactattccagcaccggcgttgaacgcaccaccatctacttcggcaagaacgccattaatcaggcgtatacgctgatcggcaatttcaccgacgccaccatgatcatgacggctcgcgaggatcaactcatcgatgtggtcatcggcgccacgttcaacgatctgcaggacaccaaatcctccccacaatccggtaagaccatcaccaatatcgagggttgcaaggccgccgatagcatgaccaagctgcccgccgacaccaaacacgacgcatacacggcggagtaaggcgcatacagcttcatcttcgcgaaaaaccgtacgctgacacgtattcagcgtacggttttttggtatcggactagtatcggactactgaatctcggcgtaccagcgcttgagttcttcgacggccacatcgtggtccaccggaccgttatccaagcggtattccagcatgtgcttgtaggcgcggccgatcatcgggccgggctccaggcccagcaactccataatttcgttgccgtccagatccgggcggatcgcgtcgaagtcctctttcttcttgagttcgcggacgcgctcctccatctcatccatggcctgggagaagatcatcgccttgcgcttgttttgtgtggtggcgtccgcgcgcgtgagcctgttcagccgctcgtacaggtgcccggcatccttgacataccggcgtacggccgagtcggtccacggctcgtccacatagccgtggaagcgcaggtgcatattcaccagttccgagacgtcctcgaccagatggtggtcaaaacgcagcgccttcaaacgcttgcgggtcattttggcacccaccgcgtcatggtgatggaagctcactttgccgcccggctcgaaccggcgggtcttcggcttgccgatatcgtgcatcacggcggccaagcgcagcgtcaggtcgggggcgggcaccgggccgtccgggccggtttccagggcgatagcacgttcgagcacaatcatcgtgtgctcgaagacgtccttgtggcggtggtgttcgtcgatctgcaattgcagggccggaatctccgggaagacgatgtccgcaagaccggattcgaccaacgcctcaaggccggcgcgcggacggtcggagagcagcagcttggtcagttcgtcgcgcacgcgctcggcggatacgatgtcgatgcggtcgcgcatcgaggtaatcgcctcggccgcgtccggcgcgatacggaagcccagctgggccacgaatcgcacggcgcgcatcatacgcaacggatcgtcgtcaaaggactgtcgcgggtccaccggcgtgcgcaacacgcccttggacagatcgctggcaccaccgaacgggtccacgaattgcaggtcgggcacacgcagggccatcgcgttgacggtgaagtcgcggcgggacaggtcgccctcaagcgtgtcgccataattgacctcgggcttacgcgagtccgtgtcgtacgtgtcggagcgataggtggtgacctccaccttgacctcggtgccgtccgggcggcggcgcatggcacccagcgtgccgaacttgcgccccatgtcccagaagccgtcatgcccccaccggcgcagtatcggctcgaactgctcaggccgtgcggatgagcagaagtccaaatcgtggctctttctatggagcagcaaatccctgaccgggccgccgaccaatgccagctcgtaaccctgttcggcgaacagtcgaccaagttcgatggcttcgggccatacttcgaaattcaatgggcaccttcccgcgtgcgacgtttttctgccctaccagcataccgttaccccacctgcacacggggttgagtaaggtggagaatatgattacgcccgccgaccttgcccgcatactggggcaaacaccagattcggcggatagccatacccaagaccacctgctgtatacgtccgaaactccgcatcattccgccgattcgggcgattctcccgatgccggcggcaccgtgagccactccaccaatcaggccgttcatcaagacgaagtagacgcagtaccgactgcgcaacattccggtgtacccggcacacccgcaacgcccgccacacccgcaccatccgaatccgaaatatcggacgccgccagcgacatgcccacaccgaagccgatgatgcccacaccggccaccgtcttcggcatgcatgccaccgtcaccatcgccactaccagcggcactatcgaggggcaggccgatggtatcgccggcgaggccggtgccgagacgattgccgaggtcgagccgatcatcgccacggcacaaacgtccgtaaccatcgtcacgaacgattccgcggcgaccgcccacgcggccgtagatactgccgttgcggtcgccaaggccgccgccgcgcataccgcagcgataccgactccgcgcgacgtgctgatgccgcctgcggcacgtaccgcaccggccgcaacgccggtcaccatgccggtctcagcgccgtctgcagcaccagtgaggcccgcaacgtcagcgcatcccacgccggccacggtcttcggccggcatccgtccgcggatgttgcctcgccggaaccggcagtgccagtagaaccggtgacgccatccagcccgactccggccatgatgccgcaacgccgtacgtcggacggtccgaccacattcgcttcactggatgcccaggaactgccggtcgtacgcgaatattcggcaggcggtctgattttcgatgaccagaaccgcgtggccattatcgcccgtcattcccgctccggccatctcgaatggtgcttgccgaaggggcatatcgaaaaaggcgagaccccgcagcagaccgctgtgcgcgaagtgcatgaagagaccggcatcctgggcgaggtgatcgattccatcgccaccatcgactactggttcaccggcaccacgcagcgcgtgcataagctggtccatcacttcgcgctcaaacagaccggcggcgaactgacggtggaaggagacccggatcatgaggcggaagacgccatctgggtacgttttgaagatttggatgacgtgttgagctatcccaacgaacgcaaaatcgcgtggctctacgccaggaagaagaacaggcaggcaaacgagtgaacctacccggagtcttacgacattgcacacgtctggcacacgcactggcggctggcgtcgccgttgtggcgatgctggccgctccattgaccgtctacgcgaacgatacgacggacacgactgattcatccgatacgacggacgcaacgggcaatcagaccgagaatcagcccaagcagagcattgccatcacgcaaagcacccccatcgtcacctccaaatcgggctatcatgtcaccgcggtcatcagcaatacggacagcacggccacgtcaagcggcacactgcacctgaccaccaatacgctgttcacctttgtctcgcgcaccgatattcagaattgggccgagaacaacgcccccatccccacccccaacgagttgggttccgttgacgtgccatcgattcccgccggcggcactgccaccgtcaccatcgaggtgaacgccaatcagcagacccttgcctccatagggagctgggggccgaagccgctgatgctgtcgtatatcgtcggcaatcggatactcgccgatttgccgagttttctgacccgatcttcggatgggctcaacaccgcgacgacaccggccatgaacctgaccgtggccatgccctacaccgccagcggctggcaggtcgataacaaggccatcagcaatcgcattgccgaaaccaccacttcctcgacatcaacatcgtccaagtccaacagcacggacaaggccgacaagtccgataacgccgacgccggcaacgcggccaaagccactgatacgcaagccatatccttatccgggcaggatgccgataccgcgcgatcccttgggcagacattcgccaagcaccgctcgctgcaagtgatcgcggatcctctgtattggcgtcagtccgcagtgcaaccgtccattgccggcatcatgcagcccgccgactttgacatcaccgcctataccgcgctgggtgataccgcggcctacgaaaaggccggcatcaccactgaacagtggaacgccaagcaggcggccgcatggtatgccgccggaaacgactccgaaacaccctccgcgtacgcatggcagggcaacaactgttggacgttggatgcgctgaccgcggcacgcgagcagggctatgacacggtgattgccgatgcctctttcgatgccgaccagactgaagccgtaca

SEQ ID NO: 1152 - DNA, 22936 bp, Unknown
  R81_24m  MAG No. k141_8917
tacctcgcgtcagctgcttgattattgaaaacttggcagggaaggcgggactcgaacccacaacctacggttttggagaccgttgcgctaccaattgcgccacttccctaggtgaaaatccacctcggcgtgcattccgtaaagaacgcttcgccacggcgaaaccgccaagttgttatagtaacggctccggtggattatcgcaaatcgcgtgtcgcgcgcgtggcatgtgcgcggcacacgactcttctcagttagcccattccttgaatcgacgcatgccttcggctaggtcttcgtcggccagtgcgtaggagaaacgcaggtaaccgggagcaccgaaggcctcaccagggacggcggccacgtgggcctcatccaacagtgcggcggcaaaatcagcggacgtatcggacacagtgccgttgggccccagcggcttgccaagcaaagcggtgatgtccgcaaaagcgtagaatgcaccggtcggagtcgggcagttgacgccctcaatatcgttcagagcagccacgatcgcgcggcgacgtgcatcgaacgccttgcgcatctcatgcacctcgtccagcgggccagccacggcggccagagccgcacgctgggagatgttggccacattggaggtcatatgcccctgcagcttggtggcggccttggccacctcaagcggcgcgaccatccagcccacgcgccagccaggcatcgcataggtcttggccacgccgttcagcaccagcagctgcccgcggcattccggcacggcggcaccaatgtaggtggtgcgcgcgtcgtcgtagttcaggtgctcgtagatctcgtcggagataacccagatgtggtgctcgacggcccaacgaccgatcgcttccacggtttccggcttccagacggctccggtcgggttgttcggggagttgacgatgattgccttcgtacgctcggtacgggccgcttccagcgcctcaagcgagggctcgaagttcacgtcggcaccggcgaatacttcgaccggcacgccacccgccaatttgacggcttcaggatagctggtccagtacggagcggggatgatgacctcatcgccatcgttgagcaagatctggaaggattcatacacggcctgcttgccaccgttggtcaccacaacctggtcggcggacacctcgtagccggaatcgcgcagcaccttagccgcaatcgcttcgcgcagctcgggcaggcccggcgtaggcgtgtacttgtaattctttgggtcaaggcaggcatctgccgcagccttgaccacgtttgcgggggtcgggaaattcggttcacctgcgccgaagccgataacgtcaagtccggcggccttcatggccttggccttggaatcgacggcgagcgtagcgctcggtgccacagtgttgatacggtcggaaagagtctgccattgcgccatagtcatggcttccatgctaaacctacagcacgaaaaatcgccagagccgcactatggtgatgggatctgtcgtgtgacagatcccatcagtcacacaagtacaagattgtcgcgatgaaccagtgggtgggcgtactgggggccgaggaaacgcttgagttgggcggtgttacgcccgagcatctgcggaatttcttcggaatcgaagccggcgaggcctcgggccaggtgttcgccgctttcggcatcgatccagaccggatcgccggcggaaaaatcgccatgcacttcgagcgcgccggccgccagcagcgaggcacgcccgccgcgaatcgcctggccggcacccgcatcgaccacaatagtgccgcgcgggtcggcggcgaagccaatccacagacgacgcgacgaaccgcgggccttaaccggtgcgaacacggtgcccaccggatcgcccatcatcgcagggcccgcgttcgaggcgcaagtgagcaccgtggggatgccggagacggccgccacgcgcgcggcctcaagcttggtgaccatgccaccggtgccgaccttggagccggagccggaaacctggatgtcgccaaatgcatcgataacgttgggcacatattccacacggcgggagccgggctgggaaggcggtgccgtgtatagcgcgtccacgtcggtaagcaataccaaagcttccgcgcgaactaggttcgcaaccaatgcggacagacggtcgttatcgccgaatcgaatctcgttggacgccagcgaatcgttttcgttgataatggggaccacaccaaggtccagcaatcggtccagcgtgcgttccacattgcggtactgggtggcacgaatcgtatcttcggcagtgatcagaatctggccgacgcgaataccgaaacggccaaaagcagtctcgtagcgagccataagcaaaccttggccgaccgctgcggtggcctgctgagtagccacgtcggccgggcgttcgtcaaagcccagcgggccgaagccggccgcaatagcaccagaggaaaccagtactacacgcccgcccatcagtcgtatttgggcaagggcggcggccagagcgtcgagcttgcctggatcgaggtgaccgctcggctgcgtcagcgaactggaaccgaccttaacgacgatggttccagcggatgcgaccatgcgccgcacctcggcctgactcggagtgctcatttattcctcggtttcaccatcttcgctggactcaccgtggccgaacagactggtttcgtcatggcgatcgtcgtcaacggtcgggtcggcccagtggccggccttgcgttcggccatcatcgcatcgcgcacggcggcacgggcgtccatcatctcgtggtattgggcacgacgttcggcgttggagcggcggtgcatgcgcgggtcctgttcctcaagacgcagatccttgcctcgggcaccgaggttggagccatcgagcatttcggcaccggcggagatggtcggatcccaatcgaattcgaccatacgggcaccgcgaccgatgcgcacctcgtcaccagggtgggcacccttgcggcgcagctcatcttccacgcccagcttggccaagcggtcggccagatagcccacggcctcgtcgttgtcgaagttggtctgcatgacccagcgctccggcttgacgccacgcacctcgaagaacacttcgccattgccgagttcgcggcgctcgaccgtgaactcaagcgcactgccgccctcgtcagcgcgacgcggacggcggcccttggtctccaatggcttgataaccacgcgcgtctcctcttcggcctgctcgcggttggccacttcctcacgcatctcatgcaccagcgcagacaacgcgaagttgagctccttcagcccctcatgagaggcggtggagatctcaaagaccttcagcccgagtttctcgaactccggacgcacgaactcggccaattccttggcctcgggcacatcgatcttgttcagaatcacgatgcgcgggcgttcgggaatcgggatggcgcccaatggcagttcgagcttgtcggcgtagagtgccaactcgttttccagcgcgtggtagtcggacatcgggtcgcggtccggttcaagcgtggcgcaatcaatcacgtgggcgatgatttcggtacgttcgatgtggcgcaggaactccagtcccaggcccttgccttcagaggcgccaggaatcaggcccggcacgtcggcgatggtgtatcgagagtcgccggcgatgacgacgccgagattcggcaccagcgtggtgaatgggtagtcggcgatcttcggcttggcggaactcatcgccgcaatcagggacgactttccggccgaggggaaaccgaccaacgccacgtcggcgatggacttcagttccagaatcacgtcgcgttcctcgccgagttcgccgagcagggcgaagccgggggcgcgtcgggtcttgttggccagggcgatgttgccgaggccgccggcaccgccctgggcgacgacgcagcggtcgccctcgtgacgcaagtcggcgagctgtgcgccgggatgcttggatttgccctgttcgccgcgcgcctcaaagacgacggtgccgcagggcacgggcagaatcaggtcctcgcccttggagccgtccttattgtcgcccaaacccatggtgccgctgccggcgacacgatgcggcatgaaacgatagtcgagcaggctggtggcgttacggtcggccacgaacaccacggaaccaccgtcgccgccattgccgccgttcggaccggccaacggcttgtatttctcacgacggatgccggccgaaccgttgcccccatcgccgcccttgacatggacggttactcgatccacaaaatcactcatattgattaccttacaaaaaagccgcgtccttacgggcgcggcttgaaaaagcttgacgctatatcgctcaggcgatgacgtcgacaaccttgcggtcgcgacgcacaccgaacttcacggagccatcggtgagggcgaacagcgtgtgatccttgcccatgccgacgttctggcccgcgtggaagttggtgccacgctggcggacgatgatgttgccggccacgacggcttcgccgccgaacttcttcacgccgaggtattgcgggttagaatcgcgaccgttgcgagagctggacgcacccttcttatgtgccatgattcatggtcctttctataactcaggcaatcgccgtgatcttgacgatagtcagcttctggcgatgacccttacggcgagcaacaccagtcttgttcttgtacttctgaatgtcaatcttcgggcccttggcttcatcgttcacaacctcagccttgacggacaccttggccagatcggcggcggcgagggtgaccttgtcaccatcgacaacgagggagaccgggaattccacggtatcgcccttcttggcgtcgagacggttcacgaggatgacgtcgccaacctcgaccttttcctgatggccaccggccttcacaatcgcgtacattatcgttccttttatgttttggaaagctaccttgcctaacacgcaccgagcctgcggtcagacaccgagtttcaaatctacaccaccatgcggactaaatcaaatgatttttgtccgcgtgtcaagcacgacacacctgttactcttccgccgtattgttggcggcgacggcagcggcggcaatctgagccagtttggctttgacgtcggcgctggaaccagccggttcgggagcgggagcggtgccgcgaccgtgcttgttggttttgacgaacgggtcaccaccgcgaagcgcgtagggatcgtcgtagtcggccgaaacggtcggctgatcatgcaggatgaaaccacggcccttgcaggtcgggcattcctcggagaacgcctcgaccagaccctggccgatgcgcttgcgggtcatctgcaccaaaccgagcgaggtgacttcggccacctgatgcttggtgcggtcgcgtgccaggcattcgaccaagcggcgcagcaccagatcgcggttggcgggcatgaccatatccacatagtcgatcatcaccatgccaccgatatcgcgcaggcgcagctggcgggcgatctcttcagacgcctccaagttgcagcgcgtcaccgtttcttccaaggacttgcccttgccgataaagcggccggtgttcacgtcgatggtggtcatggcctcggtgcgatcgatgacaatcgagccgccggacggcaggtagacctgacgttccatgcccttacgcagctgggagtcgatggaccatttgtcgaacacgtccttgccttcgtgctcggccgggtcccacttctccagcttgtccttcaggtcgggggccatggtgtcaaggtattcctcgatacggtcgtagaccttgtcaccttccacgatgagcttgctaaagtcgtcgttgaagatgtcgcgcaccacgcggatggccacgtcgggctcgccctgcaggagtttcgggcgcttgccgtgccagaattcctcgcgcttggcgttgatgcgctcccactggcggaccagtgattcgagatccttgacgatggcgtcttcggatgcgccttcggccgcggtgcggataatcacgcccatgtctttcggggcgatcttggagacgatgttcttcagacggctgcgttcgcgctccgaaagcttgcggctcacgccggtcatgccaccggagggcacgagcaccaggaagcggccggcaagcgtgacctgagaggtcaggcgggcacccttgtggccgatcgggtccttagtgacctgcacgagcaccgggtcgccggacttgaacgccagctcgatgcggcgcggctgaccttcgagacgagcggcatcccagttgacctcgccggcgtagagcacaccgttgcgggactggccgatatccacgaatgcggcctccatgctgggcagcacgttctgcacgcggccaagatagatgttgccgacggtctgtacttcctgaatgtcggagacgtaatgctcgaccagaacattgtcttccaccacggaaatctgggtgtggtggtccttctcgcgcaccaccatcaggcggtccacgttctcgcggcgtgcaaggaagtcctgttccataagctggctctggcggctgcgctcacggcggttgtcacggcggcgctgcttcttggcctcgagacgagtggagccttccacatcggtgatttcgtcgatgtactgctgcttgcgggagcggcggaccagcggctgttcgctgttctgactctggtcgtcggtgccctcgccgttcttgccgccacgacggcggcggcgacggcgagtgacggtctgctcctcatcgtcctcatcgcgatcacggtcatgatcatcgcgatcgtcacgacggcgggaacgcgtatcctcggcatcgttctcggcggtatcgtgctcgccgttggcaccggtttcgccgcgtgaaccacgacggcggcgacggcgcgaacgggtgcgggtgacgtcggattcctcgtcgccctcctcctcggcaatcggcgagtaggcgatatcgtccagctcgaggtcttcctcaatctgctcgacttcggcggctgcacggcgctcctgggcgttcagacggcgggagcggcgcgaacggcgggagtccgaggtgtcgtcggcgtcgaaatcgtcgtgatcggcgttggtatcgccggacgcggcgtcacgggaagcgtcacggtcggcggaggcgcggccgcggtcgtcgcgatcgtcgcggcgacggctgcgcggctgggcatcgtcatcgtcgtggctgcgcgagcggcgggagcgacgagacgggcgttcgtcggcgtcaacatcgtcatcacgagtgtcagcggtatcgtgcgcatccacggcggcgggcagcaccggttcctggaacagcagggacgtcatcggtttgccacggcgcacggtctcgtggccagagggcagggattcgaccgcgtcgaacaggcgctcatccggggtatcctcgtgcgtatccgcaactgcacggcgagaacgacggcgaaccgtacggtcttcgtcatcatcatccatatccataggcgcacggcggaggcgggagcgaaccgggcgatcctcgtagtcatcatcgtcggactggcgggagcgagagcggcggcgaaccgaacggtcctcgtcgtaatcgtcatcgtccacgactgaacggcggcgggaacgcggggcgtcatcgtcatcgaaatcatcggcactgaccgtgcggcgcgaacggcgcggacgatcatcctcgctatccaagtcggccactgcggaagcggcgcggcgcggacggcgcggagtctcgtcgtcatcatcggtatcgctggaagatgcggcggacgtacgacgggtgcgacgcggcgtttcggcggcatcgtcggccgtggaaacgcggcgcgtacggcggcgggttggacgttcggcggaatccttggaatcgctggattcatcggaatcgccggaatcggatgacttggaatcggccgcggtgctggcattgggaagcgcgggggcttcgaacagcggggtgcgttcctgcacttgcagttccagggaggcgccggcagcaccggtgccgcggaccacgcggcggccgccacgacgacggcgaacaggttcgacgggctgggaggcggcggcaggcgcagcgttcacggctgcagccgaatcggcattggatacggttgaattatcggttccgtcgttgacgaaaccttcacggttgtcagtgggcacaatgctcctcgcggcgcgctgcatcacgacgcctatttccaggcctatacgcttgactcacaccacgctctcaccgtggccgcgcgaaaacgcgccgcgtaaaggcaacttcgtctcaagtctgtcctgcgggtggcggacaccggcgcttgcgttgtctcattctcgagagccgcaaggggatcgacgccatctcgcacgctgatggttatgcagaaccaccatcctttagtatgccacatattttgtgcgggcgtggcccggcgaggctgacgttctctcggctcccctccctgcggtgacagctcccctcagagaggggagctcgagaggtgtcagaccagccagtcggtaagaattgcggtcatggcggccaggtcggattcgggcacctgctcgtcgtgcttgtgcgccagcagcgggtcgccggcaccgaggttgacggccgggatgccgagctgggagaagcgtgccacgtcggtccagccgagcttggccaacgggtcgcggccggtgcgctccttgaccagtcggaccagatcttgggcgagcggggcgttcaggcccgggcgcgcggaggggctttcgtccttcatttcgatgccgtagccctcgaacacgccgccagtggccacatgctcgccattgccgagttcggcaccggcatccgcgcccatcatcagagccttggcctcggccagcgacttgtccggggcgaagcggtagttgacgtgtacgcggcattcatccggaatgacgttcgtgcctttgccgccggaaatcagcgtggcgttgaggccctcgcgatagtcgagcccgtccacgttcacggtggccggctcgtaagcgttgagtcggctcaggatgtcggccgccttgtggatggcgttctctcccatccacgcgcgggcggagtgcgctgccacgccgtgggtcacgacgtcgaagcgaatcgtaccgttgcagccgccctcgatgccgctgttggtgggctcgccgatgatggcgaaatcgccggtgatccaatcgggatgggcctcgacgactttgcgaaggccgttcttttcggcgacgacttcctcatggtcgtagaagacgtaggtgaggtcgactttcggggtggtttccggcgtgcggccgtcgagcgtggcggcgaggtagagcatcaccgcgtcggaggccttcatatcggtggcaccgcggccccacagcacgcggtcttcgggatgagcgtgggcgatttcttcgcgaatcagcgaatcgccgggctccagccacttcggtgggaaattgtcgatgaccggcacagtatcgaggtgcccggccaagatcacacggttcggctcgccgaagtcggtgccggccaccactgtgtcgccgtgacggcggacggtcaggtgctcttgctcgttaaggaaggcctcgacctcgtcggtgagggggccctcgtggtcggacacggagaagttctccatgatctgggtgagcaggctgttcagctgctcggcagtggatgcggtgcggttcaattcaagcgtcatgtgaacagcgtaccgcgtgggcggcgggcccagcacacccactacatgagattttgcggccgaatacatttttatgtgccacactggggtggcgaaagggaggattatgtcaggtctaatcagcgccatgcaaggcttctgcgttatcggcatcgtgattgcggtgggatatgtcgccgcacgaatgcgaatcggcgggccgtccgctcagatggtgctcaaccgtttctccttcttcgtatcgagcccgtgcctgatgttcgccatcctctccaaggaaccgatcttcgacatcttccatccctcgattatcgtggcgttcttctccgccgtgctggtaggcgtggtgttcctggtgctcaaccgcatgttcttccacctgaacgccccggacgccaccatcggcgccctgaattcgctgtacctcaattccaataacatcggcctgccaatcgccacctacattctgggcaatccggctctggtggcaccgattctggtcatgcagcaggccatcttcacaccggtgggcctgacagtgctggacgtgaccaccaagggcaaggtctccatcaaggaaatcgccaagcagccactgcatcaaccgctgcttatcggttcgctgctgggcattgtggtctctgcgatttccgctaaaagcggctggttcccagtgccgaaattcattttcgacccgatcgacatgatcggcgattcagcggtgccaatgatcctgatggcgttcggcatgtccctacacggcaccaagccgctgcagcagaagggcgatcgcccggccatcttcacggtcgcggtcctcaagaacatcatcatgccaatcatcgcgttcctgctcgcctatttcgtgatgggcttccgcggctccgagctgtacgcctgcgtggtactcgccgctctgcccaccggccagaacgtgtacaactacgcggcccgctacaacgtgggcctcaccttcgcgcgcgacggcattctgatgagcaccatgaccagcccggtgtttatcgcgatcatcgcggcgctgctgagctgagccggcaactgtaatcaccgtaaaaaaaaacttccgcgaaatccaccgtaggattccgcggaagcctgagatatacgctacttgagaatcgccttaatcgcctcatactgctgagcagtgagttgcaccgctggctcacggatcagggtggaaatgttcagtcccttggccttgaccgcacccttgatggcggagatgaacaggtcggtctgatcgtacagcgccatcaggtggctgatgcgttcggcggcctcaattgcggtgccatagtcgccggcctcatatgcacggtgcagcgtaacgaaggtctccggctccacattggtcatgccgcagatcacgccatcaccgccggagacgcggttgacgagatagtactcgtcgaaaccggagaacaccgcaaaccgtggattcacggccttgaccgcgcgaatcaccttgcgggtgtggctgattgtgtcgaccgtgtccttgatgccgacgatgttcgggtgcgcggcggcaagctcggccacgagctccggggtcaagtcgctgccggtgcgcggtgggaaattatagaggatcaccggaagattcgtcgcttcagcgaccgcgccgaagtacgccttcgcgcctcccgcagtagggccgaagtaatacggcgaaacgaccacgagcgcatccactccacttgcttcgactgcccgcgcgaagtcgatcacattgttcaagttggtatcgcccacgcccgcgaacaccttgatgcgcccggcgacatgcttggccacgaagtcgaccgcctgcttcttgacgtccagagggaaggcatagaactcgccgatgctgccaaacaccagcacgccgttgataccggcctcgatcagatgatcgagatgctgcccccaacgttcatagtcgatgtcaccgtcgtccttggtgatggtgatggatgggcagatgatgcctgagaattcggcgctgcttgtcatgattgttcctttcgtcacggaataggggtgccgcacaagcggcaccgggtttgcggcctctcccccagtcgtcctgcggacgatagccccctcatcagagggggcttgggtttagtcgatgttgtaagcgcggcgggcgttgttttcgaagaagtcctcgtcctcgccgaacgtgtccagcatgagttggaagtgcgtggcaaaggtcgagttgagttccacgaccggccagttggagctgtacagcaccttcttcgggccgaatgtgtcccgcacgtatttcacgatgtccgggtccaccgggttgtcgccggaaaccttgatatacgaattcggcagttcggccaacgctgcgagtgcggcgcacgattcctcatcaagcccgggcacgttgccgagatgatcgatgatgaccgtcacttcaggaacctgcgagaacgccttggccatgtcgcccagttccgggccacggttgcacagctcgaatggcaatcccttggcggccatcgcgcgtagaccggcgatgaattcgggttcgagcgcacggccccgcggctcggaatccacatgcagcggttccctgatgccatcggcattaatcgggacacgcatccaagggcttacccgcccctgcagcatgcgcttcaggatcagaggacttgcattctcgtacagcagccggtcctcaagctcgtgatcggccgcgtcgacctccacatatacgccgccgaggaaattcacgccaaatttggcgtactgtgcggctaggtcttcaatcgtgtacttgtgttgcagcgagggcaatcctgccagccatggcagatcctgcgcatccggatcccagatatggaagtgggaatcgattacgttgagtgtcatatcaggcctccttcagaccgatcttggaaccccagaatgcgtaccatgccacgaacaggaagcccgggaccatcaccaggatggcgatctcgatgcctgccgcatcctgaatcacaccgagcagcagcggaatcaacgcggcgcccacaatgctcatcaccaaagccgaggaaccggtcttcgccgcggaacccttgatacctttcagcgtcagggagaatatggtcgggtatccgatggaaatgaacagatacgccaccatgaacgcgatgacggagaccttgcccaggccaaggaataccacgaacatcagcacggctgaaatggtcatgtatacgccaagaatcttcgagggatcgaatttggccatcaatggggtggtggcgaagcgtccgatggtgaacagcagggaaagcacggaaagcatcatcgccgcggtgccggctgtgatgcccgcgccccagtgcttgagcgcgtaggcggagaagaccgccatgccggccacttgcaggccgatgaaaatgaactcggcaagcacgcccaatgcgaagtgcgggcgcttgagcaggccgaagaaggagctgttctcggaggaggcgccgcccgcggcctcctcttcgtctcccggaggcgtgggcagcttgaacagcgcgaacacggcgagcaccacgaccagcacaacgccgatcacaatgtatatcgtgcgggtatcattcaggaactgcgtcttagcggcgtcgaagccggactcgcctgatgcgacggtggtgccgagaatctggccaagaatcagcgggccaacgatgttgccgacgccgttgaaactctgcgccatgttgatacggaacgattcgcccttttcatcacccagcttggtgatatacggattgcagttggtctccagcgatgccgcgccgagcgcgataacgaacatggcgaacaggaacaggccgtagctggccatgttggtggcagggatcaccatgaacgcgcccagagcgaacaggaacagaccggagatgacgccgcccttataaccgaaacgcttggcgatcaagccggctggaatggccatgacgaagtatgcgccgtaataggccacctgcagtaatgacgcttcggcgctgctgagttctatgtagtttgcgaacggcgagttcaacgcgttcacgaggttcatggtcaaaccccagataaagaacagtgaggtcaccagcacaatggcgatggtcgccttggaaccggttgtgtttttggatgtcatcattgactccttagtgatacgagtttccccgatattgcctagcgagaagtggaccaccctgggccatgttggtaaacggatgacccagggcgcgggtgatacgggcggcatacgcggatacggcgtacggatggagcaatgatcaaagctccggaattgccgcgcgaatattcgggaaagggctgcttgtcagctcagcgcacggtcaaggtggacatagccgccatcgacgtacacccactgaccggtggtgtggctggagcggtcggagagcaggaatgccgcttcattaccgatctcttcggtggtggtcatacgatgttccagcggaatcttgtcggtgatcaccgacaggcgcgcctgctgggccgcttcatcgccaaaggtcttgatccaatcggcatagagcggggtccagcactcggagacgactatggcgttgacacgcacgctatcgtgcaccaatgcggcggcccattcacgggtcaggcccaggatcgcgcccttggcggccgcataggcgctggtcttgccttggccggtaagcgcggtcttggacgagatgttcacgatggatccgcggctttccttgagatacggcacggccgcgtggaccagctcgtaatagtgagtcaggttgccgtgaagcgattcctcgaactcacgccaagtagtggtctcgagatccttgttgtcgttctttccggcgttattcacaatgccatcgatatggccgtacttcttgtatgttgcttcgacgacgccggcgatcttgtcggtgtcgttgaggtcaagcaagtgcacatcataggtggtggtgtactgctcgatatccttcttgaactcgtcgagagcgctgtcgggtcgattaatcaccaccgggatggccccctcctgggccagttgcagcgtgatgcctttgccgatgcctttgaaaccgccggtgatgatgatgactttgccttcgagatgcagatccatgggaactccttcgtccatccttattctgcgtttcatgggtgttccatgtcacgcccggccggggcttcggcaccccagccggagtggttgtgtgttgttgtgttaagttgtgttgttcagttatgaatttccagttgcggtcagccgcgatacaggtacttctcggccgtctccagcgtcatttcggtaccgttgcccggagcggtcggagcgacgtagttgccgtccttgatctcggtcgggtggacgaaatgttcatgctggttatcgacgtattcgatcatgcggccgtccatcgtgccggacacggccacgtaatcgaacatcgcgaagtggcatacggcctcgcacaggcccacgccgccggcgtgcgggcagacgggcttgttgaacttctttgccagcaggtattcgagcacgatctcctgcggaccggccacgcgggtggcgtcgatctgcatgatgccgaaggcgttggcctgcaggtactgcttgtacaggatgcggctctgcatctgctcgccggtggccaccttgatggggttgatggcgcgcgcaatcgtggcgtggccgatcacgtcgtcggggctggtcggctcctccacccaagccagatcgaagtcgtggaacttgttgatccagtcgatggcggtgggaacatcccacacctggttggcgtccacggcaagacgcacgtcggggccgatggcttcgcgggccttggccaggcgacgcagatcgtcgtcgatgttctggccgaccttaagcttaatctgcttgaagcccttgacctgggtctcctccttggcgagggccaccatcttctcatccgagtagccgagccaaccgggagcggttgaatagccggggtaaccgacctccagcagatgcttgatacgctcggccttgcccttctgaccctctttgagaatcgcaacggcttcctcagggcgcagggcgtcggtcatgtagcggaaatcgagcgtggagaccagctcctccggctccatctcgcccagcagcagccacaacggcttgcccgcacgcttggccttgatatcccacaacgcggagagcaccgcgccgatggccatatgctccacgcccttttcagggccaagccaacgcagctgggaatcatgcacgaacaggtcccatgcaatgcgcatgttgtcgagcagttcctcggtgttgcgcccaatcagcacctgcgacatcgattcgatggccttgcaaaccacgtcgttgccacggccgatggtgaacacgaatcccacacccgtgatgccgtcgtcggcgctggtggaaatctccacgtacgcagaggaataatccggatcggggttcattgcatccgagccggaaagcgtcgttgaagtggggaatcggaagtcatacgtcttgactttggtgatggtactcatgtgttcgggctccttcgcctggtgtgaaccaacggctatatcgtacgtccgaataaagaaatttgcaagcctatttgcgaaaatttttattcaaggccggacaaagggcaagaaaacacggaattgttacggcacaatgcgtcataatggtgggaacaacgacgaaatcgtctcagtaattgaacggcgaatatccaagagggaagcaccgatggttaacgatacatccacccacaagctcaaggtcggcgagctcgcaaaaatcgccggcgtatccgcatccactgtttccaaagtcatcaatggcaggtcaggcatttccgacgagacgcggagacaagtcgagcaaatcctcaaagatcacggttactcaaggcctctggtcaacaccaaactctcccccaccatagagctcgtcgtcgaatacattgagcacaacggcacgatggaactcatcaaatacgcctcatactgggcgcagcaggcgggcctcgccatcacggtcacccagaccaaccatggcgatgccacggaagactgtttccgcggcatcatcgatagaaatccccaaggtgtgattatgcagcagatgggcggtctgaccactcaagcgaagtctttgttgaaatcgcgcagtattcccgtggtcatcatcgacccaatcgataccgtcgattcggatgtgatgagcgtgtccatcgataactggaccgcaggataccaggccggcaaacacctgctgtcgctcggccatcgacgcatcgccgttatccgggggccggcgaacctacagaccagcatcgcgcgctatagcggattcaccgccgctctgcaacaggccggggtggatctgccggagtcctatatcgaacagggcgactacttccccgccgaaacaagctatgaagcagcctgccggctgctggaactcaccgaccgacccaccgcgattttttgctgcaacgacttatctgcagtaagcacgtatcgtgccgcacgagagcataagatcgcgttgccaaagcaattgtccgtcatggggttcgacgacattttccccgccggccaactcatgccctccctgaccagcgtgcatcagccgttcagcgaaatagcccaacgcgccgtgcagatgatcatcgacagccgcaagggcaatcagggtgatatgcacgtcatcctccccaccagtgtcgtcacccgggaaagtaccgtaccgcctcagtcatcggcccgataatcggccagattcaagctggcggccacccgattggacgcgaacgcacccaccgaaaccagcgcatagcacagcgcaagcccgccgaagaagctggccagcgtggccggttcggtcatcgaagcggcgaacagaggggccataagcagcatggaacagccgccggccacgatcaccacgatgttgagcggggtgagtacctcgatgaatcgcgcacggttcaaggtcttgacatcagtgccctccaacaccagcatgcgatattcgccggcctgatcgtacacgctgccggcctgcatcacaccggagctgaccgcggcaagcacagcggcgaacactagcgtcaggatgccgccggtgccgatgtcgcgaatgaacacggtggacgggtcgttggcgtcaccgaccacggcggccgagccaaagaatccgcagatcgaggtgatgccggcgatgaacacggccagtgcaatgccggacacattgcgccaggcgcgcttcggattgtcgagaatacggcgcatggcaatcatcgtggccgcatccttggggcgcttggccttggccttggcgcgagcggtgaccacccaggagcccacgaggttcaccagcgcgaagcacagcagcatgaaaccgatgatcacgccgtacatcactacttcaccggcctgagccagcaccatcggattcttgaacagaagaacggcaatcaccatgatgacggcgaacaccaccacacgccagccggacggcagcgtagtcgcaacgcgtgaagtgacgccgagtggcgtgatggccacgcgccgaagcgtgaccagcgaagagatcagcgccaacacggtcacgccaacaagcgtaatgatcaaggcaatcggccccacccacagttgctcgaacgtaaacgtctgattctggaaatgcagcaacatgattagggggatcaacacgcagtaccccgcgatgccaatcagcgcccccaccaaggcctgcccagccgcatcaagcgccgtaaggcgaataacttgccccgtggtcgcgcctgccaagcgcagggatgcgagccgagcgtcacgacgggacgcagccaatcgcgcggcggaaccggcaagcgccacgaacggcacaatcagcagcaggcaggcaaagaacgccagcacgacgtatgccgtggcgtattgatccaggctgtggggattggcgatacgctgcttccagatttccgctgttccgggtttgcaagcgtcgagattgattgcgcatccaatggtgtggtcggcggaggcgcgccacatgaacccatgcacgccgcccaaaacggtgagaaagatagtggtggctgcggcaaaagcaatgatggccaacaccgaagtatgacccgcactgccacgcgagccggggcgatggaacaatcgccacaatgcgaaagcgctcatcgtacgcctcccagctggccgtcctgcatggtcacggtgcgcgagcagaacgaagcgacgttggggtcgtgggtgacgacgaccacggcggaaccgttgtcccgcgcggcggccatgagaatgcccatgacctcgcggccggtggcttggtcgagcgcgccggtcggctcgtcggcgaagaccacggcaggtttgacggcgagcgcacgggcgatggcgatgcgctgcatctgtccgccgctcatctcccccggccggtgcgtggcgagcgcgcgcaatcccatgcgttccagccacaggatcgccgtgtcggtggcggtgcggtagggcatgccgtcaagcatcatcggcagggcgatgttttcgaccgccggcagttcgggcagcagctggccggattggaagacgaagccgaaggcgttgcggcgcagtttggtgcgctcggcgtcgctcatgcggctcaggtcggcaccacggaagatgacggtgccggcagtcggcttgataatgccggccaacgcgtgaagcaaagtggatttgccggagccggacgggcccatcacggctactgtctcaccctcccggagcgtgaagttcacgtggttcagggcgagcgtgtgcatggtcggcatggcgaagccgggctgggctggctgggatggctggccggcctgaatggcacccggtccggccgcagcgggattcgccgacgcataaccggctcccgtgccggctggcatcacgccggtgacgccgtgccctgcctgtgcgcgggccatgctggcggtgtagtccatgaccaggtcgtgcgcctcgatgaccggggcccactgctgggtgtgcgatgccggctgctggaactgttggggttgctgagactgctgaggctgagccgccggtcccgacgccggctgaggctgctgcaattgcgatgctgctgtgttcatactcccgagcgtacggagcgaacgcccagccgaccatcgggctgcggtatgaacctttctggatcaccggcccgctcctcatccgcaaggattagagatacgcagtcgacgcgacaatccatatatcagatgttcattgctcgagaagacgaggaacagtggaagaccggttcggaagctggaaccacaacagaccaagcaaaggagcccacatggccatcgcaatcgacatcccgcacacaccaatcgtgtccgtacaaaagtcgtacaacaggagtacgactacagagaataacaagaacagtcgttttgaaatgagactcacctaagagcaacgttccagaatcgaccaagcggccgagtccaaaggcatgacttcgttgcaatgggcattatcgaatctgctcgccgccgcagatcgggacatccatgaagctcatatcattcggctcaacagtaaagcgtggaatgatttcaccgcagcattaaacgaacctatgggcctacgcctgaatgaattgttggagcgtgatcccatatggacgtgaccaacttcactgagcctcggcacctgactgcgagcgaggatatttctggtttcgactgcggcctgccattggtcaatgattggctggtttccacacactaagtgcatacagcattgagcattcggaagctcccggttggctgaggcgaaatagtccgaaccccattcccgtaattttgctaggcatgatgggcgtggatatcagatttcaaaccatgcacgtcgacagtcagttactccgagatgcggtacttcattctctgaacgatatgattttcggcatatccctgaatcatctagaatgtttactccgctcaatgtccacaatcaccaatgattaatggctggagaccgctatttgacgccggccattgtctgaatcgcattcagacacaacactcctcattgcgcgcagaccagcgagttccgccgagtcggcgatgtgtctcttcggcggttgatttaggattttccgcatgcgacagctgaccacaccgctaaaaatgccatttttgcactgacttggggcggaggtcgtggcgaaacgcacgagggaacgtgtgtcatccgatatggtcatgcccgccagacattgaagcgtcctgtctatgcgcggttgatgtcccggtggcggggtcaatcgatcgacatacgaaccgggacagattcggctgtcccggttcgggatttcggcctcttttggcgaaccgggacaggcccttccatgaacacccgatatatgcaaatccaaaaccccggaattccgccattccccgacggcgaccatcgcacgatagggcgtcaggtgaatgagattctgtcccggttgcccaaaaagaggcaaaatgacgaaccgggacagcgaaatctgtcccggttgtcccaaaagagacgaaatgacgaaccgggacagcagaatccgtcccggtccacacgcggttcacacggcattacccaagtgaactcatcggcaaaacattggcccagccaacaccactaccgatgtccagcacaggccagctcgtccaggcgggcggcgaagcggggccagtcggtcttcatagcggtgaggagcttgcggttgggcacgtcgtcaatcgggacccagcagatttccatgctttcgtcgtcgtttgccttgggctcgacggtgtggccgggcttttcaaaggcaaacacggtggtgtaggcccacgggccatggtcctcgcggtaggagccgaccacctcgatgtcttcgggggtgatgttggcttcctcgtagctttcgcgcagcgcgccttcgatggacgattcgccgtccgcagtggcaccgccggggataccccacgtgccaccttcggcgctccacgcggcacggtgctgcatgaccacgtgagtcaccttgccgctcgccgggtcgcggcgagccagcagaatgccggacgcaccgttggtgccccaatgcttgcggccgcaggcgcagtccacccagccatcgccgggctgatgcacgttttcgaccggcggcagaatgccagcgtgctggttgcccgaggccttgctttccggctccagttcgccacggccgacattccacaggtcggtccacgtgatgcccagttcgccggccagatgccgggccagcggcaggctgaggccgatgataccgtgcggatcgccctcgatgctgtcgatgaacgcgccgccgaagccttccagcgtgaacgatccggcgacttccagcggctcgccggtgacgatgtaccgttcgatgtcgtcatcggtgaattcgccgaaatggactttggcatggcttgcgccgcgcacggtacgtccggtcgcgaaatcgatcaggcagtggccggtccagagttcaccggtcgcgccgctcatgcgcttcagtcgttcgcgggccacggcttcgctgtgcggcttgccgtagcattcgccgtccaggaggaacatcgaatcacagccgagaatcagcgggccgaccgtcgcctcggtcagtcccggctgtccggcaatagcggtggcgatgggttcggtgacggtcggcatatcgatgccggagaagtcgcgcgtggtggcgatttccgccttggaatagtcaatgggcttgccagcggcggctttgcgcagatcttcgacggcagcttcgcgttccgaatccttgatttccttggccttgagcgggtaggcgatcacgcggtcaccggtcgcggcggcggcagtatcggccacatcacgatacgcacggtgaacggcctcggccttggctgcggcaagaatcatcacacgctgcttgatgctcaaatcgtcgacggtgacaccttcctcacgggcggccgcttccagcgcagcaggctcatccacgtgcgagacgcga

SEQ ID NO: 1153 - DNA, 9092 bp, Unknown
  R81_24m  MAG No. k141_9051
cctccatgcgcgccatgcgccgccacgaaatcgaacgcatcggcctgtcttggatgagcggtgtgatcagcgactccgacagtctcaaggccatgaccgacgtgtatgacgcaatcatcgacgcctcactgacctgggccgtgcgccaccagatcgccgcgttcggcgtcgaaaccgcgccggccggcatcaccgtcatcgccatgggccgttacggcgggcgcgaagtgaacttcagctccgatgcggatgccattctcatctaccgtccggccgacgatgccgacgacggccaagccaacgccttcgccaagaaggtcgtggaagacctgcgcaacatcctgcaaggcccgacgacgctggaacccaagatcgaactcgacctggacctgcgcccggaaggcaagaacggcccgctcgtgcgctcctacgcctcctgcgaggaatactacgaatcctgggcctcgacctgggagcgccaggcgctgctgcgcgcccggtacgcggccggcgacgccgaactggcgcgggacttcctgatcaacatcgccgacccgttgcgctacccgaccacggagctgaccgaggccgaattgcagaacatccgcaagctcaaggcccgtatggaggccgagcgtctgccgcgcggcgtgcgtcgagaacgtcatctgaagctcggcaagggcggtctgtctgacgtggaatggaccgtgcaactcatgcagctccagcacgccggcgatatcaaagatctgcgcgtcaacggcacgttggaggcattggacgtgctggaagccaagaagctcatcagcgctatcgacgcgattcagctgcgcaaggcatggacgttgtgcaccgcggcccgcaacggcaactatctgtggagcgggcgcgccaaccaggccgatattctgcctgatgacatctattcgctgggcggcatcgccgtctacctcggctacggcgcccaccgcggccagcatttcgagaacgacctgctggccgtgatgcgcaaatgccgtgacgtatgccagcgcctgttctacgggcaggccgaagacgaggcgactgcggcaaccaccgccacggcctccgccgcaacgcagcagccgcaaaccgcgcctcgcccgcgtatgcacgtgatcgcaccgcgactggagcggaaccgacgccgcgcgcagcgatagacctttcttgtattgcgttcactacgttcattaggtcgattcatcgttcattaggtcggtccgccgccgcataccttgttggaatggcggcattccaacaacagatacgagggtgcagtgacctaatgaacgtcaaatcgacctaatgaatgagctctggcgttccaaagcagatatcagctatacagacacagcatattcgttggattttcaggtgaacactcggtgaatgcggctgtccgaaaaatggcgtaagttatattaggtcacacaagggtggccacctgaaaaccacgagcgaaaaggtgagccttgtctgaagaaacgccaatggtcggcaaaagcgtcgtaacgctggacggcctgtctacaaaccagattctcgacctgctgcataaggccgaatacatcgattcccaccgcaaagaggttgcccatacctgcgatgggcgagtgctggccacgctgttctacgagccctccacccgtacgcgcctgagctttgagacggcaatgctgcgtctcggcggcaaggtcatcggattcgccggcgcgcagctggcctccgtgaccaagggcgaatccatcgccgacacgttgaagaccgtgtccaactacgtggacgtggtcgccatccgtcacccgaaggagggtgccgcgctggtggcctcccgcgccgcatccgtgccggtgatcaacgccggcgacggcggccacatgcatcccacgcagacgctggccgacctggccacgctgcagtcgcgcttcggccgcatcaccgacctgaccgtgggactgtgcggcgatttgaccttcggccgcaccgtgcactccctgatcgagaccctgtgccgcttcggcaacgtgcgcttcgtgcttatcagcccggacgagctcaagaccccgcagtacgtgatcgaccgcatcaacgccaccgacaactgctcctacgtggaagtgcgcgacctggcctccgtgatcggcgacctcgacgtgctgtacatgacccgcgtgcagaaggaacgcttcttcaacgaagacgactacctgcgcctgcgcgacacctacattctcgacgaagaaaagctgcagctcgccaagccgtccatggccgtacttcacccgctaccgcgcgtcaacgaaatctccgtggacgtggacgacgacccgcgtgccgcctacttcgaacaggtcaagaacggcatgctcgtgcgcatggccctcgaaagcaccgtggtgggcgacgaactacccggatacgaaccgctcaaccccaaggaggttcaggcctgatggaagtcaccagcattcagaacggcatcatcatcgaccatgtgccggccggaacctcgctgaaggttctcgaatacctgaaaatcgacccggccaaaaccaagcttgcgctcatcatgaacgccaactccaagcgttacggctccaaggacatcatcaaaatcgaggatgacaaggacatcgacctcgacgtgctcggcttcgtggcctgccaggccaccgtagacgtggtgcgcggcggcaagatcgtcgaaaagaagcagccgaacctgcccgagcacatcgtcggcgtgatctcctgcgtgaacccgcgctgcgtgaccaccaccgagcccggcatcaagcagatgttccacctcgtgcactccgagcggctcgaataccgctgcgactactgcgacgaggaagccaaactgtgagcatcaccctacgcaacatcaaggtctggaacaccggcgaagtcatcgacctcgtggtgcccgggaccgctgccgcctacttcgccgacacctccgccgtggctgacggtgccgatatcgacgccaccggactgaccgtggcccccggtttcgaagacccgcacgtccacttccgcgatcccggccagacctacaaggaatctatggtctccggctgccgcgcgtccgcatccggcggatacacgaacgtgctcatcatgccgaacacgttgccggcactggatgggcagaccgtgtctgacctggaagcggccggtgcgaaagaggttctggatgccggcttcgacaacgtcatcgacttcctgcagcagtacgatactgtgcacgatgttcaattgccggttcgttacgatctgtgcgtgtgcgcgtccaaggatcgcgccggtcatgaggcaagcgacgttgccgactggctcaggtacgtgcccggattcgaggacgacgccaagacgccggccatgctcacgcaccccatcaccgcaattagcgacgacggttccgctgtgacgccggagatcctggaccaggtgctggagaacgtcaaggcctccgacctgtacctaatcgagcattgcgagcatcacgatacaggtgccgtgaacgaaggcccggtctcgcgcgaacttggcgtgcccggcattccggaagacaccgagctcaagatcgtggcccgcgatatagaagcggcccgccgcactggtgtccacgtacacttccagcatgtgagcactgccatctcgttcgaggcgattcgcaaggccaaggccgaaggattgccaatcacctgcgagaccgcgccgcactatctggcgttgagcgacgaggcgctgctcaagtacggcacgctcgccaagatgaatccgccgctgcgctccgaagcagaccgcaaagccaccatcgcggccatcgccgacggcaccgtggatctgctggccaccgaccatgcgccgcacacgttggcagagaaggaactcggcttccttgaggcgcccaacggcatcatcggactggaatgcgcgtacggcgtgtgccacaaggtgctcgtcgacggcggcttcatttccgatgagcgtctgatcgagctcatgtccgtgggacccgccgaactcatggggcatgtgccaaccgacgtggccgcgctggtcgaggactacgccgaacccgcgcccactggggatgatccggatggcgtgattgcgggggagagcgacgctcagccgcagcgtgaaggcgtcaaccgactgctcgacctgagccgcgtggatgacgccgacaatgtcgacctcgtggtgctcaacaccgctgaggaatggaccgtggaccctgaacagttccactccaaggctcgtaacaccccgttcggcggctggcaggtcaccggacgccccctcgccacgatcatcggctcccagctgatgttcagccgtctgtagataacataaggagcagcatggatcgcctgatcgaagcgattgacaacactcagaaccccagcgtcgtgggcctcgaccccaccgaggcgttggtaccgccgcaggtcgcggcgagctttgccgacgaggtgcgtgactcggtcgaatccccggaggaaatcgaatccgcgcagctggccgtcgcctacttcgaatacaaccgcacgatcatcgacgccatcgccgacatcgtgcccgccgtcaaaccgcagatcgccatgtacgaggcgctcggccccgccggcgtggacatctacacgatgacctgcgaatacgcggcccagcagggcctctacgtgctcggcgacatcaaacgcggcgacatcggctccactgcagccgcctacgcccaccacctgaacggcgtgggcgacttcgacccgtggcatgaggatgcggtgaccgtcaacccgtatctcggcaccgacggcatcaccccgttcgtcgaggccgccgccgaagccgacaaggacatcttcgtgctcgtgcgcacctccaacccgtcctccagcgaactgcagatgctcgacctggccgacggcacgaaggtctacgagcatgtggccgatctcgtggaaggctggggcgccgagaccatcggcagccacggctactcccgcgtgggcgcggtggtcggcgccacccaccccgaggaaggcaaggcgttgcgtgaacgtatgccgcacacgttcttcctcgtgccgggctacggtgcgcagggcggcacggccgcggacgtggcaggcatgttcgacaagcagggcagcggcgccatcgtcaactcgtcgcgcggcatcatcggcgcatggaagaagagcggcaagtactccgaatccatgaccgccgacgaggcgctggaccttgtggcgagcagcgcgcgccaggcggcgctcgacatgcgcgataatctgcgggttgccgtatataggtaggtagattgtccggctgtgggctatacgtgagtgtgggctggaaaccggagccgagtgtgtttaactacccctcagtcaacctgcggttgacagctcccctgataggggggagcttgatgtgctgaataggaatgaaatgacaactttcacccccacccatgatgtggttgcggaggcgactgcggccggattcttcccgccgcgccacaacgtcgaaatcacgcaggttacggaactgaccgaccgcgtgatgcgactgacattccgcgacccgttcatcgcctcccacgccaagcccgcccagttcgtcaacctgttcacgcacgacgacttcatgctcatgccgcgtccgttcggcgtcagcgaagtcgacggcgacgaagtcagcgtgatcttcgccgtcgtgggccacggcaccgaacagttggcagggctgcaggccggcgacaccgtcgacgtgctcggcccgctcggccgcggcttcaacctcaaggaagacgccaactacattctcgtcggcggcggactcggcgtgcccccgctaatctacgccgcgcaaaagctcgccgaacacgacgcctcctttgccaccgccgtattcggctaccgcaacgaccacttcgctgaggaatacgtctcccggtacgcggactggtcgtggagcatcgacgacgccgaaggcaacgtggtcgacctgctcaacaaactcgaacaaggcgacgacctgaaggcctacgatcgcaagccgatcatcttgtcctgcggaccgctgcctatgatgaaggccgtggccgtttgggccgccgaacgcggcatccccgcgcagctgagcatggaacagcgcatgggctgcggctacggcacctgcgtgctgtgcaccatcgacaccgtggacggccggctcaaggtctgctccgacggacccgtgttcactcgcgaacagctcggatggggggagtgacgatgagcgcaaacaaccagtccgcgcagggcagcgacaaccacatcaacctgtacgagccccacgtgtggaagcaccacaccaaggtggccggtctggaatggaagaacccggtcggcaccgcctccggcaccttccagtacgccgccgtccgctggttctacgacgtcagccagctcggcgccgtatgcaccaagggcgcctcgcccgtgccgtgggagggcaacccctcgccgcgcaccgccgaatcgccggccgcgaacatcaacgctgtgggcctgcagaaccccggcatcgaccattacttggccgaagacctgcccaagctcaaggccgcgggcgcgttcgtcatctccaatgtcgccggacattgcgatgacgattacgcggcggtcgtggaaaagctcgccggctccgacgcggacatgctggaaatcaacgtcagctgcccgaacgtttccgccggcggcatgagcgtgggcaccgacccggtggccctcgccaatcttatggaccggctgcgcccgatgaccgacaagccgatgatcgtcaaactcacgccgaacgtcaccgacatcaccgtgccggcgcgcgcggccgtggaacacggcgccgacgcgttgagcatgatcaacacgctcaaaggcatgcgcatcaacattcgcaccggccagccgatcatcgccaacgtcaccggcggcgtatccggcccggccgtgctgccggtcggcctggcagccgtctatcgggtgcgcaccgcactgccggagattccgatcatcggactcggcggcatcgacagtggtgagaaggcgctcgaatacctgtacgccggcgcgaacgccgtcgaagtgggtgcggccgcgctcttcgacccggtggccccgctgcgcgtcgcccgcgaacttgacgacctgctggacagccgtcccgaactcgctgctaaactggccgcaggacagacttggaggtaaggaacatcatggcagaaacactcgcacatcgcttcactgaattcctgttggaatccaacgcgctgaagttcggcgacttcacgctgaagtccggccgcaagagcccgtacttcatcaacgccggcgccttcgacgacggcaagaagatcgccgcgctcggcacgttctacgccgaaaagattagccaggccatcgtgcacaacacgattccccgcaacatcgacaccgtgttcggccccgcctacaagggcattccgctggccgtgtccaccgcgatcgcgctgaacgccggccacaacatgaccgttggatacaccttcgaccgcaaggagaagaaggaccacggcgacggcggctggatggtcggcaccccgctgaccgacggcatgaaggtgctgctcgtggacgacgtgatgaccgccggcaccgccgtgcgcgaagtcatccccaagctcaaggccgaggcgaacgtcgaggtcgtgggtctcgtgctctccgtggaccgcatggagaagaccaaggactccgacctgtccgccgtgaaggccgtggaagccgaattcggcttcccggtgctctccatcgccaacgtgcgcgagatcttcgacgccgccgccaagatgaagaaccccgacggcaccccgttgctcagccacgatatccagcagcgcgccgccgcctaccttgaggaatacggcgcctgatcgtcttcaacctaaaaccaaaagcgggcttgcgagcccgctttttttattacgatccatgaacagcagtaccatattaaggcagaagctttggcaaggagcgtgctatgaactggttagttggtatagggctgtttgcgctcgtggggatatgcagttacttcggcatcgagcatcatctggacagtaaagcgaacaagttgtcgcaaggtaatgaagaagaccgccgagatgctgccgaattacgtgatatcgccgccaaaatcgatcacggtaagtattacccgatgctgtaacgggcaatctgggcctaaatggatgctatctccgcttcaaggggctgatgtcgtggtttccagagatctacttccgtttcgaggggctgatgcccaagtagaagcagcatgaaaatggcggaatgacgttggggtgatgccgctcatactcgggatatgacggatgaacagccccttgaaacggagatagatgtctccagaaggccaaatcagccccttgaaggcgagatagggttttaaactctgggaccgactcgcctgtgatgaaaacccgctcggcgtagaattaccgtaggttcgttacattcgaacaaggaaggccgccatggggaacatcaccgacgatatccggcaacatttcgacaccttcgccgcactgccgttcaccgaggcggacagtctcgccctgtcccagctggcctacgcgcgcatgccggataacgtgccgcgctatcacgagaatgcagagaccactgacggcgtgattgccacggttccgattcacgatttgctgcgtgccgaatgctatgacgacatgttcggcaaggtgtggtcgccgcagatgaacgtcgatctgctgcgtgcgatgggggagagcccgcgctggcgcgacctgcgcgtcggcgaatacgtggatgaattcgacgccgaaaccaccaaaccgttctcggcctgcgtcttcgaactgggcgacggcacgctgtacgtggctttccgtggcaccgacagttcgatcgtcgggtggaaggaggatttcacgatggccttccgccgtccggtcgcctcgcaggagg

SEQ ID NO: 1154 - DNA, 5052 bp, Unknown
  R81_24m  MAG No. k141_9281
cgctcatggcgttggcgagcaccagcacccacaccaacaggtagccgtatcgtgcgccggaggtgatgttggccgccacattaccaggatcgacgtaggccacggccgccacgaacgcggggccaaggatgctggccagcgcatggtcatgcggcttcttattgttattcgtccctgctccggccccggttccgactccggcaagctggcgttccttcccgatttccggtgtttcctgttcgatgtctgccacagcgttcgtcatagcggttgccgcagtggcatctgcttcggtgtgtgttactgccatatcgtttgtacctgttcccttcataccgcgcacagttatagcgcaggcatgtttcccgagtcaacagacggacaatctgcggacgattgatggatgaccggcggactggcagctggcatttcccgccatctcgctcatgaaatgtgaaaaaccgccgaaaactcgctcatgaaatgtgccagacggtagaaaactcgctcatgaaagtgtaaaatcattgatatagcagtaattcggaaaggggctcctcatgtatctcaaacgcaaagccgatgcctatctcaatgcatggaaatccgacccgaatcgctccccgctaatcatcaagggccctcgtcaagtaggcaagacagagactatcgattactttgccgcacacaactaccgttcggtagtggaaatcaacttcgttgaggaaccgaaatatcgtgcaatcactgcggacggttatggcgcgaataccatcgtccgcaatatttccctgatcgacccagccaaaaagttcattccgggcgatacgctcatctttttcgacgaaatccaggcccatcctgatatcgccactgcactgaagttctttaaaatcgacggcaaatatgatgtgatttgcagcggttcaatgttgggcatcagctataagcaaatcgaaagcaatagcgtgggatataagaccgactacgaaatgcgatcgttggacttcgaagaatttctgtgggctcgcggatacgatgaggccgtcatcgaaagcatgttcacccacctgtgtgatgctacgccattctctgaagtggaaatgaacgtcttctccacggcatttatggattactgcgtgcttggcggcatgcctgcggttgtcgcctcccatatacgcactggcacgttcgagggaacactgcaattgcagcgccagcttattttggactaccaggaggatatccgcaaatacacgcaaggacccgatcaggcacgaattctcaacgtgttcaaccatattcccgtgcaactcgccaaggaaaacaagaagttccaaatcagcaaggttgccagcggagcgcgtttcaaagactatcgaggatgcgtggaatggcttgaaacctcgggaatggtgaatatctgccgatgtatgtcctatcctgaactgccgttgaaaggcaattatgacgaaaacaagttcaagatatatttcggcgataccggtctgttcgtagcgatgcttgacgacgaggccagtgatgatctgcgggccaatcgtaatcttggtgtctataagggtgctatgtacgagagcatcgtctctgaagcgctacggaaatccggctatgacctgtactactacaaaaaagaggattccacactggaacaggatttcttcgtccgcacgcgcgaatggctggtgccggtggaggtgaaatcgaaaaaaggcaccgccaaatccatgcggacgctaatcgcttcggattcttatccggaaattcagttcggcgtgaaactatccgccggcaatatcggtagcagcgaacacgtgttcaccgcaccatacttcaccacatttttgctccgacggctcctgcgcgcttatgacgaggggcaggcacctatgctcaacaatcctgagcggtagcccctattcgtctgcgggcacggcctggcccgggcaggtatggaggacggcgagcatggcgtccttttcttgggaggtgacggtgagctggtacttgtctttgacgccaatctggcgggccacgtagtcgcaacggtagtcggcgttggtgggtagccagtaggcggcggaagccgaacccttctcctgattggccggaccgtcgacggccagcaggttataggggtcattgccgaattcatggcgtttggcagtggaccagtcgtgcgcaccggattgccaagcgttttcaagggccaccacatggtcgatctgcactttggcgctggtggcgcggccacgtacgaaatggatggtctgggcggtgtacggatcggccagtgtgccggactcgaccacacaggaaccggcgtatttgtaggtgatgtccgtgagatcgcgggcgagcacgtcgtcgcgtacgtcgcagccattgccgtcgacgtcggtggtgcggaaaccgaaggaatcgcggtcgtagccggaggagctttggttgtcgtctacggcgagcgcgttcaaagtgtcggcggctgaaccggtggcagtgtagccaccggtgattttggccacgtcggagctgacctgcggcagtaacaggccgatggtcacgccgattgctacggcgagaacgatgagaatcagcacgcgctccagcggtccagaggcgttgaaacgacggcgaaagtgggcgttacgacgtgccatcaatcacgcataggtgaaggtgagggggtcgtggccggcgcgggtggggccgtcgagggcgtcgatggcagcgtgttcatcggcggtcagggcgaagccgaacaggtcgagattctccctctgacggtcggcatgcacggacttggggatgatgatcgtgccgttttcgatgtgccagcgcagaatcacctgggccgggctgacctcatgggcggcggcgatcttctcgatggtgccgtcgccggcgttgaggtcggcgccacgcgccatcggcgagtaggcctccacggcgatgccgtgcttcttgcagaacgccaccacttcgcgctgctgccacgtggggtgcagctcaatctgattgacggccggccatgcgccggtctccccgtgcagacgcttcagatcggcgggcatgaagttgcatacgccgagcgtgcgtgccatgccttcgtcgcgcagcttgacgaacgccttccaggtgtcggtgctgcgccagtcgaacggcgtgggccaatggatcatgtacatgtccacgtaatcgagctggaggagtttcagggagttgtcgaatgccttgagcgcggagtcgtagccctgctcagagtcgcgcagcttggtggtgacccacagggtctcgcgcttggcgccggtgttgtatccggaagcggcgagcgcacgacccacgccggcctcgttgttgtatccggcggcgccatcgatgtggcggtatccggcttccagcgcagattcgacgacaggggccacgccctcgtcatcgatacgtagcacgccaaggccgacctgcggaatggaatggccgtctttcaaggcgatgtccggcacgttggcgggattgatgtgtccgttggtcatggcttgtgatgctccttcatgtactgcaactacacgccactgtacacggttatgcaggcgatgtgcgggtgctgcaaccaaacggcatgattgcgcccggccttccgtgtgggagagccgggcgcaatcatgacaacatcacgctctactcctgcgaccggccctcgccctattgttcccgggcgcgaatttgccccggtacaggcgtcaatcgattgacgtttgcaccggggcagaaatcgttgtcccggtacgcaatttcgggccattttcgagaaccaggacaagacaatccccaaagtccacataccccggcaaacagaatcggcggaatacagccaatcccgaaatcaacatactgtcccggttctcacgtagaacgattgacgtgcaaaccggggcaacgggaattgtcccggtacgcgaaaaacacccgttttcgcaaaccaggacagtgatttctgtcctggtacccacatcaaacgattgatgcacgaaccgggacagaatcgcatcgctgcgccgagacagacgcatctgacagccgacaaccgataaacgacagccgacagatggcatctggcagccggttgccggctgccggcaaccgcatcataatgccgcatcagtctctatcaggagcgcttacgacgcaaagcaagcgagaccccgccggccacgccgagaacgacaaccgcaagacccacggcagtcaccgcgctaccggtattgctcagcacaccagtgatcttgtcgccattcgcaccgttggtcttatcgccctcgcccgtatcgggattgatagtagccccgccattacccgcaccgtccgagccgttgccggaaccaccttcggcccgagcggtaaccgcaaccgtataggtttcggtgacattcggattcgacttgagcgttacggtaaccttcgccgcatcagcgggagcggagaaatcgtaatcgagcgtgaactggtcggcggcaagcgtcacgttgcccatgcctgcggaatagttgcccacgaccttgagatcatggtcggcatcgatggcatcgcccacctgataggtggttttgcttggcgtgacggtcaggctggagacctccttttgggcgaggccggcaatggcatcggcaacaagcttgatcacatcgttcacgtcctgctcgatgtaggtgctgccggcaagcagcacgtcagcggcggcaagcgcctgatcgagtttggcgagcgactcgttggtgtactcatcgcgattgattttcccggcttcggccacggccttgtccaggttctccgtggatggcttcaccggagtttcggtctttttgacgagtgagaccttgtccacattgtggttgctcaactgtttggcgtaagtggcgtaggtgccggctttctccgggttggtgaaatgaatgacgaccttggcttcggggagcacttcgcgtatggctttggaacctgcggagaatactttggacatgccgtcccagccggaga

SEQ ID NO: 1155 - DNA, 3479 bp, Unknown
  R81_24m  MAG No. k141_9365
actccgctgccgccgcagcccgccgtcaccaatccggtcggcaccgccgcgccgattctgccagtggaagacaagccgctgaccctgggcggtcacgagttccagtcgcgattcattctgggctccggccgctacgacctgaacctcatcaaggccacggtcgaacatgcaggcacgcaaatcgtcaccatggcactgcgccgcgcgcagaccaccgagaacagcgtgctcgactacattcccgaaggcatcacgttgctgcccaacacctccggtgcgcgcaacgccgaagaagccgtgcgtatcgcccgactggcacgcgaagtgtgccacaccgacttcgtcaaggtcgaaatcgaacacgagaccaagtacctcctgccggacaacgccgaaaccatccgagccaccgaaatgctggccaaggaaggcttcgtggtcatgccctacatgttcccggacccgattgccgcacgccagctggaggaggccggtgccgccgccgttatgccgctcggttcgctgatcggctccaacatgggcctgcgcatgcgtgacttcatcgagatcatcatcgccaatgcgcatgtgccggtcatcatcgatgccggcatcggacgcccgagtcaggcatgcgacgccatggagatgggtgcggatgcggtgatggcgtacacggccgttgcctctgctggcaatatcccgctgatggctgaggcgttcaagcacgccatcgatgctggtcgtgcggcgtatctgtccggtctgggcaaggtgaccgagggacaggccgtgccgtccagtccgactacgggatatttgcactgacacttttattagctcccctctctgaggggagctggccgcgtagcggactgaggggagctggaaacatggagaaaacatggcattgactgatgaacaggtggagcggtacgcgcgccatctgattttgaaggggctgggcgtcaaagggcagaagcggttgttggcctccagcgtgctcatcattggagcgggcgggcttggctctccggccgccctgtatctggcggcggccggcgtcggccatatcggactggtggacggcgatgtggtggatatgagcaatctgcaacgtcagatcatccataccactgcacgtgtcggagcgcccaaagtggaatccgcggccacggccatccgcgcgctcaacccggatgtgacggtcgacacctactacgagctcgtcgatgccagcaacatcgccggcctcatcgaaccgtacgatctggtgatcgatgccaccgacaacttcgccgcaaaattcctcatcaatgacgcatgtgtactggccggcaagccgtatatccatgcgggcgtggtcgggttctccggccaggtgatgaccgtcatcccaggcgaaggcccctgctaccgctgcatcttccgcgatatgcccgccgcaggtgaaattccgacctgcaaggaggccggcgtgctgggcgcggtggtcggtgtgatcggcagtctggaggcgactgaggccgtcaagctgattgccggcgtgggggagccgctcgtggctcgtatgctcactgtggatgccctgaccatgaacatccgccgtgtgccgttgccgaaccatgtgcccgactgcccggtgtgcggtgagcagccgaccattactgctattgatccggccaactatattcagccggcctgcgcgatttagagctatgtggcacccctccttgaggggagccaagatcggaacgagaggggaagaacatgcctattgctttgcgtaatgcggtcgatgacgatgagagcagtgaagcatcgtaccgccgcatcacgccggcggaatttgccaagctcgacccgaatacggtcacgctgctcgacttgagggaaccagccgacttcgccgcccacccggtcgaaggtgccatcaatgcaccactcgaccctctggcccatgtgctcaaaaccgtgcccacagatcgaactgtcgtagtctattgtgctcaaggatggtggagcgaggaagtagctgaaatccttgccgatcgcggttacgatgtagcaagcctcgatggcggttttcagggttatctcgactatcttgaaacccaccacgattaacggttcccgttgtcgttcttttggatgagtgtgcacggacatacgtgtgccctacaatcggtcacggtattattcgatggattcttgaatatcgtcgggtaatcgtaattcacaacaagggattgcactgaaccaacccgaacggagggtcgaaaccgtgggacatctgctcacccgaacgcagattcaacgcctggtcgccaagcacggccgtgaggtcatcgagcatcgccacatgcagatcgaacgctgctgctaccagcacggcaacgtcaccacgttcgaacattccgtgcgtgtcgcctgcctggctgtgtggatggccgaccgcgcgcacctgtggtaccgcgtcgacctcaaatccctgattcgcgcggccctcctgcacgattacttcctgtacgactggcacgactgggataacggcgaacaccagtggcatggcttcacccatggccacgccgccctggtcaatgccctgaaggacttcaagctcaacgatatcgaacgcaacagcatcgagaaccacatgttcccgatgaccctggtgccgccgcgctatatcgaaggctatctggtcaccttggcggacaaatgctccgccaccgccgagaccttctcgttcgaccggttcaacaagcgcgcgttgcccgccgcgaagccctacgccgagatcgaagcccgtcgatgatcaccacactcgaacattatttcctctggtttctgttctacagtttcgtcggctggacgtacgagtccattctcgtctcctgccaacagcaccgcttggtcaaccgagggttcctcaacggcccgctgtgcccgatctacggcaccggcgcgatactcggcgtcgccattctcggcaacgtacataacccgatcatcatcttcctgatttcgatggtgggcgccacgatactcgaatacacaacctcgtgggtcatggagcagctgttccacgcccgctggtgggattactcgaatttccgcttcaacctccaaggccgcgtctgcctgctgggcgcgttgattttcggtctcggcggcgtgggtgtggtacttggttcgcagccatatgtcgagcgggtcacggatatgattccgctgccgatgctgcatacgctggtcacggtactggccctgatcaccatcatcgacttggcggtcacggttacgggcatgctcggattcgagcaggtgctcgattccgtcgctcaggtggtgcaggatgtggcggcacgcgccggtggcacgtggcagtggggctcccgtgcggtatccgacaggatgcgtgagctttcgcaggatacggttgagcgtctgcgctgggccatcaatggcgtcatcaa

SEQ ID NO: 1156 - DNA, 55797 bp, Unknown
  R81_24m  MAG No. k141_9702
accacaccccaatttggcttggcgtagcaactccgaagagttgttcgtcgtacccccaaccggatttgaaccggtgttggcgccgtgagagggcgtagtcctagaccgctagacgatgggggcatattcagtttttcaaccagctgcgtggcgaaccgcgcaacaagtagatatattacgcgctaccctgctctcacgcaaatcccggcgtgtcgcgccattttccgccgttctgcgggaacaccccatgtaacgcgaaagcgggcatccgtatgtacggatgcccgccatgcgtcacgctcccatcatccgccggcgtgcggtggacgacgcatcacagatgcgcccgcaggcccttgagacgggcgacggtgatcggcttgccgacgatctccatcgattcgaacagcggcggggagacgcggcggccggacatggccacacgcaccgggccgaaggcgaggcgcggcttgtagccgccctcctcaaccagggccttgttcagggtctcatgcaggttgtcggtcttccagtcagcttcatccacagcctcgagtgcggcgatggccttgtccagcacctcgccggcagaatccttcagctgcttcttggcgtcgtccgcaggctccagatactcctcggtggacagcagggagccgaccatgccggcgacctcgcccagcaggcgcacgcgcggctggaccagcggggcggcggcggtcagcacctcacgctcacggtcggtcagggcatcccagttgtcggcggaaaccacaccatcgcggtgcaggtacggcaccgagcggcgcaggaagtcctcgggctcgagcatacggatgtgctcggcgttgatggagatggccttgtcgatgtcgaagcgggccgggttggccttgacgtcgcgcacgtcgaacttctcgatcatctcgtccatggagaacacgtcgcggtccggtgcaatggaccagccgagcagggccaggtagttgagcaggccctcgcggatgaagccgttgtcgcggtggttgaacaggttggactccgggtcgcgcttggagagcttcttgttgccctggcccatcacgtacggcatgtggccgaacagcggcatctccttggcgatgccgagttccataaggtaacggtaaagcacgatctggcgcggggtggagctcaggaggtcctcgccacgcagcacgacgttgacttccatcatcgcgtcgtcgaccgggttggtcagcgtgtacagcgggtcgccgttcgggcgcacgatcacatagtccggcacggagccggccttgaactcgatggtgccacgaatcagatcgtcgaaggcgatgtcttcatcaggcatcttgatacgtagcgcaggcttgcggccctcggcgcggaaggcggccttctgttcatcggtcaggttgcggtcgtagccatcgtagccgaactcggccggacggccggcggcaaggttgcgctccttgatttcctcaggagtggagaaggactcgtaggcgtagccggcttcgagcagcttggcggcaacatccttgtagatggcggtacgctcggactggcggtacgggccgtgagggccacccacatcgatgccctcgtcccagtcgatacccagccaacgcagggattcgagaatctggttgtagctttcttcggagtcgcgcacggcgtcggtgtcttcgatacggaagatcagcgtgccgccggtggcgcgagcttccgcccagttgaacagggcggtacgaatcatgccgacatgcggggttccggtcggcgacgggcagaagcgaacacgaacgttcttgggcagttcgggtttggtgttttcagcatcagtcataatcccctattgtgccgcgcgcgccggacgcggagagcagcgctcctcgctcttttgcttcgttattgacatttcgggccaacaccatcccaaaacggccattttccaacgaaatctcttttgcctgtctttggtagtgcccgatatcttgatgcctgtcttcacacctgttttgacacctactttggcgccatccacacgcccgcacgcaaggcttcgacaccatttggcgcaactgttgagttttttacccaaacgatggaagaataggagtcgacgcaatcgtcttatgaaaggggaatcaatgaccgatcccaacaacgtgccgttgccgcagatgcccgcgcccaacggtaccccggcccagcagaatcccagcacgccgcaatacggcgcacctgctccggcccccgcacagccagattatgggcaattcaacgctccggcccccgcacagccggcctacggccagcccgcatacgggcagcccgctcccgattcttccgcacccggcgcagcgcccggtgcaactcccgcctatggtcagcccgccgccgacccgtacgcggcgaatgcggctccgcaattccccgctcccggcgcggctcctacctacggccagcccggaccggacgccaacgcttacggtcaggtgccacccgcatacaaccagtacgccgctcccactgccacagcagccgtgccgttgaacaagccgtattacgactgccccttccctgaggcattcctccgtttctggaagaagtatgtggtcttcaagggacgtgcctcccgcagcgagttctggtggtggacgttggcctctgtcggcatcagcgtcctgctgagcctcctcagcagtgccacggacgacaagctcaggttcctttccagcatttggagtctggccatcctgattcccagtctggcgctcgccgttcgccgtctgcatgacacggacaagcccggctggtgggtcgccatcttctatggcgcgatggccctcggcatgatcatcatggttgccggcggtggcgcagcactgtatggcgccttcggcagccttagcaactccagctatggagccatggcaaccggcggcctcggtgccatggccattggcggactgattacgctcgctggttcaatcgtctacatcgtgttcatggctatgcccagcaagccggaaggcgcacgtttcgacgatgacgcagtagctgccccgatgcctcagggtgcttacggcgcaccgtacggcgctcccgcaaccccggacttcaaccaggccgctccgaacttcgccgctccgaacgcacccgctcctgacttcaaccagccagccccggcctatggtcagccgaccgcaccggctcctgactacggccagcccgctgtgcctacgcccgattacggtcaggtaccggttccgcagtacggccagccggagaccccggccccgcagtacggccagcccgacgctcaggccccacagtacggccaggttcagccgattcccgaaaacgttgatgatgggtccaccgtgctgtctccgcacacggctcccaccgatgacaacgcacagaaaccctggcaaggccagtgactgacgccggcgaagttcgcttaagaagttcgcctcatcactcatgaagcccaacaatgaggccccactcatcaagcggcggtagtattccccgccgttcagtaagccaatgccctgtgtactggatcattccagcacacagggcattgtgcgttattgcggcccctctcttcgcgcaacattccccggaatgcgttacgatggaggatggacgctgcgccgagctactcctacaagctgcctacggagagcgtttgggagatcacatgggattctcccgggcccagcgtcacgatgcggtcgcggcataccgccgcttcaaccgccacgaaaccgcgccattcgcccggcttggtgtagctcatattgtcgccgtccgctcccggattccacaccacggtttgcggcgacccggtacggctgatatgaatcgcacgccccaacatgtcatcgcgcagttccagacgcgcatccgagtaatacacacgattcaccggctgctcgccaaacgtcaccacttgcgcgtcctgtgttttcggcggaaacccttcttcggtggcatccagatacgtcgctccctgcaatccgaccagctgagcaccggacacatcgccgacatgcagataggaatgcaacgcggcctcgtacgacataggcgccgtgccggtgttggtcacggtcaggctcatggtcagcgcattgcccgtttgcacgtcatacacggcatgaaactgagcacccggctcgtcatcgaaccaaggcacttcattgtcgttcagctgctgcgaatccaacacataccgtatgtggctgtcgtcgaatgaaccctcgtccaacgcccaccgacgcagacgtgcaaaaccgtgggatggattgagtgccagctgcttgccatgcgcaaaacccgggccgaaccacgggaagcagatcggcactcccccgccgagcgacttaccggcttcgatatgccacgtactcggcgtccacaccacatccgcctgcccggccggggcccagcgcaacagatgcgctccgtaatcgctgattaccacgctgccgccattgttggcgagcatacgcaaatcgacaccattgcccataagtttcccattcccattgtgcgaacgatacttttcactaaataggatacttccttaacaaaaaagaatcgcaaagtatggccgcaggatgcacaaaggccgtgccaccccattcgccgacgaccgccacgcgccaatcgtgcgcaagatcatcggatacgactggcaatagatgctggtcacgcgggccagtgcccggctcaagcacgacttccccctcgcgcaccagttcgccgtgctcccaatggtgcacataaacgcgatccgcacccaaatcgctggtcagcacgcggccgtccggcactggctgcacccagtgggcgacggcgcgtccgacagcagccgttcgcggcgtagcaccttggcgtcgccactgttatcgccgccggcatccaataccaattgttcgatgccggggcaagccacatgatgcagtttgccgaatccaccaaccagaatatccatgaggatgttccgttttactacgaactacgaaactcttttcgccacacaatacgccgtcgccggcggggcaaaatatgccaaaattagccaattgcagaaaaagggcgatccccgtataggaatcgccctttgcgcaaacactcaggcggagggaagtgcctcaggccgtcaaaccggcgaagagcgccgaccagtcctgagactcatcctcaaggtcgaatcgttcggtgttcatcagtgcctccttcaccggtccgggagccctcccctcaagtttgtgtattgagtaatcggtgagatcactcgtcgtggcccccaatgcccatccggaatgcggcaaatacacgtggaattggattgagcagacgaagacgccgacagtgatcatcgaacgtgatctgccgctgctgggttcccgctacgtcgattcagtgcgcaccaaccatccctatggcgtgcgtaaggcggcggtgcgcttcctgcaacacggtcacacccgtgtgggcgcggcgttcaccgatacaccgacttcggagctgattcaggatggctggaagcaaatcgtgacggaaagcgacgccatcgaatgcccgttcaccatcaccggcattcagccgtacaacaccagggacgtcaaccaaatcgtggacaccattctggattcgggcgtgacggccatgctggtgcactccgattatctggcgatcgccatcgcgcagaccctggagcgccgcggcaagcgcgtaccggacgatatctcgatgatctccgtcaacggctttgccacgcccagctcccgcccgctgaccgtactgcgctcgtccgataaggatctggccgaggcggccatcaacctgctgatcaaccgcatccaaaacccggattctacaacccgccacatctacgtggacccgacgctgaccgatcgcggctcggtaatcgataagcagtaaccccacctccctctgacgagggaggtggcatcgcaaagcgatgacggagggagaggcaccaggcctctaaccgttacgagcgaagcatcggccagagcaacgcccttactctttacaactccacggtctctttgccgggattatccttgacatgcgcgaacttggcggccagagcctccttattgcgcttttcgtcttcttccttggcctgacgcttagcctcgtccgggttccagagcacatcctcacggtgcttgttccattcggcaacggccagaggagcgatgtattcggcggtggcggtcagggtgtctgcgtcggcggctttggcacgggcattaagcaacccgaggatctgctcgtcggtcaggcagatgcgcggcaccgagcactgctcgcgcagttcgttgacgtagagcagaatcggcagaatcttggcggcagcattggcgacactgtccgctgaaccatcggccacagcatcaccggacacctcacccaataacgcatcgcacacggcgagcgcggtggcgaaccgaacagccacatcggcgggcttggcagacgtggccagacgaccatcggcttcagcgtcggcctcgacctgggcttccatggccgcgaccgcctccctcaccgattccgccgtcgcggaatcccagtcgattcccaacacgtcggccgcctcaacgatcagcctggcatcaccggactcggcgtagtcggccatcgtgtcgtaggcgtcattggcggcgagcagggcgtccacgatgctctgcgggcgaccgggaatctcatcggcaccttcgtagacgaactcggcgtccggcacggtgacgtcctcgccggtcaggatgcgggcgaatgcacgggtgacgcgcacctgcaggttctccgcgtactttgcgtcattgtccatctgcatggcttcggtcagcggccacaggctgatcagcgccgagccggcttcggcggcctcagttaccgccggcaatgccgcgacctgtgcgattgcctcacgattgagttcaatggtcatctatgctcctttgcgtccaccactcgattgcagtgcgtcttggctcccctctccgaggggagccaatgtcctaacaccagtgtgccgttacttgacgttggctgctgggtcgacatacgtgattgacatcacacggccggtttcgttgtcatacgtcaccgaggtcacggaggcgagcgccgtgtgccgcaggaacatccagtgctcggggtggccggtctccagataatggcgataactgaaaatcggcgattcgtggctgaccaccacaatctgctcgccggggtgctgggccaccttctcgcgggcgaagtcgtccatacgcgccgcgatgtgctgataggactcaccccagctcggcttgtacaggttggtgacgagcttccagttgccgttcttccacagcgcgccctcgccatggccgatgcgcttgccacggaactcgttgccggcctcaatcacccgttcatcagtggtgagcgtgagcgaagcctcgccacgagcctcgcgcacggggttcagcgcatcgagaatcgcgccggcggtctcgcgcgtacggtcgagcggcgaggagtagacggctgcaatcgtattggtttggggattcttggccaagtacgtggcggtggcttgagccatgcgacggccaaggtcggaaagatggaagtcgggcagtcgctcatagagcagatggtcggggttatataccttgccatgccggacgaaatggatggtggtagcgctcatgagccgcctttctgcttcccgccctgaagggcatgagaacgttgtcttaatatctccaatctaccgcgtgtcgcggagtggacacccgtagagtatccgtgacgcaaatatgcggatgggaaaatccgacgcaaactttgcgcgaccatggacaacacatcattcgatgagggcttcgccggcaacgccacgccagcgggggacatccaatcgggagcggaaaggagcgtagtgctgttatgtccaataactcgtccaactcgaattcgagcaccattctgaccggcatcaaggaagtaggccacaaagtctttggtgggtatgcggaactactgcgcattccgcataccgcccgttattccatcggctcggtcatcgcctgcatgccattcccgatggtcggcatgaccatcaccatttccgtacagcattattacggcaactattcgctggccggcatgctcaccgccattcaggcgattgcgctggccgtggccacgccgctgctgggcaagctgaccgacaagttcggccagaggcaggtctcgattccgacgattatcgtttggattgtggccgccatcgcgctggtgacggcgattaccaaccgcgcgccggaatgggtgctgtactgtctgacgccgttcctggccgccattccgccgtggggcgcgatgagccgcgcgcgctggaccaagattcttaagggtgaccgggagcgcacgaaccgcgcgctgtcgctgtgcggcgtgctcgacgaatgcatgtgggtgatcggtaatccgctggcctccacgctggccgtgatctccggtttgctggcgttctcgttcaccggcatgtgcgtggtggtcggtgcgctgatgttcctgaccgagctgaccactgagccaccgtcgcagaccgcgctggcgcgtgccgagggcatctcccgcaaggaataccgtgagcgcgaggccgccaaggctgaggcgctgaaggtggaaaccgccgccgaggagacccgccgccgtcttgagcgtgaaggcgtgaccgatgaggccacgattaacgcagccattaagcaggcggtcgccgatgcgcgttcgggcaagaaggcgtccatttggggtccgggtctgattgcggtgtgcgtcacctggttcggtttgggcgcgttccagtcggccacgggcatctccatcatcgcgtttgccaccgaagcgaatatgaagcagtacacgggctttgtgtttgcctgcttctccttcagctcgctgatgggcgcattggtgtatggcgcgaagaactggtcgattgccctgtggaagcgcttctacttctgcctggccgtggtgaacatcggcatcagtacgttcctgttcgccaagcatctgtgggtgatcatgatcatctacttgattattggcgtatgccaggccccgacgtggatcaacggcaaccagctcatgttgcatctggtgccgccctctcgcttgaccgagggcatggcgtggatgggtgcgatgaattctatcggctcctccgccggttcggcgattgccggccagttcatcgaccgcatgggctcgcacggaggcttcatggtggtgaccaccttggcactggcctcgctggtgattgcactgatcggcttcaagcagatcaagggctccaccgagcagccgaccctgactgaagtgagtgtgtgagacgtatgctaagccccctctgacgagggggcttagcatacgtcaaaacgctacttcggccagcctttgggcgtgtgctccaaggaccagatgccgagcttgtgggagaagctgttctgccacttggcttcaagctcctcggcattcagtcgattttcagcggacttcagacggttcatcgcattggtgtgcgtatcgtcgagcagccacttgcgaatcaagaagttccagatcattaccacggcagtggccaccaacttgccgatattggtgcgcaacagatattcggcatgctgcgatacataggcatcatggttcataccataggtggaaatccagataatcgcgtcattcatgaacagaccgactacagcgcccgccacgaagataaggatctccatccagcgtgccatgtcatcacgatgcttgaatacgaatttcatgctcgccagatagttgaaaatcagcgagatgatgaaagagatggtggcagccagcacgttgtgcatgtggaatatgccaaccaataggttgaggataccccagtcgataacaaaggcgataacgcccacaatgccgaacttcatcagctgttcaatcagttttctcacaagagtattcaacactattgggctgactgcggaacgtgtattggctggaaaggccaataatatccccaattggccttgccccggtccgttctgcaagcagcttcctacgtccgcatgccatgttcaacagcagccgctgaggctagactggaagtgaaccgaatcaaggaggaattatgcccgttattcacactcatgtgtccgtgtccaccacccccgagcagcgcgaggcgttgaaggtcgcctacggcaaggcgattaccgctgtgccgggcaagtccgaaggctggctgatgtgcccgttcgaggacaatatgccaatctacttcggtggtagcgatgaccagcccgccgcctatgtggaggtcaacgtattcggccgctctgtgccgggctctgcttgggaaaagctgaccgaaagcattatggccgcgctgaactccacactcggcattcccgaggaccgcacctacatccgctacaccgccaccaccgattggggctggaatggcggcaacttctagttgccaccattcccctcgcagcatagctgttcgcatcgcctacggaaagcccagtgggctttccgtttaatggctcagggtggcaactagtttgcgtattctggctcccctcagtcagcttagctgacagctccccctcaaagagggaagctcagatgtagaaagcccgccggtggcgggctttctacgtttcaaggggctgatttccaacattcagaagctctactagcgtttcaaggggcttttaaaacaagaaacccggagtataaacattgcaatttcaatggtcatactccgggtttcgcaatcgaagagcccctcgaaacgcagatagacctccggaaaaccggaaatccgcccctcgaaagcgagttacctcacctcatgcctgtcatcacacaatcttgggcatgggggtggtgaggctggtggtcaggttgacgtggaccagaccggcaccggcatgcacctcgaccttcttcagggtcacggtgcgctcttcttcgggggcgcggtcgttgtcggtcatggtcgccggggacttgaccgccacgaacgccagatcatccagcgagatgcctgcgctctggcacagttccatggcctcggacacggactcggtgaagcccggcttgtagatcacgcgctcggccggtacgccgtaggcgttctcggccacccacttggcgttctcggtcagggccatgcccttgtgcgaatgcggttcggccggcatggagccgttctgcagcgcgtcgacgaaaccgtcaagctgcggggccagcgcctcgccgccgtcgcggaacaggttgccgatgatcggcgtgcggaagcccagctcgtcggcggtggcctgcagggacgggacctgatcgtcctcgccttcccacaggttgatgagcgggaaggtcggaatgtccaggttctccaggcgctgcacgtggaacgggtagcgccaggccagctcgggatcgtcgcgccaggtggaggcgcgggtcaccacgatggcggcggacggccactgcgcgccatactcgcgacaggcgatgtccagccacttctgggcaccggcgtcggtgccgtaaccggcttcgacgacaaccacgtcatgcagagcgcaggccatttccacggaaaccagcgtcggaatgccgatggacacgttggcgaacgggccaccgtgcacgtagaccggggagccgttcacggtctcggtcttggccggcttgaccgcgtcggcccgaatgccggtgatgcgccacagatccacgaactcgccgaaggtcacggccttgccgtccttggtaccggcgatcatcttggatacgcgctcggaaatctcgtccatcgagcgggagagcaccatgatctgcatgagctcgcaggtcggcgtgagcacgaccttctccggcacgttgcccttgccgtagtccacggcggtggagcgcagggagcggctcggcacctcggagacacgcggcacgagaatcgtgtcaagcttgccttcatcgatggccttctcggcgaaggagacgagcaggttctgggccgcctcgatggcgcccatttcgccgcacagaccccagtcgatgagctcggggtgggtcagggatgccttgccgccgccggaggcaccgcccttggaaccggctgcggtgatgcccatgctcggctgacgcagcacggcggccgcatcaatgccacgcttgttcagggcgtcgatcaaggcgatggtcgtggtggtcttgccttcgccgcgcgatgccttgagcggcgtatcggcggtgacgagcaccaccttgccgtgcttgcacggggcgtccgggttctcggccaggtacttcatgtaaccgaatgcgtcgatcttctggaccaggccgtactggctggtgaagtcttcgatggtggtcatttaatgcctttctgtgctgatgatggcggagcggggtggtggggcggccgccgccgcctcttcgcctagaaacagcccactgggctgtttcttaacagcttagcccctcagtccgcttcgcggtcagctcccctcagggaggggagctcaatacggactaaaagtcggacatgtggaagccgttcttcatttccatgctgcgagtgtacagcacggagtcaagcagcttgtcggtttcctccttgagctggtcggccatggtctggttggcggcggcgagaatctcgcgcacctcggggttacgcagcgcggcgatggtctcgtccggggtcatcggctgcacatcgccatccacgttgtcggcctcgaattcctcttcagcggcagactgcgcggcttcctcggcggccgtcaagcccagacgggcgatctgctcgtcggtggcggcgaccaagcggtgacccatcgcaccggtcttctcctggtagcgctcgacggcgttggacgtggagcggaaggcgccatcgcacagggcggcgatgatgcggttggcccagtagaagttctcggacgtcacgcgggtggtggtgtcctcaaggtaagcgggcgtggtgtccacgttcgggaagaacggcaccagcgtgttgaacgggttggagccgtatgccatccactggatggcgcgggaggcctgcgggcggtacgggcggatctgcatcaccgcaagctggctctggcggttgatgccgatcgtgcggtacatgtggcgggtgcgctcatcgcccagctggccgtatggatcgaacggggtgccctggtagtgggagctcaacacgtacttgatgtcctcgatggtcaccttgcgctcgggctggcgggcccacggaatgtcgtcggaggtgggcttgtggtcggcgtccgggccgtcccacacctcgtcgtacgggttgaggaagcgctgcatgtaccaggcgcgcggggtgttgtacacgtggtcggagtcggagtgggagccgaaggcgtcgcgcgggttgaacggggtggtgttctccaccgcgaggtccaggtggttggtttcgatgaattcggcgagatcttcggagcacatgtgcgcttcctggtcgcccagagcgtcctcaaggtcgaattcgtcgataccgagctggttcggcatggtcacgtaggcctcgtccggcacgcgcttggcaatccagtgatggccgcccacggtttccagccaccagatttcgttggagtcggagaaggcgacgccgttcatctcgtaggtgccgaattcctcaagcagcgcgccgaggcgctggacgccctggcgtgcggtcttgacatacggcagcacgatggtcaggaagtcctcttcgccgatgccgccgggcacctcgggctcatcgcccctggccggcgtgtattccacgaacgggtcggcgccgagcacgcgctcgttggtggtcagggtctcggtggcgctcatcgccacgttcgcctcgttgacgccggcctcgccccagatgccttccttgaggtccgcgttcggcacggcggtgtactgcagcgggtcgtccggcagagtgatggtcaggtgggagatcactgatttgtattcgcgcggctgttcctccggtttcacgacgatgaagcgcttcgggttgaactcgccgttcgcggaatcctcgttgcgggcaatgatggtcgaaccgtcatagctcgcgtctttgcctaccagaatcgtggtgcaggccatagtgtgatggtgtcctttctcttattcaagctccccttgtcaggctgagccgttcagcaaacagcccggtgggctgtttgtaggcgagggtgggagataagtcccaccacagatgttgcgggcggtagcccgtccgtaattgcaggacgagctgtctcgcaaagcgagactgaggggtagtcactctagctgtctctcccccagtccgcctacggcggccagctccctcatcagagggagctcacatacgccaactaaaaatcacgccttaccggtcaggaagatgccgtcggtgtcgggcgcttcgccgctgttgcgcagcgcgtgcaacagctcgttgagccagaagccctgattcaagccgggcaacggcttcttggtggcccacacctgcaggtagtactcgtggtccttgtccggcggctgcggaccgttgtaccgcatgatcaccgctgggtcagtgctgcggcccaagaacttggaggccgaagaattgcggccttgcacggtctcgggaatcatggccggcagctgacgggagaagtccggcgggatggccaacgcatgcgaatcattgaagtcgtacatcagcgcgtcaatcggcagattggccacggaccagtgaatccactcgaagccgcagaccggaatcgaatccgggtccacgaactcccagtgcaggtaacgggcctcggggttcacatcaccgatgtagaacgggaaggagacgaccggcacgccgccgttgaagtactcaggcgcggcggccttggcaaaatcgtccggaatgacggtgaaatcggcggaaatcttcatatgtcccagtatcgctcatatgtgtgacgtactgggggctgtgcgttacgggggtctctcccccagtctcgccgcgctcgacagccccctcgtcagagggggctggttgcgtcgggttatggaattagggcgcagaagagggattcgaataccagtagcgggttgccgttgccggctagacgcttgcgggcgtgggccacttcgtccagacgggtcacggcaccggcccggttcaaccgcaccgacaattcggtgatcggcgagcggttctccaggttgatgaggcccaccgaatcctccgcattgttctgcagcaccgccacatcccggtagatggaggcgatggagttcagcgcacgatccaatacgtcgcgcgtacggcgggtgaccaaacgcttcacatcgtctttcttggcgatctggttgaacgcgccacgcagtttcggcgggatgcggtcgttcggtgccagtccgttgatgcggcggaattccgcttcctggccggcggtgatgcggcttgcgtccgcctcggcctgggccttggcattgtcgataaggctgccggccagcagcaccgcgtccgaggcgcgagcgaggttcagtacgcccaccaccaattcgtcgcgatccgtcatcacctgctcgtcagtggcgtacaacttggcgatgccgatgtgtccctcggccagacgggccgcacgctgcgccacttttggctcgacattggtggtggaggtcaggaatccggccaccgcctgggtggagggcacggcgaggttcacgatgcgcgtgcgcgagcggatggtgggcagtacatcctgggcactcggcgcacacagcagccagatgcagtgttcagccggctcctcgatctccttcagcagcacgttggtggtgcgctccagcatgcggtccacatcctcgatgatgatgatgcgccatggtgccgtggcaggcatttgctcggaggcggtgatgatctcgcgcacctggtcgatgccgatggtcactttgttggtggccagcactgtgacatccgggtgggtgccagcgagcacctgttgggtgacgcgcgtgggctcatcgttcatgccgtggtcggggctttccagcgccgccgcgaatgctcgggccatattggaacggccggagccgggaggcccgcaaatcagccacgactgggtgatctgacccgggtcgccctgcgcgatgcgactgagcatgtcgattaccggctgctggccgactagtgaatcccatacgctcatcggacaccgcccatcgtcacggctcctgtagacgccccggatcgcgccaccaccgtatccacatctgcaacattgtcccgcagcagtgtctgaatgtccgcttcgatggcggaccacacctgttcgatggactggctggcatcgatcacgtggaaacgattcggctcggccacggccaagtcgaggaacgcctgacgggtgcgggactggaagtcgctgccggccgactccatgcgatcttcggcatgctcaagacgattgtgggaaagcgccggatccatatccagcagatatgtgcggtcgggcagcaggttgttggtggcccacatgcttaaggctcgaatctcttctggcgtaagttcgcggccaccggcctgataagccgaggaagagtctaaatagcggtcggtgatcaccacttcaccgcgctccaatgccgggcggatggtttcggcaacgtgctgggctcggtctgcagcgaatagcagcgcctcggcgcgcggtgcgatgtcgacggcgcccccatccacaccgtgcaacagcagttggcgaatggccttgcctagcgcagtgcctcccggctcacgggtaacgaccacggtacgcccctgagcctcaagatacgcacgcagccgctcgacttgcgtggtcttgcccacgccatcgacaccttcaaacgaaacaaacagaccgctcatgctattgaccttagcgttaggcgcagagttgtgcccaacaggcagttaaaccagctctacctccgtttcaaggggctgatttggtcttttctgaaggtctacttccgtttcgaggggctgttacccaagtagacaacgtcccaaaacggcggaatgacgttggcgcggagccgttcatactcgtggttcagcagatgaccagccccttgaagcggaagtagatattctcaaaacgagaaatcagccccttgaaacgcaagtagagcaataattccgctcagccacgcttgggaattacggcggggcgctcgtagccctcgttggcggtcagccagtcgacatccttcttgacggtggcggcggtggagctgagcttttcggcgatgcgctggttggaccagcccttgtttgccagcttcttcacctcggcacggcgtccggcgcgcttggcctcggcggcattggtcgcagccgaagcagcgcccttcttggctcccttggctcccgacttcgcggcaccggcacgcccagcaccgcgacggccacgggtggagggaccagccgcacgcttttcggcgagcagtcggaaggcgtcatcaggggtgatggattcaggcgtgtactgacgcggcaccgtgcggttggtctcgccatcggtgatgtacgcgccgaaacggccgtccttgatggtcacgttcttgccggtgttcgggtccttgcccagatcacgcagcggcggcttggcggcaccacggccacgcccgcggccgtacttaggctgcgagaacagttctttggccttgtcgatatcgaccgtgaagatctcgtcttccgaggccagcgagcgggtctccgacttgccgtcggcacccgtcttggtcagataggggccgtagcgaccgttgttggcggccaccgtgcattcggatacctcgccggtttcggcgttggtttcctcgtatgtgcccacttcgcgcggcaggctcagcagctttagcgcgtcttccagcgacagcgattcagggctcatcgtcttgaacaacgaggccatcttcgggcgcgacgcggcggcggccgcggccttcttcgaacccttcttggccgcagaagcaccagcagcatcgccagcagcgccagccgaagcctcagccggcggcaccagcgccacatacgggccgaaacgcccattgcgcacctcgacggtaccgccggataccgggtcaacgcccagctcgcgcggtccaccggagtggttgtcgatcaaatcgcgggccacggccaccgtcagctcatccggcgcgatggtgtccggcagagacgcgcgcttcgggttgccttcgacgtccagatgctccatgtcttccagatacgggccgtaacggccgacgcgcacgtgcaggccgtcgccgatgtcgatggtgttgatggcgcgcgcgtcgatctcgcctagctgcgcgacctgctgttgcaggccttcgtgcgcctcgtcggcgttgcgggcggcgccctcgccggaaccgaagtagaagtgggtgagccagtcgcggccggattcctcgccgtgggcgatgcggtcaaggccgttttccatctcggcggtgaactggtagtcgaccagcttggggaagttcgtctcgagcaacttggtcacggagaaggcgagccagctggggatcagcgcacggccacgctcgtatacgtaaccgcgatccataatcgtggagatgatgctcgcgtaggtggacgggcgaccgatttccttggcttccagcgtcttgaccagcgtggcctcggtataacgggccggcggctgggtttcatggccgtccggttcgatgtcgcttgcctcgacctgctggccgacgctcatcggcggcagggaggtgttggattcggaggcgtcacccctgacggccttgacgtccgtcttgccggcggcagcagcctggtccgagccagccccagcgccgggagcggcggctttgggcttgcgcccctcccccgtggccttcataaagccggggaattcgatgacagtgccggacgcttggaacacggcctcgccctcggtggggccggccggcgcagacaggcgcacggtggcggtggagccggtggcgtcagccatctggcaggcgagcgtgcgctgccagatcagcgtgtataggcgcagctggtcgccgggaagtttggaagccagctcatccgggtcgtggaagcgcgagcccgccgggcgaatacactcgtgggcttcctgcgcgccagcggttttggtggcgtactgcttgggctcggcggagaggaacttgtcgccgaaatggtaggagacggcgttgcgggcggcggtgatggcctcctgcgacagcgtcaccgaatcggttcgcatataggtgatgtagccgttctcgtacaggctttgggccgcgcgcatcacgacgcgagcacccatgccgaggcgattgccggcggtctgctgcaaggtcgaggtggtgaacggcggctgcgggcggcggcggtacggcttggtttccatcgacatcacagtgaaatcggcggtcctcagcgcttcagccacggcagtggcaccagcctcatcaagctggcgaacgttcgccgcgaacccgtccggggtcagctggccgtcggcaccgaaatccttggagccggcgagtcgcttgccgccgagcgcgatcatgcgggcggagaattcggcacgctcccccagcgcgtcaggcgcggccaacatggcgacgatatcccagtacggcacacgcttgaatgccatgcgttcgcgttcgcgttccacgatcaggcgggtggccacggactgcacgcggccggcggacaggcccgggcccaccttgcgccacagcaccggcgacagctcatagccgtacagacggtcgaggatgcggcgggtctcctgtgcgtcgaccatattgccgtccacgtcgcgcgtgttgttcagggaggcgttgatggcgttcttggtgatctcgtggaacaccatgcgcttgaccggcaccttgggtttcaaggtctgcaccaagtgccacgcgatggcctcgccctcgcgatcctcatcagtcgccagatagagttcgtcggcgttcttcagggccgatttgagttcgctgaccgtacgcttcttgtcgccgtcgacgatgtaatacggcttgaacccgtcgttgacgtccacgccgaacttgccgaacttggccttgtctgccgcgggcacctgactgggctgcgcgaggtcgcggatatgaccgaccgacgccatgacggtgtaccccttgcccaggtagtcaccgatcttgtgggccttggtcggagactccacaatcaccagtttggtagccatacccactccttatgtattgcgcgaaacacacgacgtttctggcgtcataatactcatgaatcatatccaactgccaaattccgccgttgtgccgggcaaattcggccgttcgcacctcatgttttaccgtttgggcggtgccggcggagcgccgatcaggcccagcctgcttaagggcgctgcagtgatctgacgtagggccagcaacagtccgaatgcgagcatggccacacccgtaatgcccacaacagcgctgacattcgccccctgaaccgcccaactggcgctgacattgagccccggcaccacctgccagatcacataaccgctgtaggcgagcaacagcaggcccccggtaatcaacacgctgccgacgatctgcacactcactgaggagacgcggtggcccggctcgtccatgccggacttgcgtgtaaccgccagagcgagcagggccaatcccgccaccagcaggatggacatcgccacatccgaagggcgatgccattgcccgtatatcacagagacaccgacggtcgccgcccaaaccacgccgatgacgcccgccaaagctcgaaccgcgcgaggcacggtaagcagcagaatcaccgcacaggctgcggccagcatcgtgtgtccggaaggcgcggaattagcggcaggcgattcagtgttgatgatgaacggacgcggcaacagacccttgatacgggtgacggccaagcagaccacggcgaacacggcgatttgcccggccaaccaccagcggcgtcgaatcagcgccgtaataatgccgattgcggcaattgtgcagctgacagcgataaccagccaggattgtgcgacggcgttcatcatgccggtggtccaggacggtacatcgttgtgcaggtttttccagaccagttcgtcgtacgattgtccgttttcggtaaacacgcacccccaccacacgccgaagccaatagcgatcaggagcagaccgaataccacgcacagtacgcggctggagattcgcgggcgcacggtaagcgggtcaagccgggccaagccacggtcgatatcagatgccccatccgcatcgtccatgcccagcggcctgaaatcccctaaggagcctgatgtggatgccgatgcatctgaaccggagaccgggccgagcgcagccaatgggtcaacaacgttcgacgacgagtcaggctgcgctgcgcctgagccgaccagattgaccgccgcatgcgggtcgcgaattctaggggtctgtgcgtcattcatacgttcgactgtacggccgcgccccggacagggagccgtgctcgtgccagctcacggccaaatccgcacaaatggaaaacctccacgcacccgtcagaggccacttacccttgctgcattcctgccctgggggagttgggtgacatagcgccgcgtggaggctggggataagtctatggagacgtatggaccagcgcagcgacacgaaacgtgcgcgccgggtcgcacggcaggccaaccagcgcattcaggcaatattcatgcagcatcaaggaacgtgcccaattgtaagaattccggaaaaataccggcataaatgcgtgtggttacgctcacgtcaaacgattgttcaaggccaacagttacggtggacaccatggcttcttatactcgtcgtgcacattcgggaggcaatggccccgctctgaggcaaccgcgcaccgcgcaaagcagagccgaccactccgcacaggagggcccctatacgccccaggagagccgttcccgccacgcaagccacaaggcttccaatagccatcgagccccgaacaggaagaaaaagaacacaggaaaaggcaagcaccgtgtactgaaatgggtgctgggcatcttcttctccctgattggactgggcttgctggccggtatcgcagtattcgcatacctgtacaccaccaccgaggtcccgcaacccgaaaagttcgcgttggccgagaaaaccaccgtgtattacgcggacggcaccaccgcgatcggctcctacgcggaacagaatcgttcaatcatctcttgcgaggggctgccggactacatcggcaacgcgattgtggcgtccgaaaaccgtacgttctacacggataaaggtcttgatctgaggggcatcgcccgcgcattcattaataatgtgaccaagggcacgcgccaaggtggttccaccatcacccagcagtatgccgagcggtattacatgggcgaaaccacatcctatgtgggcaaggcgcgcgaggccatcgtggccatcaaaatcgcgcaaaccgagtccaaggacgaggtgctgtgcaattacatgaacaccatctatctgggccgcaactcctacggcatccaggcagcggccaaggcatacttcaataaggacgccaaggatctgacgctgtctgaagcggcgatgatcgccggcattattccgtcaccgtccacgtgggatccggccgataacgccgatatggccaaatcgcgcttcaagcgtgtgctgaacatcatgcaggaggatggttacatcactgccaagcagcacactgatgccaagttcccgcagactgccgcggtggcgcagcaaaacgaatacgcggggccgaacggttatctgctggatatggtgcgccgtgagctggtgcagtccaaggcctttaccaaagaggatttggataccggcggatacaagatcatcaccaccatcgacaagagcaagcaggaccttatgcagtccatcggcgacacccgtctggacgacatgcctgaatccctgcaaatcggcggcatagcgctggacccgaagaccggtgaagtattgtccgtatacgccggttcagattatctgtccaagcagctcaacaatgccgatcaggccgtattcgaaccgggttcgactatgaagccgttcgctttgctgggggccgcgcaatccggcgtcagcttcgatacgttgttcaacggcaattcccaccagcacttcaccggcttggatcaagaggtgaataacgctctggagaacaactggggcaacatcaatctgtatcaggccaccgccaactcggtgaacacggtgttcatgaacgtcaatgagcatctgacgccgaagcgcacggccgcaatcgcccatgaagcgggcattcagggcgatatcgatgaaaactccatgtacaacgtgctgggcatcaacgccctgaccgtgtgggatttggcgcaaggccattcgaccatcgccaacaatggcgtgaagagcaccttgcacatggtgtccaaagtgcttgattccaacaataaggacatgtacaacgcgcccagcaaaggcaccaaggtgttcgatgccaacgactgcgctttggtgcagaaggccatgcagggcaccaccacgtacggtacggcggccggcacatccaacatgctgggccgacccatcgccggcaagtccggtaccgccaacgacgaaatggcttcgtcgttcgtgggatacacccccagcatgatgaatgtgtgggctatctggaacccggacgataagggcaatccgcaggcggtgccggccttctccggatacggcatctcttccactggataccccgcccacctgttccaggagttcatggctcaggccttgcaaggtaccgaggtggagcagttcccgaccgctaaagacaatggcaagatcggtggacccgacggcacttggggcttgggcaagggacagagcagcggcctgtccaacaacaccaacaagcagtccaccgaagacgcgcagaagcaggctgagcaggacgcacagcagaaggcggccgaagaggaagccaagaagcaacagcaggcccaggagttcgcccagcagtgcctcgccaatccgagctattccaccgagtgtccgaattatcccggcaccactaccggcggagatggcaacaatggcaacaatcccggcaataccggcgggaacaacgggaacaataccggcaacgataatggtaattccggaggcaccggcgggaacaacggcaccaacggcgtcacccagtagtaagtaagcacagacaacaaagctccctctgatgcaatcagagggagctttgttttgttgttagcgctcagcgcttgcgctgagaacggttgatggcagagataatcgacttcagagcgctggtggtgatcgacgaatcgatgccgacgccccacacgatctgcgcatcatcggcctcgccgacctggcattccacgtacgaggcggccatggcgtcggtgccgacggacatggtgtgctccacgtaatccataatcgaggcgtcaacgccaaagttggaaatggcgttgaggaaggcggcgatcggaccgttgccgatgccggagacctcgcgctccacgggcgcatcgaccccgacgttcacgccgcggtcgagcaggcgagccttgagcacggtatcggagccatcctcaccggagctgacggccaccttgagcagcttcaagcggccccacggtgcgagcgaggcgtcatgagtatcgcccacaaccacaccggcggcggtcatgccggactgttcgatcggcaggtactcgtccttgaacagacgccagatatcctcgtccttgacttccttcttggtcgtgtcagcgtagtcctgcacgatcttgtcgaattcaatctgcagacgcttgggcaggtcaagattgtggttggtcttgagcaggtaggccatgccgcccttgccggactgcgagttgacgcgaatgatggcctcgtacgtgcggccgatgtccttcgggtcgatcggcaggtacggcacaagccacacgaagctgtcgagatcggcgccagcgcgctcggcggccacctgacgagcctcgagacccttcttgatggcatcctgatgcgagccggagaacgcggtgaacacgaagttgccggcgtacgggtgacgctcggagatcttgatctggttgcagtactcaaccgtcttgcggatctcgggcacgttggacaggtcaatctgcgggtcgatgccttgggtgagccagttgaggcccagcgtgaccaggtcaacgttgccggtgcgctcaccgttgcccagcaggcagccttccacgcggtcggcgccggccagcacggccagctcggtggcggccacgcccatgccttcgtcgttgtgcgggtggagggagagcactacggagtcacggtcgtcgaggtgggtggagacgtactccacttcgtcggcgaacacgttcggcgtggtcatttccacggtggcgggcaggttgatgatcatcgggtgctcgggagtcggcttgataacaccgatcacggcgttgcacacctcgacggcgtactccggctcggtgccggtgaaggattccggcgagtactcgtagtacaggtcgatgcccttggcctcgttctcgaggtccttgcacagttcggcggcgtcggtggcgagcttcttgatctcttccttgttcttgcggaacacgacctcgcgctgcagcacagacacggagttgtagaagtgcacgatggcgcgcttggcacccttgagcgcctcgtaagtacggcggatgaggtgctcgcggcactgggtgagcaccacgatggtcacgtcgtccggaatcagctcacgctcgatgagcatacggatgaagtcgaaatcggtttcggaagcggacgggaagcccacctcgatctccttgaatcccatggagacgagcaggttccagaaacgcagcttgcgctcggaatccatcgggttgacgagggcctgattgccgtcgcgaagatcgacggagcaccagcgcggcgcgcgctgcagtcgcttgcccggccacgtgcgctccgggtaatcaaacgggatctgcttgtcgtaggcggcgtacttgttatacggcatacgactcggcttctgcggatcgccgatgaatcgtgccggaggcagcagcgggtcgttgttccccccattggacgccgcagccactgccgcgagatcaaaaacggatgattgaccctgacccattgttcctcctttactggttattgcgcgggccctcttgcggacgcgactgcggcgttgtgccagggcggcgccgggccacgcggatttgtcaatacgcacgtaacatcctacaggccggttcgggcaaacccgcgggaaatgccgtatcgtggcatttgcttatgcacctggctgatatgagggcactcagcgtcgtcagcggaccacgctttgactccggcacaacaccccgcctgcgataccccaccagatggccctccatacgtcggcggcgggccaaatattggtactgcaccgacagccaaactgctcagcgtcgtcagcggaccaacttatggcgaaataccgactctgggaaagcttatcgtcggcaaattgccaggctatggcacactatcgacgctacgaggcccacaaccatcggcaacgcgacaaatattggcccggcgccgacgctagcctctttgagcgtcggcgccgggccattccatgaatcagtaacgacgccaatggtctcagaacgtcagcatagggacgctgtctggatctccaccgacgctgcatgacaaaatcgcggcaccatcaagcaacaacacggctgcggcaccccgccctgccccgtcccttgctgtgccagtcctgtgaacgcgcgggcgatccgacgcccggcaacatagactgaagagctatgacgagcttgcgattccgcgaagacggcagcttccgcgtgctgcaaatggccgacgtacaggacggccccgatgtgttgcccgacaccatccgcctcatccgcgaggccatccgcgaagccgatccggatcttgtggtgttcaccggcgaccagatccgcggctatgatcccgcctacatcgacacgttcctgcgccgccgcggcgaggagccgggcgctcgcgtgcgcgcggtcaccgagatcgaggccaaaatccgcgggatcaagcgtcaccccgtaattcgcaaagtatccgatcgcgtggccgatcgtctcaccgaagccggcaagcctgtaccagccgcgctgcttgaccccgataccgtgacgaacgccgtcgccgctgccggcgccgattcgaccgacgtgatcacgacttccgaagtaggcgattccgttgagaccagccccacgcccgagacggtttccaccctcgtatattcaacgcaatccggcaaggccagccccgcacacgagacgccggcgaccctcgacgaactcatgaatgagacccgcgaaaaggtccgccgcacgttctccggtttccttggtccggtcgtcgaggccggcgtgccctttgccgccacctacggcaaccacgacttccaatgcggcattctggccgacgaacaggatgacatctaccgcgaataccccggctgcctgaaccccgacgacagtctcgagcccggcacgttcgcgctgcccgtcgagtcctccgatggttccggccgcgtggccatgtccgttatgatggtcaattcaggcgattatgccggcaaacccgaagaaaacgatgcccaatacccggcgtatgtggtcaatccgcgaggactcgacctggccgacgccgacgggtacggcacccccacccccaaggccatcgaatggctggggtccgtccaaaccgagttgggcgagcgcaatggcgacggcaagcccgtgccggccatcgccttccagcacattccgccgcaggaattctacgattgtctgaaggaagtgcccgcatggacgccgaacgccgtggaaggcgcgcgcacgcacgccgggcgttgctatgtgctcaaccatgaggtttgccgccccggctcgcggctcggcgaggcaatcggctgcgcggacgagaatgtgggcgaggtggatgccttgcgcgaggctggcggctatttcgcgctgttctgcgggcatgaccataagaactctttcgttggtcatgtgcatgatatcgatctgggctatgcacccacgtgcgggttcgaatgctatggtcccaagtcgcggtaccgcggcattcgcctatttgaattccatgagagcaatccggcgggctatgtgacccgcatgctcacatggggtaatctggtcggccgctactccagcaacgagctgcgcgtctggttcgaggatcattgcgttaccggagcggtcagcgcacgcaacgagctgcgccgcccgcaggtgttcgccgtggtggccggcgcgatgagccttggctttatagccatcatccgttcgctgatcaaggccgcgcgctaaacctacttaaacagactcaccccgcgacgggccgtgcaatacgcgttgcccagccaggtatggcgggaattgggccagacagctcccagtcgcggtgcgttctggctcatccagatgctcggcacgcggccgtctgcggagcgtgagccgagcagattgaagccgttcttttccagcagccactccgggtgctgggtggcgatggccaagccttcctcgagggtgagcggcaggcgttcatcggagtcgataagcttgcgggccacgtccggctcgcgattgatataacacgtgccggtgtgcggattgacgaccagatagaacgggccttccggcggcatgaagccgtcttgaggcaggaagctggcgatgtcacgcggcggcatggtggtgaagccggccatgcgattgatggaggttcgtgcgatcagtgactcaggcgaaaccagttcgcgcgtgggcaccagcaggatgttcgatcccaaatcggaatgctcgagcgccccgatcaggggtcgggccagcgagcggaatgcggcggcggaaatatccgccacatccggatagccgagagccacgatacggtcgagctgtttttgggcctctactgatgcgatagacatggctaccagtgtagaacaccgccgtctcttcgttagtcaccccgttgtctatttagaagtgcaacatccttgttgttcggttaatgatagcagttcgtcggcgaatgcctcggccggggtgcggtagccgagcacgcgcatgggacggttgtcggtctcgtccacgatggcctgtatctcgtcggccatggacgggtcgatgcgcgtgcgcttgggcaggtagcggcggatcgcgccgttgcggttctcgttgccgccgcgccggcacgacgggtacggggcggtgaagtaggcggccatgccgagccgttcgcgcagttccgcgtggcgggcgaactcggtgccgttgtcgtgcgtgacgccggtcctggcgcggcggcgtccggccttccggtgcgcggggccggcgatgtggcaccggccggtccacggccccgtcttgagacgctccggccggtacggccggtaggattcgttctcgttggacgggaaccatgtgttgcgtttgattccgcggctgaccgtggaggcgtgtctgccgatcaggccggcgatccgccgtatgctcgtcccgttgccgatctctatccggatgatccgccgttcctcttccgacaggtgcgaatacacttgacccaaggcgcgacaccccttcactggttatctggacaatctccaatctaaagggtgtcgcactttcaaatagacaacgggggcaacaagtcagcgggcaagcggcacggccccgacaagccgcgcaatccgctcactaacggaacagcgagacgcccctgcgggccatgcagaatgcgttgccaagccacgtgtgcttggaattcggccacaccgcaccgagcctcggggcgttctggctcagccagatgctgggcacgcggccgtcggcgctgcgcgagcccagcaggttgaacccgtttttctcctgaagccagcccggatgctgcgtggcgatggccagtccctcctcgagcgtgaacggaatgcgctcgtcggagtcaatgagcttgcgggccacgtcgggctcgcggtttgtgtgtacttggtaccggtgcgcggttccacgacgatgtagaacggtccctcgggcggctcgaagccgtcctgcggcaaaaagctcgcgatgtcgcgcggcggcatcgtggcgaaaccggccatgcggttgatcgacgtacgggaaatcagcgattcgggcgacaccagctcgcgcgtgggcgccagcaggatgcgctcgtcaaaatcggtatgctccagcgcctcgatcagcggacgggccagggagcggaacgccgcggcgctcacatccgccacgtccgggtaccccaatgccacgatgcggtccaactggcgctgcgcttctaccgacgccttcgacatgactcccagtgtagagcatcgcggcggggcggtgccgtgacgttccagccggttccggcgtcccgtcgcaccggcgatccggcccagcatacgggcacccggttcttcttgttccgcccgattcgtaagattgatggatacgtgtggccatttcgctacggctgcccgaacgtgaaatcaatccgtcaaacccagaaggttgttatgtccgaaaagttgaaagtcggcattctcggcgccaccggtatggtcggtcagcgttttatcacgctgcttgagaatcacccgtggttcgaggtggtcacccttgccgcttccgcgcacagcgccggcaagacgtatgccgaggcggtcggagaccgttggaagatggaaaccccgatgcccgaatacgtcaagaacatggtggtcgtcgatggcgacgatgccgagtccgtggcctctggcgttgatttcatgttctctgcggtaaacatgccgaaggaccagattcgcgccattgaagagcgttatgccaagaccgagaccccggtggtctccaacaacagcgctcaccgttggaccccggacgtgccgatggtggtgccggagatcaacccggagcacttcgaggtgatcgagcaccagcgcaagcgcttgggcaccactcgtggtttcatcgccgtcaagccgaactgctcgattcagacctacacgccggcactggccgcatggaaggaattcgagccgcgtgaggtggttgtgagcacctatcaggcgatttccggcgcaggcaagaccttcaaggattggcctgagatggtgggcaacatcatcccgttcatctctggtgaagaagcgaagtccgagaaggaaccgctcaaggtgttcggccatgtggacgccgaaaagggcgagatcgtgccgttcgacggcgacctcaagatcacttcgcaatgcatccgcgtgcccgtgctcaacggtcacaccgccaccgtgttcctgaacttcggcaagaaggccaccaaggaagagcttatcgaccgtctggtgaactacacgtccaaggcttccgagctggagctgccgcacgcgccgaagcacttcatccagtacctcaccgaggatgaccgcccgcaggtcaagctcgacgtggactacgagggtggcatgggcgtttccatcggccgtctgcgtgaggattccatcttcgattggaagttcgtgggtctggcccacaacaccctgcgtggtgcagccggcggcgccctcgaatgcgccgaaatgctcaaggctctaggctacatcactaagaagtagttgaatctcgttaaaatcgcaaaagccctccgcaaggagggctttcatcgtattaggcgcggaattcgcggctcagcggccagtaccgccgtacaccacggcttcgatctgatcggcatcgagaccgtatgcagtgtgcagcgccttgacggcgtcgttcagctggtcgagcggcacaagcgcggcgatacgaatctcggaagtggaaatcatcagcacgttgatgccctcatcgctcagggcctggaagaacttggcagccagaccggcgtgggtcttcatgccaacacccaccacggctaccttgccgacgttggtgttcacatcaaaggagtggtaacccagcacttcctgcttgtcgagcagcgtgttctgcacctgcttgacggccgattcgggcacggtgaaggagatgtctgcagtgccaacggatgcgccggcctgcacgatcatgtccacgttcacgtcggcggtggccagctcggtgaacaccttggctgccatacccggctcgttcggcacgccacgcacggtggccagcgcctcggaacgatcgtgggcaatgccggaaatcaccggtgcctcggggcccaggtcagggaacaggtcgcccatggatttcgcttcttcttcagtcatgtcttgccttgtcttggttgaaattacttacgattattgttcgctgtagccgcgctcagtcgaggttcggcagcgtgcgcgggtcaatgccgtcaggcacaaccagcgtgccggggcgacgggagaacgaagagcgcacatgcagcggcatgttgaaacgctgagcgtactctacgcagcgcagtgccagcaccttggagccgcaggaggccatttccagaatggcttcgtagccgatggaaggaatacggcgggcggaaggcacgatgcgcggatcggcggtaaagatgccgtccacgtcggtgtaaatctcgcagatgtcggcaccaagggccacagcgagtgccacggcggacgtgtccgaaccaccgcggccgagcgtggtggcgtcacccttggcgttgatgccctggaagccggcaacgatggcgatgtctcccaatgagagcgcgttcttcacgcggtccggtctcacggccttgatgtgggccgcgccgtaacgggtgtcggtgaagaagccggcctgctgaccggtgaaggagtgggcgcggctgccttcggcgtgaatggccatggccagcaggctcatggaaattcgctcgcctgcagtcatcagcatatccatctcgcgctcgggcgggttggagtcgatgctcagcgcctgatcgataaggtcatcggtggtatcgcccatggcggagaccaccacggccaccttattgcccttcttctccgtctccacaacgcgcttggccacacgtttgatcgaatcggtatcggcgaccgacgagccgccgtacttctgcacgatgagagccactgctgtcctttgttcttctcttagggatttgtttggtcgatattctacgcaaacgcaacgattataagggctgtcgcgttcaccccgcgaccccgcgccggcatgcggacacgggtatggcctacgttgttcagcaaatattcaagttttcaccggtggttctttgagacagccgcatccatcctttgagattcgagcggttaactatcaattaccggcagacgaaagcaaaccggcgaggtttccgcagaaccccataactgaataccttcttcttcctctctccttttcaaggcccggtcccgctctattgtggaagttggaccattttcgttgtggaagttggaccatccctattagggaagttggacactagattacgaactagactttttcggacttcttatacccctacattgcccctatatggcccctatatggccctcgtcggcatgttgcatgaaaggcttggtgcggagtaacgtttcgcagtgtggcacgtgcggcgttgccacttgcggcagcacctatgccaaccacgactaagacgggccggccgtcttgtataagcaaatcatgagcagatcaagcgaaggaacaggcgactatggcattgctgcatcgacgttcgacgagtaaccgtgcctcacagaaaatgcgggaaaacaacgcggccatgcctgatgacacatctgcaaatgacaacgtttccccagcgcgtcccgagcccacagcattcgttccaactccatttgacgaagtcatcgatattagcgatctcgtggccgagcgccgacgcctgcaacgcaatctgtgggcgatgcgcatcatcaccattgtgttgctgatcgccgcaatcgccgtggcctgtttcccgctagcgttgcaattcgagtccgaccgcaacttggccgccaccacagccaccacagccaaagaagtagccggctggccttacccgcaggcgaaagacaagctcacggcggcccgcgcatacaacaagaagctcgctgaatccggccagcccatcttgggtgaagccgtcgatccgttctccgccgcccaaggaggatcccaagccagcggcgaggattccgcctcaaagaaagacaaggaataccagtcactgcttaataccggcaacggcgtgatgggcgcaatcaaggtgcccaaacagtccatcaatctgccgatttatcacggcacttccgaggaagcactggcttctggtgccggccacttgtacggcacgtcgctgccagtgggaggtaaatccacccattcggtcattaccgggcaccgcgggttggttgaagcgctgatgttcacccgtttggacgaggtgaaagagggcgacttcttctacatcgaagtcatgggcgaaactttgggctacaaagtggaccgcatttcggtgattttgccggatgacacgtcgaagctcaagattgtgccgggtgaggaccgtgtcaccttgatgacctgtacgccatacggcgtgaacacgcatcgactgcttatctccgggcaccgcgtggcaattccgatgccggcccccgagccgaatgacgtgcttgacgcgcgcaatatcgcccttggtgttggcctgggcatactggcggcaggactgttcattatctggttggcacgacggcacaaggccgcgcgcatcatccgccacggcgcattctggccgtggatgcgccgcaagggcgaaagcgccaatgatacgctggcctaggcctcacgccgaccggccagcgccctgcccagcgtgatttcgtcggcgtactccaagtcggagcccaccggcaggccgctggcaagtcgggtgaccttgacacctacgggtcgcaatagctgggtcaagtagctggtggtggcctcgccttcaatattcgggtcgagcgccataatgacttccttgacctcatcgccttctaagcgtttgagcagactgggaatacgcaggtcggcagggccaacgttggccattgggttgattgcgccgccgagcacatggtataggccgcggtattcgcgcgtgcgctcgatgctcatcacgtccttgggctcttcaaccacgcagatcaccgaacggtcgcgtctcgggtcggcgcataccgggcaggggctggattcgcacacgttgccgcaaatatcacagaagcggatcttggccttgacctcctcgatggcctcggccaaatcgcgcgcttcatcttcgggcgcggacagcatgtagaaggcgatacgctgcgcgcccttcggcccgatgccgggcagccgcccgaaagcgtcgatcagtcgctgtattgcgccgtcataagcaagtgccatgggtattcctcgttattcgtcctcattattcatccgagtgcttcttggcaggctggatgttcttggggttcttcggatcatctgccgcgaattgctcgacttttttgacctcgaatagctttttcagatcgtcaagattcatggccgtcgcctcgccgagcgactggtcgttcatcgagtattcgtcgtcctcggccgcgacttgcggttgcggctgcggctggctattccacgggtcggcattcggcgtcggctgtgcgggctgcggttgattccacgggtcatcgccggcagccggctgcggaaccgattggggctggttccacgggtcatcgcccgacatattgcccgacatattgcccgacactgtctgaggaaccgaagaagccggagtctgggactgcggctgattccacgggtcgtctcctggctgcggagccgcctgagcatggttcccctgcggctgattccacggatcatcgtgaggagactgctgatatggctggttccacgggtcggcttcgaccggttgcagtgccagcgaggccgtagcctgagattgcggctgattccatggatcatcgcttgcgccggcaactgccgtagcgggagctgcggtggctggctgccccgtggactgtccagtgggtccagcggacgcaacggacgcagcgggtgcaacaggagcagccggagcggcccacggatcaacaccatcactgatgtccggaaccgcaacatgcttcttgtgatgctcttcgggcgcaggcgcagcagcgggctcgttaggtgcgaacccgtctgcagattgcggtgaagcgttgcttacggccggcttggcccaagggtcatcgtcactccagctcttcgccgccgtggatgcactggattggccggctcgatggctgtcgtccgtatcctcggcttggcctgttgcagtcggcttcggagctttcggctcgctccccatatgaatgcccagacccgcgcccaaactcgacgcggccaatccggccttggccatggcaatctgctgcttgaccttggccaattgctccgggctcatacgtttgacggattcgactcgctcgccattcgccgcgaccgcagaaggtgcaataaccgcattggcaccgaactcgttgcgcacggcatccaacaccacggacgccgccttcttaccgctgttgtccacggccaaggcgaaagcgtgctggctcagcgacttgtcgaacgtcatcgacaggcaaggcagactcttacggttgggaccgaattttacggtcggcaccttgtctcgtgacacatattcacgaatggtttccggcaaagcggcgacggctgcatcccacttctcgtcgatggaccgattatccgatgccgcaggcgaggtcaccggttgggccgggacggccggcgacgtggcgggagcaccccaggcattggcagcagcagttgctgcggcaggttgcgcagacggagagcccgcgggccggtcgctgactgggctgctgacagggccattgtctcccacagcggattcatgggaagcggtgctctgaggcgcggctgcttgctggttgcgtgcagcaccggagaatccaccatgtgaggctccggcaaacccgcctcgcgatgcgccggcaaaaccactggcacccgtaccggaagcggctgacgtagtcgaagtcgaagaagcagccgcaggcggcatgccagaagaagctggcgcgggagcggctgttgcaaagcctgattcactgccggccaacaatcgtgcggccagcagttccaagcgcatacgcggagaaatggctccggtcatggcacccaacgtagtgttgatgatgtctgccatggcggtcagtgcgcccagtcccagcgccttggcttggcggtgcagatcgtccatatcctcggcctcagccgtgtcggacagcacggattccgcacggtccccggccaacgtaagcaccagcagatcacgcacacgagccagcaggtcttcgacgaatcgtctcggatcgaatccgccgaccacgactttctggataacgccgtacagggcttcgccgttgtgattgattaccgcatccactgcctcaccgatcagcgcctccggcgtgaagccgagcagggctacagcggcatcatgggtgataacgccttcgaccgaaccaaccatcagctggtcaagcacagacagggtatctcgcatggagccgccaccggcgcgcatcgccagtttcagcacaccgggctcgggcttgatgccttccttgtcgcagatcgtctccaggtagggacccatgacttcctgcggcaccagacggaacggatagtggtgggtgcgcgaacggatggtgccgatcaccttgtctggttcggtggtggcgaagatgaacatcacatgttcaggcggctcttcaacgattttaagcagcgcattgaagccctgctgcgtgaccatatgggcctcatcgagaatgaaaatcttatagcggtcgcgcgcaggggcgaaaccagcgcgttctcgcaattctcgagcatcatccacaccgttgtgcgaggccgcatcgatttcgaccacgtcgatggaacccggaccgccggtggccaggtccttgcagctttcgcattcgccgcaggggtgggaagtcggccctttggcacagttgacgcaacgggccaggatacgcgcggagctggttttaccgcatcctcgcggccctgagaacagataggcatgcgtaagcttgccttcgtccaaggcgcgcatcagcgggaccgtgacttggtcctggccgatgaccccttcgaaggtgtccggacgatagcgacgatacagtgcaagtgccatagctactaacctacctttgccctcagaattaaccgataaaaagtcaagataaaccgggctcatagctgccgaatcgggaaaactctttatattccaacgacattcatctgacaacggttaccgcatttttattgttattaaccgctttctttgtattaacatagtgtcaataacggttgtagtcaggaggtgcccatgagcgatatcctcgacgagaaacgccccacccgtggcgatgcccggcgcgacgccatcgtgcaagccgcgcgcaaggtgtgtctggaaaaaggcttctccaaaatcaccgtttccgacatcgcaagcgaagtcggtatgacgcgttcgctgttctaccactacttcgaagacaaggaagccgtagccgacgcagtactcgatgacgtcatcgacgaaatcctcaccacgttgaagcagtggaaccaagcgcgcgaaacaggcaacgtgaacaaggcattagacgacatcgtgcatgtgctccgttccctaatcgccgacgagagccccttctcaaaccgtatgatccaagatggcaacgccgaactgtatatcaagttcattgaccgcgcggcggaccgtattgccgactacattgcccagaccaccgtacgtgatttcgagcagatgcatggtctgccaatcaccaacgtccatgagacattcttcacgctaatcgtggggcttatctcgctggttcgctcgcatccgaacatcagcgaccgaaccatcaaagaggtcatggcgcagacgctgcatatcgaaagctatgtcgtctgaggtctgacggccattggctctggtaccgctctcccgcactcccctcagtccgcttcgcggccagctcgtccgcaattgcggacagcctacggctgactttcttctggttcgactatcgtcgaaccctcgcctacaaacatcccactgggctgtttgctttacggctcagcctaatgaggggagccaatataatcaggtcaggcgaactggccggttacggggtcgcgaccgtctcgggcgatggcgtcgagcacttcctgtcgggagtccacctcacgggcggctacggccggcggtaccagcacgcgtagcgcgcagtcctcggccactaccctgaatggcagatgcccgatgtattcgccgtccgccatcagcaccggtggctcgtcgccttctgcggctcgcgtgacttcgatctcgcgtatgcgcttccacccgaacacctttgaggcgagcagcttgccgttataggcgttcgagatggccaccgcacattcgccgaagttcggcacatgattcatccacaccaggtccaacagcccgtcggagaagcaggagtacggtgagacctcgatgccgccaccgatatgacgcgaattcgcaatcgtcagcaacggcgtgatgatgtctcgttcatccgtggtaccgtccgccagcgtggccttgacgtggtacccataacgcttcatatgcgtcagctccaccagcaccgccgcaaaatagcgcatggtgccggtcggcagatgcgaatgattcgcacggtcgttgatacttgcgtcaagaccacaggacagcatgcccgcatagtaccggtcaatcgggtgctcggcagacttgttctcccggtactcgtattccccgccggtggatgggttcacggcatagccaccatccaaagaggtcacgcgtcccatgtccacatcaatgtgtgatccgcgcacgatagcgccgacgataccttccactgcggtttcgatgcgattgaccggcagcttaagtccccgagcgaaatcgttgcccgagcccatggccacgatgcccagcggcttaccgccgcaacccacggcattggcaccgagtgcgatcatgccgtcgccgccgaccaccaccagatagtcgtactcgtgcgcgcgttcacgcgcctggttcagggaatcgtcgaaacttacgccggtgatgtcgatgacgtcgaagttatgggcacggccggcgtcctccagcagtcccaatactcgcgcatccaccttggcaccacggcccttatcggaagtgggattgcccaccatggccaccacgcgacggcgttctgtgcgttcactctcgctcatgctctcaccttaaccaaaggtccagaagcccgccagagcatcagtgcttacggtctattattgtgataattgtctccttccgtacaattcaccggtccggcccgagccatccgctccacggatgatgccaccggaaccatggtttccaccttgatggttaccaacacgtcttcatcccgcacggagcaggagcccagcgtgacgccattcgcttcagccatgtttgcagcaagcgcgcatggatcaccgatatccacatgccacagcgcatacgcggcgtcaaaggcgatgagatcggcgagggaacgcgctcgattctggcagatcatgaggttgcccacacttgccgccaccgcgagcgcaatgcccaccgccataaccagcatggctccggccatcgtgcccgatccctcctcataacgcattccctgcaccgcagttcctttctattgcggccgcccagccagcagccgaccagttattggcttatcgccgtagcgttgccggtgacccgcgttggagtgacatccagtgggccgggcagtaccgaacattcgaccatcacgctcgtcgattggccgttgtgggcaatgctgacgcggggatctccccctgcaacgtccgcagctatgctgcgcgcggatgattcgtcaccggtaaccacaaactcgcgtgcagccgccgtcgcggcaccttggcagtccatggaaacgatgaccacacgtcccattgccagtatcagcccggcgatggcgataacgctgggcaatacgatcgcgaattcggcggtggccgatcccgtgcataggtctggcggcagtctggcgagcctccaccggcatctcatggtcttcatggctgtcacccgactttcagagcctgtttgatgatgttggtcagcaacgtcttgatggcatccgacttcaggatggcgaccagcaccgccgcaaagcctgtagccgcaacgagtacgactgcgtattccgcagtggctgcgccttcttcgggctcagccatgagggcgcggatgcgtgcgtccatgaggcatagccgttctttcgccttggcgttcagcgtggccacacgagccttgctgtgcgcaaagatgccggcctgcccgtcgacgatgacggggataggggtattcattggcgttcctttcggtaaggaggggaagctgcgcagtggcttcgcaccttccccatgcgtatgtgagtggttggcccccgcgccgggttgacgcggggtgcataccactgtggactatcaacgcttcatgcaccaggaaaaacggggtatgtggttctagcttgccgagttatccacacctcgacgtgtcgtccaccacaaatgtggataaccaaacgcagccaagtacaataccgagcaatacaacaagattcagcctaagcgcactcagttcacgcctatattcacatcatgaaggacgcaatcgccggaatgactcctaccagcacgaatgccggcagaaaacatagccctgtaggcatcagtagctttaccgacagcttcgcggcattccgttcgatagcagcacgctcgtcacggtccagctgttcaatggcggattcgaggcgcacaccaggcatatcgccatgcgtccatgacgattccaaagccgattgcagcaggccaagatctcgttgcgtggtattcgtatttcccttggatggactatcagctggcgcaccctcatgctgaacagccatagcggcatgccacgcatcagcccaaggaacccctctggtcagggagttcccgacctcgctcatgcgagcgccgcagtcgccgccgacggctttgcccaccatgtcaagcgcccggggaatcgaggagccctgacgcaaggacacctgcaacatacgcaatatgagtatggtccatgacgacccgcaatcatgcgctacggccggctcctcgcccggcaagcggctgtcatgacgagacagagccttatacagccaaccagcaatcgccgcacagcctgccgcggcgtgtacccacaccgtactcataatccgctgcctttcaacaatgcccgcatccatgccaagccggcagcataacaacatcctcccaatgtcaagcagaccacaccgcgtggcgatccaagcaagaacgccaatggtctagctcccagaagctcgcccaatgccacagtgacggccggaagcgcgctcagcagccccacagtggctttaggaacggcacatgcttgcgatcgcaagttctgcatcagcctcatctgccggtaagcagtcaataccgcttccagacatggcaccgcttggcaaccgagctcatcgctcaaaaccgctgcggcggcgaccccgcgtgcagcttcaagtacctgcgctggtgattcgtcgggcagacgccgctgttcgaacaccgttatgagccgttccacagtaatgcgatgagtggcgaagcgtctgctggattgttcctcgaatgcttcaaccaatgtgccgccacctcgcaatcgcgcgatggcggacgtaatcacctgcgcaacgcccacgcgaggtgagtcggcatatcgaggttcgtttatggctgcggaatcgaccgcgcgcccgcggtaagccagccggtacagcctcccggacttgttccccggccatatcagcacggcgagcgccaccagaacagcacaccacatcatcacccaccaccactcggcctgggaacgatgccccatcgttcaatgaagtgcccccattcggcggcataccgaggaggatggcagccattccataccgccagcggtgttcctgccagttcaccatgtgctacgcgcagttcgccgatctgcgtgatacgccgctgtccattcactcgctccaaatgcaccaccgcgtcgaaagcgcctgccgccagcatggtcaacgcctgtggactgactccggcgagtaatccaagcgaaatcagcctggacggtactcggttcacgccgtccgcatgcacggtggtcatgccaccgtgatgaccagaattgaacgcgcgcaataggtcgacgatttccgcgccacggcattcgcccagcaccacgcggtcggggcgcattcgcaacgtcgctttgaccaagtccgccaggcttatggctccgacgccctccacattcgcctcgcgtgttaccaacgagacatgatcgtcgcgtcccagttcccccagttcacgaacttcctctacggtgacgatgcgctcgttcacgtcgcattgcgccagcagcgccttgagcaaggtggtcttgcccacgcctgttccgccggtaatcagcactgtggcatgtttgcgcaccaatcccacgaacgtcggcagccaagcagccgggaatacgcctaatttgctcaggtgctgtagcgatgccatggttcggtcagggaatcgtatggaaatcgcggcaccttgtggcaccaatggggcaatcaccgcatgcacgcggatgccatccggactggcggcatccgctatcgggcaggcatcatccagtctgcgcccgagctgcgcgcacagttggacggcgtattctcgaactacttgcggcgagcggaacggcacatgcaatactgtttcgcgcatgccattgccgcggtccgcccaaacgcggccatcacaggtcaccgccaaatcggtaacctgcgggtcagatgccacgtcatccagcagaccgaagaatatggttctgagcgctgtgccagcctcattggctcgcgtgctgacggcagccatagcatcactggtccttgtgagaagctcccgaaaccgggcgaatggcctgttctacgagatcggcaagcaagttcatggctttgcgactgcctttggtcaccgatctgatgccgaggccttccagtacgtctccgcacagattgacacttggcttgatgggccccaataccgtggcagtcaaatagtcctgcgcctcgccaatacccacgtggcctctcccacgtggagcgccacgtggttccacacctacgatatgtggcgcttcacagccccatgaatccaatctggaccggtgcgacttggctctggccagccccattaccgacaattccgcggcaatcacctgcaggccactgcgcagatcgggtacggtctcaatgagtccaccctgaccggcatctacgatgacaacgtcgttcgtttccgccaaagcccgaatggccgcttgaacttcccaccagtcaggctggcgcgcgctccaagggtcatagggaagtactcgcacaccctcccacatcatcagctcatggttcatcgcctcaccctcgatacggccgaggggcgcgtcgacttggctgaaccgcaagcccggctctcgttctacaccaagcagcaggtcaaggcatccggccacgaaatcagcgtctatgagaacgcagctgtgttcacgtctcgccaatgtccatgcaagcatggaagccatgacactcaaccccacgcctccatgacctgacgtcatcgttacaatgttatggaagctggtgtctgtagttagggcgagtgccggagcctcgcccgatctctgccgttcgcatgaggccaacggcctgggcggcggagtgtagtagcgatacgctggaattggcgcatcgtccgtgggcagcggaatgcccggaggtgctaccgctggcgaggtgatcctacgcgccacgcggggtgtggtgttgctattcataagccgattgaaacgtgtccgagttcaatgctcaacacgaatcgaccattgtggttctagcttgctgagttatccacaccccggcatgtcgtccacgacaaatgtggataaccacgctgctgtttcacgcccatctcatgcagaaaaggccctgacctcacatgcacagtcagggccttcattttcacgacgattccttatgcggtaatctacatttcttgcttacttatcgaggttcttaatgccgtcttccatagcatccaactgagcatcggtgaccttggccggcttcttcttgccgaacttggccttgagcagaccgatgatggtcggggcgagcgagaccagcagaatcagcacgatcaccagctcgaagtggtcctgtactgccggaatgttaccgaagaagtagcccagcagcgtgaacaacgtggaccagcacaggccgccgagcactgagaacggcgtgaaacggctccaacgcataccggaaataccggagatgaacggcatgaacgtacgaatgaacgggaagaaacggcccaggaacacggccagcgggccccacttctcaatcatgtgctcggttttggccaaacgctccggggtcaaggccttcaccttgccggactggatgatgcgacggccgaagaaatgaccaatgaagtaattgcactggtcgccgataatcggggcgcaccagaccaccggcagcagccagaacagcggcagcgcggccttgccggtcgcggcatcgggagcggcgaacacaccggcggcgaacagcagggagtcgcccggcaggaatgggaagaacaccacacccgtttcgataaatacgatgaggaagatgaagccgagggtcggcgccacgcccatggcaatccaaccggcaatcgcggcacgcggatccttcagcagttcgaggatgaaattaacgaagcccatgtgtttcctatgagtcctaaatcttgtattgagctgccagcccaatgaaccagacagttatatgcaaaccgtcaaataccctaccagccggctaacacaactactacacctgcggcgaggaagcgcggtaacgcaacgaatactccacatcaatacgccgcctcggcgcccgagcccccgtcttgacctgatcaagaatcgacgtgatggcaatctcagcaatacgcgcgcgctgcggatccacagtggtcagcgagggaatcgtgtacttagcctcatcgatatcatcgaagcccaccacacgcacgctttccggcactcgcacgcgcatttcccgcagctgactgataacacccatcgccagcaaatcattcagcgcaaaaatgccatccggtcgaatgccctgcgcatacatctcacgtaccgcctgagcgccctcggcactggtccattcgccgcactcgcggatcaggttcagatcaggcgtcactccacgttccgcaaaggcgctgagataccccttggttcgcatcgaacgagaggacggcacggattcgtccaacgttccgcccaccacggcgacggtgcggcatccggcctccagcagatgcgtggtagcggcttgggcacccaattcattgggcatcaccacgtgcggcgcaggtgcgttgaagatacgctcgcccagcactaccagcgggtagtcgccctcgagctcggccacatcctccgcccgcatggccgtggggctcaaaataagtccgtcggtcatattgctggccatggcatgtgcgctctcgatctcgcgctggcggtcgtttccggtcgattcgatgatgatgcggtatccatattcccgtgcccgcgtgatcatctcttcggccagttcggaaaagtaaatctggttcaaatccggcagagacaatgagatgagtcctgtgcggccggaacgcaaattgcgagcctgctggttggtcacatagcccagctcgtcaatggcctgctggatacgttcgcgcgtggccggcttcatataggggtaatcgttgaggtaattggacactgatgccacggacacgtgcgcacgtttcgccacatcgtgcagcgtcgccttgcgcgaactcgcaaccatagcgcccccttatgttcagtccatcaaccactcggcatggcaccatccacgtcgccatattggttgtcgaacgtttcagatgtgtgtttccagcataaaccatgtgggatatcgcccccgcaggccgtttcgcttaggcgtccgcagaatcacccccagtcggccttgccgacagccccgctagcagggacgggtccgacacgccgcccacgactcccgctgcaaccgtcaacagactccgccggcggtaataaatcagggccacttcggcaaaccaacaaagaaggcccgccagacaacgagaattcgtaccggacgggcccactcgaggagtagaaactatgcgatattcctatctataggctcacctttcgatggattcgttgacctgctgaatggccttcagcgcggagtcaacggtggcgtcgccggtgtagatgttctgcatctgcacaccgatctcgtcgttgagttcctgagaggtgagcttgcgctcaagcttggaagaggcctggcccttggtcaccaaatcgatgctggccttggcggattccgtggcgtcagacggcacttcgaccttcatgtccttgtcgaccggagcaccctgcagcgtgttgatccactcctgctggccttcgccggtggtcatgaactcgatgaacttcatggcggcctccttcttcttggagtccttgttcacgctcaggccgaagtccacaccagtggtcgggccggtagccttgtctcccacctgcgggaattccatcatgcctagctcgtccttctcaacggccgtgcccttggtctcatcgttcggcagcacggcggaaacgtgccaggagccggtcgggaagaaagcggacttgcgggcgtagaagtagttgtcgcgagcatccgggtaggtcgcagtaccaactgcaccatcctggaacagaccatcaccgatcatctgcttccaagccttcatggtcttgacgaaggtctcatcagtgaacttggccttgccttcggcggccttgtacacgtcaccttcgccgtactggttggacagccacacgaagatatcgtcgaggtgccagccatccttggcgccgagggccagcggcatcagacccttggccttgagttccttgttggcagccacgagctcgtcgtaggtggtgggcaccttgatgccctgctcgtcaagcagcgtcttgttgtacaggatgtattcggagccggaggtgatggtcggcatggccaccatcttgccatccttgttggtggtctgcgccacggcgccctcggccaccttggaatcccagccgggcatgtacttgtcggccagctccttcatatcgtcggcgaaacggccgtactgttccacagtggaaccggcctgcacaccgaacacatccgggccttcgccgccggccatcgaggtctgcagcttcttctggtagtcggccatttcagaagtacgccaccagttgatcttgatattcgggtacttcttctggaaggcggcgtaaatcgacttccactgggcatcggtaggctgccaggtccagaaggtcagctcaaccgggctgtccttggtaccgactccctcatcggagccgccgctgcccgaaccgcatccggcaagcagacctgcagacatagcgagagcgcccactgcggcgatcgccttcttcatgttcaacatgattgttctccttattttccttgtttctcttattggttcacttcgttgtggaagatcatcggaattggatggcgaagccagccacacccgatatgtgcggctgatgttggctcaattgccggacgcactcctttcctcgatgctggattccagcgatgtcctctcgtatccggtcagggatgcgcgatcaagagtgatacgggcacgggccgcattgcccgcaaacggcacctgccaggttttgccacgtaggtgcagtcgcatcgtgccgttcagagcttcgatacggatggtgagcacggctcggcccgaacggtcacggcggacgttgtcttcaaagacacgcagcctggccggctccggggtggaaggcagagacttgccgttgcgcatgaactccacggatgatgccgtgccggacaaacggtattcgccaagagacaacagcgcctgcccacggctcgtctgcccagcgaaatcaaggacgaaacggttgctgaccagcgggtatgccagttcgagtgttaccggacacacgccgctggacctcacgccgccgtcgatgacgagtcggcggtcagcatgcaattctcgaccgagatcccgcaatccggcaccccacagattcacatgttcagtggccgcatatgcgctgaacgcggcccccgttcgcaacgagaacaatcccgcccgaccgggcttatcactgatggtgcaggacgcggcgaaacggccatcaatgcggatctccagcctgcagtagcggcgctcaagccggtactcatgccaggcatgggaatcgaagtcatggaggtcggcattggtcacgcgttcggaggcaacgccgccgatcacatcgaccacgctaattacctgacggccagcatccacctcgagtttggtgaggttgttggcatcctggtaccgcaccacgataccgaatcgtgcgcccagtggggtgacgggagctttggcccagacgtcaatcacttgggttgcggacgatttgcccgacacagcgatgaatacactggattcgtcggcaacaagcgcgtgaccgtccacatcggattcggtgtgggccgcgccggaaataaccgaccatccggcgttcaggccatccgcaaaatcatcatgcacagtgccatacagcggtgcgctttgagcggcggcggtaggtcctggggtgtcgagccctccttcggcgtagtacagcgggtcgatgcgcatcacgcgctgttcggtgcccacatacagctcgtcatcggcgttacggccgtggtagacaatccagtcatcaacggcattgggcgctttgactatggagttgtggcccgtgccttcaacctttgggctgcggataagcagcggatcgaagcggttctcgttgagctgtttcgtccaatcgagctgatcgatgtgggcgtcggcctgcttattcggcagctgtgcgtacgagtatccgacgaagtagtcctcatgctcgtaggcgttggccgagtaggtgatgaacgcgcggtcacggtaggcgaagtatgtggcgccttctacggtgtgccagtcgcggccatcgccgaaacggttgcgggcaaagatctcctcgtccatggtgggcacgatgagcgggcgcggtttgttctcacgcgaatacggggtcacaaggcgatcgatcatcacggaggttccgggccggtcatcgctcaggccggtgacctgattgtcggcgtaaagcaagtacaactggccgtcatcgccatagaccacttgggagtcgatggcgaaggtgttgaacagctccgctttcttttcgaacgggccgagcggatcctcgctcacggccacacgcatgatttccgtgtgggtgtcggtctcctcggccggcatattcgagaagtacatgtgaaagacgccgttgatgagaatcaccgatggggcccagaagtttctgcgtccggcttcggtgtagcagaatccatgtgaggtccagtgcaccatgtccggtgaggtggagaccagaatgccgtgctcgtcggtggcatagcagtagtagaggtcgcggtatttgagcacgaacgggtcgggcgcggtatgggacttaccgtccgcatatggaaccggattcgtataagtgcgttcggccagcggcttcaaatcgccagattcggcaagcaaggcggtggggtcagctgcgccgagctcgtcttccgcagggctgtagctggcggatacaccgttgctgatggttgcggtcattttgggtcacctcagctcttgacggcgccggcggtgatgccggactgcagccacttctggctgatcaggtagacgatgatggacggaatcgtcatcagaatcagggcggcgtattcctgggccaccatctccggcgtctggctgcgggtctccatgaagtaggtggaggccagcgtgaccggatacttggattcgtcgcggatgagcagcaacggaatcaggtattcgttccaggagtagacgaaggtcagcacgccggtggtggcgatcatcggggtggagataggcatcaagatacgagcccagatgcgcagggaaccgcagccgtccacgcgggcggcttcgatgatttcgtctggcacgccgttgaagtagttgcgccagagcaacagcatctgcagggcgttgaacgccaccaacgggatgatcatgccgaggtaggtgttggtcaggccgaatgtcttgatggtgaagaacagcggcatggtcacggaggcaatcggcacggccatgcaggcgagcagcagcacgtagatcacctgggaaccggtgaacttcatcttggcaaaggcgtagccggcgagcgaggtgatgaccaccacgatcacggcggtgaccacggagatgaaaaagctgttgaacaccacgcggaagtagtgcacgtccttattgttgatcacggacaggtagctgttccagccgcctgcctgcagggacttggtgattgccgtgtaaatcgggaaaatccagatgacgaagaagaatacgaggacggtgtacatgatgatcgtcgcactggttttacgcttcatgatgacgtcctctcgttagttgttggcacgcttgttgaaggcaagttgaatcagggagagcatcacggcgatgatgaggaccatcacgccgatggccgcggacagaccgccgttgaactgctgcacgccggccttgtacaggtaggtgttcaggaattcggtggaacggccagggccgccgcctgtggtctggatgacgatatcgaaggtcttcagcgagccgacgatgccaagcaggataagcgtgttggtggtgccggacaggttcggaatggtgatgcggaagagggtgttccagaatccgcagccgtcgatcttggcggcttcgtagatgtcatcggagatagacatcagaccggcgtagtagatgatcatcgagaagcccatccattcaaagatgttgatggcacagatcgagtagagggcgatgtgcggatcgccaagccagctttgggccaggaagtccaagtgcaggaagcgcagggcctcgttgatggcaccgacgttcggatccatgatgatgcggaagatggcggcgatgatgaccggggccatggcgatgggcatgaagaagatcgccttgaagaagctggaaccgcgcaggcgctccttgaggatcaccgcgagcagcagtccgagcccggcctggatgaccacggtgacgaccatgaagatgatgttattcatcaaggccgtccagaacacggagccgggagcgagcagcttggtgtagttcttcaggccgatgaagtccatctcactggagatgccgtcccagtcggtgaaggatgtggccacggtgaagccgatgcagtagtagatgaagacgccggagagaatgaccagcggggcgatgaacaggtaggggcgcagcttgctttgccatgagttctgcgatgcgccgctgtgcttgcgggcacgaacacgtttgccggctgccgcagccacgttgctcacctctcccccacggctttgcactgcccccgctgcggcgggaacggcttcctgaattgccgtcatgatgacctcccttggacctcatcttctttttctgtaacatttcagaaactggccatagaaaatactcgggcatgctttgccggagcggaaaaccagtcaaccgacgctgctgtgcgccggtttttctagaacgtttcagatttcttcgttggcaacaattctataacgtttcagaagtttgtcaaaacagacatcaaatggttgatataaacattgcaaatacttgcgacacaccggaatgcaatgccgatacaatcggcctatttctactcccccaaacgctggcgcacgaaaccgtccagcgcggccgcatcgataccgtcatacgattcgatggacgcgaactggcccaggccggaagtatccgtgcgaatccagccagtctgcgcgatcagagtcgcgcccgatgccgcaccggcctgaagtccaaccgaggaatcctcgagcaccacgcacttggccatgtcttcacgggcgatgccaagcttgtcggctgcggccagatagggcgcagggttcggcttgtgttcgtacggatcgtcgccacagacgtagccggcgaacagtccctcggactgcttcatgatgttctccgccatacggcgcggcgacgtggtgaccagcatggacggaatgccggcctccttgagcgagtgcagcacgtccaatacgccgggaatccacggcagacgttcgacctccgccttgaacacataatccttgagctgtttgtcgatttcgggaacgctcaatgtgcagccatgcgcaatcatgacctctgccacgtgtggcaccggagtgccggagcactcccaaccgaggtcctcgttccactcgccgccattgttgtgcgcaatctcgatttcaccgtcatgccaaagcggctccgaatcgataagcgttccgtccaaatcccaaaacacggccttgagcagcatggttacctccgtacgtcgcagtgaatcctcaactattcgtattcgatatacctatctcaccaactccgcacgacagccgaacagcaaatcaccaaccccacaggaccatggatttggaatcggcgggggtggagtcggattcgcgcgtggtgtcggcagcggtatcgcggccgggcagttcgcgggtttcgcggcggatggcgttgcgccagaggcgggcgcggttggagcgttgtacctccacgatattgccgtcacggcctgcggcgaaaacgctctcctggtcgccggtttgcatgcgtttgacttcgcggcgcagttggcgattctcttcttcgagggccaaaatgcgtgcgatgccggaaagattgatgccctcatcctgacttaggcgctgagctcgagtcaggcgggcgatgtcgcgcaggcagtagcggcgtgcgccgccatcggtgcgctgcggacggaccagacccagccggtcgtactggcggagggtctgggggtggatgttgcccagttcggctgcctggccgacggtgaagatgggcagttcgatgtcgaagccgacgtcatcggctccgtcgagatcggccctgcccatcaccagcgcggttgcgcacatcgcgtacaactgcttcatttggttggctaaccgcgccattgttcacctcctgattacaggctgagatagtcgccggctttttcgtcgaattctttggcggcgtgcttgacggccaaacccggcttggcggggaccatgatctgcacgcggccgatcaggtcgcccggctggttgccgcgctggacgccaagtcccgcgagcttgacctcggcaccggagctggagcctgccggcaccttgaaggtgacgggattgccgtcgatatccttggcctcgaccttgccaccggccacggcctggcccacagttacgggcaggtccatgacgatgtcgtggccgcgcatcgagaacgcggcatcgggcttgacggtgacgtgcaggtacaaatcgccggccttgccgccgttgatgcccggcttgcccttgccggcaagcttgattttctggccgtccttgacgcccgcaggcacgtgggccttgaacttcttgccgtccacggacagggacacggtagcgcccttgaccgcctgacgcagggtcaggctgatcttggagttgcggtcctcgccgttttcggggcgcggggcctcctcatagccatagccgccggcattgccgtacggcgattggccgtagccgccatacgactggccgccctgacctgcagcaccgccgaacatcgagaagatgtcgttgatgttgttggggccgccgcccgaagtggagaagcggatacgcgaaccgttgccaccggcaccctggccaaacatggagccgaagatatcagagaaaccggaagcgtcgaagccgccggcaccggaaccgcctgcgaagcgggcgccgcccat

SEQ ID NO: 1157 - DNA, 39892 bp, Unknown
  R81_24m  MAG No. k141_9902
ccgcccggcctttccacggccctcgccgcgcgcccaccggcccaacgtcttcgcgctcacgtcgaactcgcgggcgaggtcggaggccttcgcccatgtgcgcgtgccgttgacggcgcgcgcgagctcggcgtcgtccctcacatattccggggcgaatgcgaggaaccatgcgatcacgtccacatggccccgggagggcctgcggcgcagtcgttcgcgcatgcgttcgcgggccaagcgcccgtcttcccccatgtcgatcgccttatgttcggcgcggcgcggcagctcgtaatcgttgcccatgatgccgcgcagcgtgtccgtggcgatgcccaagtattcggcgaatttgtttgtttcagcgatgtttttcttcgtcatcggcgttatccgttccggatgttcccatgccgttcgcccagtgcgagcggttcgcgcatccggtgcgtaagcgcgcggttcactgatcgccgcatggaaaccgaaaacgccggttatcccgtagacccccggtttcaggccgtctgaggcctccgcagggttttcgatgcggccggaagccacaagaccccgcccgggaggcctcctgtggcgtccgcgatgttcccggcgtgcgcgggaagcccgaagaccccgcccgggaggccttccggcacgcgcgttccccaagacgagaaaggccccgcacgctttgaaaagcatgcggggcctcatacggcaatgtccgggactatccgtcggacagcctccgggcgatgtcccccaacagttccctcaactcgcggttctcccggcgcagggcttccagctcatcgccgccgccggcgaccgtgggggacatctgctcggtgagccggcgcagccgttccccgtcgctgtgcaggtagtgcaacgccatggcgggcgttgaccagcctccgcgccgttgcaggtcggccacggtcgcgtcggtgtgctgggcgaaccaagtgttgcccgaatgacgcagatcatggaagcgcacgcccgggaaaccggcggcgtcgcgggccttggcgtacattttctcgaactctccctgatacaggaacccaccccgcgcgctgtggaacagcaggccgtccgcacccggcatggcgcgctcgtcgagatgggcgcggatatcgcccatcagcggcccgggaatggggatgtcgcggacaccggcctcggtcttcggcgtcgaatcgacgaacccgtcctccttggtgtacgacaatgcgtgcgtgacatgcgccaccctccgttcgaggtcgatgtcgcgccggcgcagcgccagcacctcgccgagcctcaacgacagccagaacgccagcgacaccgccagacgatattcggcgggcattctcccggcgacggcggcgacggcgctggggcccaccaccgggcgctccgcgctcctgagcgtcgccccgccgcggatacggcaagggttgaactccagcagcgggccgggcggctcgcacgccgacgcgagaacgcgcttgagcaacccgtacgcgccggcgcgggcgcccggcgtgccggccagcgacccgtaccacgaggccaccatgtccggcgtgatgtccctgaccggggtcccgccgaacaccggcagcaggtggcggtcgagcagatgccggtacgtcgcccgcgtgcgcggcttgaccttgtcatcgcgcaccttgcgcacaagccaccgttcggcgaactcgccgaacgacacggcacgcgcctcgacggcctcccgctcgcgccgcgccctttccaaccgctccctcggatgaacccacgaaccggactccaccagccgccgctcggcggcgagccacccctccgcgtcctcgcgcgacgagaacgcatgcggggccgtgacacgctccgacccatccaccggatcccggtacgacgcgtaataactcacgccgcccttgaccttcctgctcctgatggcaccccaaccgcgccgcctcgaaccagccatgacacacctgcctcacgcgggcgacccccggaacggcaacccaccgaaccggcctgcccgcatgacagcagaccataaggcaagtgcaaccaccgtgcaacaacgatgtccgcccctaccggcgaacgtccccaacaacccgccgcacgacggcgcgaacccggctaaaccacgccaaaacccagcaataccgccaatcccgcgaaccccgcccatagaacatgttgtccgtgcgcagcttgatcctatggttcgcggggaactccggcaggaggcaggcggtgggctcgccgacgccctcgcgcaggcagttcgcggccgccttgagcttgcgttcccccatttcgcccgcgaccgtccctgccttggccatggcggattcgcggttttcctacgcgacgacggccttcagggcggcggacgcccattccctgtgaccgggcggcgtcttggagagcacgttgcgcatgaaacgcaccatgcaccgctggtatctcgcgttcggcggcatcgagttgaccgtggagacgagtccggcgcaccggtcgccgaccaccagtccgacacccctcaacccgcgttcgatcatgcttcggaagaaccgctcccagctggccgcgtcctcgcgcatgccctcgtcgaccgcgatggcctcgcgccggccctccgtgccgacgccgatggcgacgaggacgctcacgctctccacgcttccgccccgggatcgcttgcgccacacgccgtccacgaacacgtacgggcactcggattccaacgggcgtttccgccactcgtcgatctccttgtagatcttcttgagtttgtcgctcaatgtccgggatggcatccgctcgccccacggcagccggctgatgtcgtccaccctgcgtgtgctcacgcccgcgaggtacatctccatcagcgcctcctcgacgctggattcgcgcctccggcagcgctcgatcaccgccgacccgaacagggcgcccttcaattcgggcaccttgagactcaacttgccggccttggcggccagcgtgcgctcgcagtggccggcgcggaacgccttccggccggtcttgcgcccgtatctggcggcgttggcgatctcgtcggcctcggcgtcgggcatggcgttgatggtctgctcgaccttgactcgaaccaaggcatcgagcttggactcgaacatggcgtcgtcgaactgtatgattttatcggacatggcttccggccttctttccaatcgcggttttcatgtgtaagcgactgaaaatcgtaccaaagccggtccatgtccttttcatcggaacccacaaccgaacctgcgcaagaagacgggcgttatcactgttgctggatttaatttgtaagtgcagcacccgttttcaggtcggctgtcgttgattgtagtttgacgatcggagctgcagacatttccggaaatagtcttgcagctccttatcctactatccacatcaagaggagtctcagcatgagcatcatgccaggcgcagggaaccgaatctcatagcatcatcgacggcaacagagccaacaacaggttcaacaaaaacatcaccaaactcgaatttttgaattccataaaaatccagagttttctcacgcgttgaatttgataccgactttatccgcgcaaagcatagcaagatgcaaaagacccagcattcttaactttaaaagcaaaagcggaatcgaaaatttaacacgcttgcccaaggggagcatatccaccgccttacgagttacaggattgtcataatactgcttgaccagagagtatgcctctttatcattttgttccacggcataggccatcatctgcagtaaagaaagaaccaccgaccctgcatacataggtaaaatagacaaagaaaattgcttatgaatctctgattccaaaagattcctagctttcaatagactaattttgttataaagcattttgccgctatttatattagacatcaacccaccgctaggcttgataatataattgtataacggcaaatcaacactaaccatatgtttggcatatcgcatatattcgcaattaaagataccatcctcattgaggacaatactgttattacaaataatattatgttgcttaataatatccattcgataaacatgacgccacatcatacctccctcatgaccatcatagaaattacccccccccgataataatgaacaatactgtcaaccgatccaccaataattcatggaaagtaattatgcaatatttcttctgttgaattaaataaatagttatcacgaagatgaaccgtctgccattgcgttgcattctgtgcaaggtttttttgacggtatgccatgacgcaatagtcagcctgttcattctccataagagaaatgattctgtctaaaaattccggctcgaccgtatcatcaggatcaacccatgccaaatattttccatgtgcatgctcaatacacgaattacgagctttggagacacccccattatgctgtcgatagactttaacgcgcgcatcacaagaggcaatacgattcaaaatttcaggggttgaatccgtggaaccatcgtcgacacagacaagttcccaattagaatatagaccatcctgaatactccgaatcgcacgttcaacatccgcagaaacgttatagcatggcataccaatcgacactaatggcatagttggttcattcatcttagattcacttcattctttatttacttacttttctaattactatgttgaaaacatattcacccaaaaaggtcaatttatatttcaacatgtatctattagaaaaatctgattttatctttctagatacaacattagaacgattatcagtgattaatttccacatttttttgttaggttgcccagacacaacggattcgatataggcatccatcaaagccatggcgtaacgtgcatacacgcaactaaaactcgaaggaactttttcttttgtaaattccaattcctcttctaatgccctgaaaaaattctgtcgtcctgtcgtatcactttcagaaatacttgagctacgttttacggtatacaaataatcatttgctgattcatatgcgacatttccggagttataaaacaccttgtaagcaacatattgatcttcgaatgtaaccccttcaggaaaaaccagaaaaggaaacatttttttatcataaatttttgcccaagcgtgggaagcaaagtccccattaagtttcactgattcatttattgcctcatccacttccattacggatgtaataaaagaggaatccaaatcatcatttcttgatgaaatgtttgattcttccacctcagtatacccagtaacagcaatatgcgtatcatatttattcaaagtctcatacaaatgagcaatatgctgcatgccaatcgcatcatcagaatcaacaaaaacaacataatcccctgaaatatgcttcattccgaaatttctagccgccgacaatccttgattagctgtatggaatacagtaatattatcgaactcaccctcaagttcatcacaaattcttccggagccatcagtggatccgtcatcgacaagaatcacttccaatgactgatacgtctgtcgttctacagattcaatacagcgtcgcacatatttagctacgttataaacaggtacaataacgctaataagtggattactttccgctatcatcattttggacatctaatctcctaatagctttatttgcaatacaaataagttattaaaaatatagtatttattatgtaagattactttttttgaagtctactcaaaataaccgtcgttgtgaatttctcccgcatcaatatcaaagcagcgaaatacacaatcgtaaaaacagacccttgtaacagcaatcggacgaacagaccaccatcagaaacaagacccctcactggcaacagaacgcaggaggcagcaacggaagcagctatgcatttcaagatgttctccccactaaacatcttggaaagatcgcgccgcaggtaaaggcacaatatcaaggcgcccacgccctcgcctaccgtcgtaccaatggctgcgcctacagcgcccagcgacgggataagtacaatttccagagccgtcagcgaaaccagtccaatcacggtagccaatgtaggaatacgttctttcccctgaggaaccaaaacattattgctgagcatcgtataaagagcgctgaagaaaaccgccagcataatcactctcatcgccggtacggcaggctcatacgcgtcgcctgacagaaatcgaatgatttcatccgcatcaaaaatgcaaaacaccactacataaaatcctgcaaccataataaacgaactatcttttttaagcagctcataaaactctttggtccggccattaccgaaataattcgccaagcgagggagcaacaccgtgcccaatgcggagatacaagcaatgagcatctgctttatcttgacggacgcgccgaaatatccgttctgcgtgtcattgctcagaaagcccagcatcgccgtatccatgttcgcatacaacgaccaggccgcagacaacaggaacaagccgaagagcggtttcacatgctggcgtaaattacattcgcgaagagaaactcgatccacaagtttgaaggatcgaagatagttcaaaaccattgaaccatttccgccaatgacggttataatcgcataaaccacataatctccatgttcatgaacgaacatgaacatcaaaatgattccaacaattttgaatgcaaccgaacgcactgtgatgtaggagtattcttccagcgcctgatacagccagtccattccaagcgcctgaagccagatattgctggacagaaccagcagcaatcctctgtattcttggaatttcggtacaattccgatcatcacaagcaaaacgaccaacgacaaagccgtggccaccatactgatgacgaacaactccctgaccgtacgagacaattgtttcctgtcatcccgtacaatcgcgcatgtgcgaaccccatacaaaggcattcctagagaagcgaacaacataaaatagttgattatcgcggtagcaaaattgattttgccgtttccatctgctagaagaactcgagagacatacgggaaagtgattaaaggaaaaataaaattagaacatgtcaaaaaagcgttcattataaaatttactttaatcgactttcgtttatgccttgacattgcctcatcctttatatttgattaattccaattcacgaagtcctgtttcctttaaacatgaaaaagaatttatctgactagatcatcattcaatacattacaacaaatttatattattcttcattttttttcgcttgacaatacttaacaaaatcttcaaagctattgaataaccgcttgctttcactgaaaaccttagcggaaaggtcgtaacttccatctacaaagtgcattacgcggtcgaactccgcacagcttactcgaccttcttcatcaggtcgttcaaacagccaaaaatattctctaaaaaattccttatctggaatttcaccaggatgggttttaacataagcgtcaaacaaattgactgcttcttctaactgagcattcgtccttttttccctgtacacggaaagggacataagaactcgacaaggattccccgcagcgacagaatcatctggtatatcatgcgtgactaccgaccccgcaccaataattacattattcccgatgtgaacattcttgagaataatcgcattcatgccgataaagacattgtcaccaatggaaatctgaccagtattgccgaggacatcaccgtatgctcctttcagaacactccaatcatatccatgatcaacaatcacaacaccgtgtgtaacctgcacattacgtccaatagtcaagttgcagggattattgatacctaaacaattgctctctgggtcaaagaagtatgtcccctcaccaattctggcaccttgttttttccagaaattaataaaatcctgcgaactagctttttcttttaaaacgaaatgtcttaataaatcacgaatcatcgtttacctttcatcaaattgcttatttttttctgtatattcttgagatatatatcaatccagaacagattgaatatattgaaccatcgtccatcaagttcatttctagatatcggcagactatttgccgcaacgaatctgtcaggccgtatttccactatcgaagatgaaggcacaggatcatgcattttccgcgactgcaaatgcatatatagataaggccgaatcaccgccgtacggctatccttgtcccatgagacagagacgatgcctttatcacaccagtaataccgcgttaaatcatagctctcgccttcatggaaactttgcatattcgggtcatatacagtgcgcttaatcttcgcactccttgtgtcaacgttgaaagacaggtctttttcatacaacttggctccatcttctctgaatagaacatgcacgttcaagcgatccggattcatccaacattgcacattctcatcgaacacgtatatcttgcttgtagtgaatgcctctttgtaaatatcacgcccatgcaacggtttcatgaagcgccggttgttttcaactgtattacggtagatcgtcaaatgaccaacggcaaaaaccttatcgtatccttctttaagaatcggagtcagcaacgtctccaaatcaccgaaaacaagatcacaatcgcaatgcccccaatattcgtagtcttgaatgtaatcttcaaagaggaaaccatatgccggcttgaaatcacaaagcttgtatggctgagggatgcacacatcaaaccctagttttttcttggcgttggccttaaactcctccaaagtcattggcaccacatgcacattggaaggatactggtacgattccttggaatccgtgaaaatcagaaaatcatatgacggattcgcggcacatgaacgaaggaacagcggaaaataattgttgaacttaccgaaataaggaagaatcaatacacattgttttttcatcgggcgcctcctcgccgtacgtgttgttttgtgttctgcctcaataggaagaaacggctcaccgtatccaccatcagtaatttcgttcgcaatgaaatcgatgaggcaaacagccctttacggaaaatcctactgaattcccgtctgatgcgttcgaaaaccttgggatcaataacgttttgttgtttcaatgctgtcctataaatattggtacagctttccacccgccatctgaacagaagtcccatatcgaattgcgggaacaacgccggcagctcagactcatatctcttggctgtatcataaatggcataacattcttcactcaacggcttggtggtatagctgtcagaccggagagcatatacatagcctggttcacctatgtgaataatattccggcatctgatgaaaatatgcggaaggatatacgcttcttccatcaatcgtccttcgggaaatcgaattggggttgttcccgagaacagtgaagtccggaaaatcttggcatataccgtgaaccccaccggaccatctgaagccaagcatgagtccatcgcctcgattggagtcattgcagcccgtcccggcaaaataccatagcggtcaacaatttgcccctgttcgttctgacgcacgatgccgcagcaaacaaggtcagtcgctgagtcggcaaattcgttgagcattgtttgatacgaaccactaatgacttggtcatcgctatcgacaaaagtaacgaattcaccgagcatattgtccaagccgacattgcgtgccgatgatacgccgccattctctttgcgaaagtatcgaatccttgtgtcacgctcggcataacgcttgcacatgttcgcgcttccatcagtcgatccatcatcaatcagcaaaacctccaacggcacatcttgcgacagcacgctgtctatgcactttgtgaggtatggctcggcgttgtaaacaggaatgattaccgaaagcagtccttgcttcatactgtttcactcttttcattgggaacgtcaccaaagcctttacgggtcaaaaagcctatggccacgccaaagcatgggatatatgacgcatcgagtttcaacgttgcattgctccacatggagataatgcaaaccacgcacatgcaaatacccgtcaggttcaggacggcatcatactttctgtatatccaacgctgcttacacaaacagatcaatgcaattatgaacacaagtacgaaaaggccgaagcctatatagccggtttctatgaaagtccattgatgcgtgaaggagcggtaactcaactcgccatatctcaaatagaatggggaatccaagaaagcaaactgggagtgctcagcacttccgaaaccaaaaccaaacagcgaagttgcaaaatcattattgaagaaattcttagtgataaaagtaaaagctcccagacggggaataccgtaactatccgcccatgtagcggtaagatatgttttactggtattccaatcagtcagaaactcaagaatgtctggcataactatggcaatatactgaaccaggaagattcctgcgataaatgccacagcaatgaagcacaatgtcttgagagaccaccgtgaaatcaatatggaaagaacgaaaatcacgatgaaatacaggaaaaaggttttctcctccgccatcgcggcaatcataattgaagtcaccgcgacgaacgcgacagtccataccggttcacgcccattcagatatgcattcaaataatatgcgaacagcacagcgctgaacgtgtttgcaccggcaccgttagcgaagagcccatgtacgaaatcaggattgccaccgctcgtcaccaaagattgatagatcgccaaaagaagattagggaactgcagccccaataggacgtggaacagcttcgtcatgtcttccacatgaagcacagcaatcacgcaaaacaggtaaatgagtccacgaaacgtattgcgtacggcccacatcaccagtaacggcgaaacaagattaatgaccgctgtaaagatatccacgacgaacaatgcgcataccgcgccccagagcatataggaatgttctctgcgcagaattggcagaaaccgaccctgaattccaaatattacggcaatcagcactacatcattaagatatcggatggttcccggcaaatggaggttctcaatcaacgcctccatcacaatggagtagaacaagataaagaaaacaccaaaacgagcatctaatggagtgcgcaatagacctttacgtctactctgatcagtagttttcaacatgattttagagttcatagcgcatctttcagaccggccaacgatagcatgagccacgttgccttcacacgtagtaatcccgcaaatacagcctgaggaatagacagtttccagaatggatacccggtaacggaagtgcgtacggaaacatcatcaaccatcttccgcatcgctttcgatttttgaacttgtgatatgcgggatccggctatggtctgacaagccacacgcgtgtaatcgataacaccgcgtctggcacgcagaagacattcattccgatacgttggattctcactaccagccatggtaagcaattcacggaacagttccaaatatgaatcgaccatacgctccgagaacgttcgcgttatcgaactttgaccatcacaacgatagttgtatcgggtctctccaatcgcggtaatggccgacgccattctgcatgctgcggtattgaagaacttgtcttccgaccgaatattacggaaccgaagattattatcaacaatcaacgaacgccgatatactgcggtccataccgataccggcaccggatcccacttctggcggttcggcaacggcccatagaaggaacgacgcaatcggaaaatctcttcttgtccagtgagcacctggtcagcgaaaggattcacattcctgtctccttttgcaccatcaaccatgcattgcatacccgaaaaacagatatcggcattgcgttgggtcgcagcattatagagctcttcaaacatctgcggctcgatccaatcatcggaatcgacgaatccgatgtactcccctgtcgcgatctccatgccactgttacgagccggccccagcccaccattctcgcgatgcacaaccttgactcgcgaatcctgcttggcgtattcttcagccatatcaccacagcgatccggtgagccatcatccacaagaatgatctcaatattctgcagagtctgcttccgcacgctttgcacgcatgtatcgagatacttctccacgttatacatgggaataaccacgctgactttcggttcgctcacgccttctcctcatgcttgccgttgataagcttttcatacagatgcatgtaataccccgctctgcgaggccaggtcagactttcaaagcatgctttgatattctgcatatcgggacgcatttcgggatgctcggaccattcacgcatcgccttggcgaagcccttcgccccatcctgagtcttgacgtaattgcaggccttatcattcaaagcgattgtggctccggcctgattaaaggtaacgactcctagcccattctgcatagcttcggcaagaaccacgccagttgcttcacgaacgcttggcatcacaaaaaaatcagcccatgcatactgctccgccatttccgtgtaaggaatttcacccagcacggtgacattattcatcaggtcacgctgagcaacctcgtcacgaagtttctgttccagatggccccatccgcacatccgcaactcatacttggtaaatccctgctccttcagcacggtgcaagcatccagtaatagttcgacgcctttacgcggaatgtacctgccgacatacaggatgtgcggcacctcatggtccgtcctttggtgctcgcgccaagcttcaggccagcatcccacctcggttttcacgatatcgttgcttgcatcgattccatgatcaatgaaatactgtctgctctccttattcgcaaacagatgcatgtcaaaggaacgatatgccttgcggaaagaaggcttatgaataatgagccaattagagcaacgacgaatcatctcgaacaatgcaaccggacgaagatacttgttcagcggcttcggcgcgtactcagcaccgccctgcggaccggaaaccttcaccgcatccgtttcgccaagttcaataagggaacgaaattcgacaggcgctatctgatgaatgacgtcgaaatgatatcgtccatcaagatcgtggaccattggagcgacacgtttcagccagataccatgacgtcctggatagagatatcccttgtaaaccttcttataaagtgaaggaatatcgcagtaatgcacatgaagccgaagttccggatgctttgaagaataatcttcaatggcttccttctgctcgatcttggtaatcaaatgcacgtcattatcgaggttctggctcatcgccaaaggaaggttccagcctacggcttcctcactaccgccataaggcgagctcgcatatgcaatgtacaaaatcttcatatcagttaccgttcttacctgaattcaaaagctttgcataccgatcaaccagctgctccgcatatgcctgctgtccacaacgcagcgtgacgtactcaatacaccgacgccgcatagtgccatagatatcttcatcaaccgcggaggctttaagcagaccatctttcaaatccgcgatgtttccggattcgaatgtgaacccagttctgccttcctccaccagctctggaataccaccaatcctggcaccaataatcggcgtctgggcagccagagattccagaccagagtatggcatgttctcccgccattcggagctcagcacgccgaaacgggcgttgccgacttcccgctgcagatcctcaccgctcttgtaccccaacaggtgaatgcgtgaaacggcctgcggaccagcggatgcaatcaactgctcgatcgcctcacgttccgggccgtcaccgacgatgtgcaaatcccatgtatctggcaaaacctcattatgaccggcaccggtccccgagccagcgccctcgtcaagccctgcggcctgcaggaacgctttcaccagggtaaggatgcctttctctttggaaagtcggccgaagaacaggaaatacggccttgccccagcctgcgcgtcctcgaatttgtgcgtgttcgccacgcgagtgcccatcgccatctgcgaatcggtcaggaagttctgcatcacaacggtcttgctggcaaagccaccttcatcgagcttgctcttcatgaactgcgatggcgcaataatcagatctattttgctatacgcatggtggaatttcaggaattcggcctccatggtggccaaggcgctcttggtacgggaccctttcacacacacgttcttcacagcatgcatgaaatgtttatccaagcaagcgtcgcacacttcaccatgtccgttgaccatagtgtatgcggggcaaacaagaatataatcatgcgccgtatacaccaccggcacatgatgtttcttcaaatacggtgcatcaagaatcgaaagcgtcagctggcgatgcacgttgttcatgtggatcacatccggcttgaactcctccagcaacgcctcgaacttgcgcttcgcctcgaacgaatagatcaacgtggcggcttcctgcacctgcttgaacgcggagaccttacccacataatccttctcggagacgaaatacttgctccaacggctcggctcgttgcttggatgcctcatggagaagaacgccacctcatgaccgagcgccttcagtccctccgcaagcgcgaagtaataggtttcggccccgcccttgcgatagaaatacttgttcaccagcaggatgcgcatcactcaccatccttgtcgcccgcatacaaggccaaggtctggtccaccacgcgatcccaactgtactttccggtgatgaagcccgccgcctcacgcttgtaccgcgtcacgatcgccggatcgtccgccatcttctgcagcatcgcggcaaggtcgtccacggaaccatgcgggaacgtgagggccttgtcctccaccacctccgtgcattcgggaatgtcggaggtcaggcagcagttgccgtatgtcatggcctccagcaagctcatcggcatgccttccagatcggaaggcatcacgtacgcataggcgttgctgaacagctcctgaagcacctcgccttgcacgaatccggtcaacacgatgcgtggatcggatttcgccatgtcctgaatgtgccgctggtaatcggatgagtcggaactgcctccggcgatgacaagcttcctgtcggtatgcaccttgcggaaggcctcgatgagataatgcacgcccttctcggggacgatcctgccgagaaacaggaaatacccgtctttgcccagaccgaacgacgcgttgatccgatcggcgggcacgatctccttggacgtgatgccgttggggatgaacctggtgtcacgcccataggtattcctgaagtactcctgcatgttccggctgagcacgatcacctcatccgcgcaggtggccgcggtgcgttcgccaagcttcaggtacgtggaggcgaatttgccccacttggcgcgccgccaatccagaccgtgaatggtggcgaccgtgcggatcccggcccaatgggccagacggagcatcacgcaggggccttcggcatggtagtggatcacgtcgggcctcgtcacgatggcacgcagcgtggcgaagaaggacgacgacaacgcggcgagtcccttgccttcgatggtgggaacggaaacgacgtccaccccatgataggagaaccgcttgccatgcccattggccacgccatcgaattcggatccggcgacgttatgcccgctacggttgtacgcaacgacctgatgcccgcgggccaccatccgcgtagccagctcatcgaccacgatctcgatgccgccctccctggaggggatacgcttatgcccgacgaatgcaatcctcatactcagtacaacctcaccagcaagtcagattccgcataaccagaacgccatccgcaatcaacttcagagagcttgcaagccttctgtccaatcgtctcccattgttctatcccccgtagacgagtggctgcgcggcataccgaccggcaaaccgcccacacccgtaccgccgcacccgccactgcggcgggcgttttgccggcggcgcacgcacggcgcaattgttgggtggtgctggaaagctggtatgaggaaagcaaaccgtatcaggaacaaggaggaatgccatcatggcaaccaccgccatcacctctgccgatttcgagaagaccatcaccgacaacgaaattgtgttcgtcgacttctgggccacatggtgcggcccgtgccgcgcgtttggcccgatcttcgaggcggcgtccaacgatccggacaacgcgaacatcacattcgccaaggtggacatcgacgccaatcaggatctggcccaagccgccggcatccaagcggtgcccacgctgatgatcgtcaagcagggcgaggtcatcttccagcaggccggcgcgctgcaggccgcggatctggatgatctgatcggccaggccaaggccctcgacctggccgcagccaagcagcagaacgcctgaggcgccaccgtcgttgcggcgcgacggttccgcacgccatggcgggacagggcgggagcattcatccacttcccgtcctatcatggtatggagcgtgtgcaatcaatcagggaccgtaatgactcgacacggtaggcatacccctgttattcgatctttgccgaacaagcgtcggctggcgaagatgaccgcattcgtggccgctgcgaggcttgtcacgaccgcagacgtggtgacgcgcggtttctaccgcgccgacaacgccaaaccgatctccgccattacttcgttctcggccacggattcggccgcatcccattccgccgtccgcggcaccatcaacagcgccgacaaggacacctcgttcgtcacggtgaagatcaacggcgattcccgcgtggtgctgggcgagaaaggcgtcatggagaccacctcgttggtcaaacgggccggaggcgctgtcgtctcatccaacgtcttcacctcctgggtcaagaaggccccggtggacaaggtgattctggtgggcactggttccggctccactgcggcatccgacccccagtccggcggcctcggcaccaccgtgcccgccggggagatccaatcctgggcccatcaatacctgttggacaacggatacagcgagggcgacttcaccgccgcgaactacatcatcagccacgagtcgggatggagccccaccgccaccaacccctcgtccggcacctacggtctggctcggactggcagaccaactacaggacccagttcaaatggttcatcggctactgcgaacagcgttatgcggcatcgtcgcggcgtacaactactgggtcgcgcacaagaactactgaaaccctcgacttccacacgccacgtcatgtgcgaagtgttgtcgtcccttctatgatgaaaagatgacaacacttcgcgcacttgtgtgggggcgatcatgacattcaatcgatatatccgtttccgcgccgtccttgagtgcatcggcgccatttcctgtatgctgatggcgtgcatcggcaatgatctggtcggcgtcatcgtggcagcggcctcggcattgctgtggatcggcggcgaagtctggggcttgacggtgtatcaacggcatcacccgcgtcgtgacgagctttccgacatgcaccagcacaaggccatgcagttcgccctgatcagcctggtgggatttctggtggtcatcggcttcatatacaccgtgctgaatctcgtcagaccgttggtggtgcatgtcatccccccgatgctgcttcccgcactggccatgtatgccttggccgtttccgatatccgctacctgtggttggaacacgacgtcgacgacgccggagacgacgatgaggactagcttgaagctgcaccggctcgaacgcggcatgaagcagtcagatctcgccgatttggtcaatgtgcgccgggagaccatcggccggttggagcaagggcaatattgtccatcgttgcgtctggccatggatgtggcgcgggtgttcggcaccaccgttgaggacctgttcagtttcgatgacgaatacgagtccgaatcccgctgaaccaacggcgtgtcgcggcaaagattttacttttcgttcactgtcggcagatgatgattgcttggatcgttggaatatcaaggttctgcgctcatgaggacctaccgccccaggcatgaccggcttacgccatgttcgaacgatgtcacatgatgtgagcgcattgtcgcaccgtcatcccatccatccattcagcggccgtccaccgtcaccgcggtgtgtatggtggtggctgtaaccaaggaatgcaggtgcccacacctgcgcaacacgctttcattggaggcttgttatgaagaagaagattgtggccgtgctggccgccatcgccgcggttctgggattcggtttcgccgccaacaccgccatggccgatgattacgctccgaccgtcgcctacggcggcaccaccgccaccgtgaccttcccggccggcacgttccagccgaacgagtccgtcaccgtgtactacgatgacgacgtcgtcgccaacgtccagcaggtcgccgaagtgtccaagacgttcaacgccaaggccgacggctccctgaccctgctgtacaccttcaaggccagccaggccggcaagaccatcgaggtcaaggccgttggcgcccagtccggcaccaagaccgccaccatcaaggtgccggccaccggcaccggtgaccagtccgccagcgccgcgcccaccaccgctcagaccggtgcctccatcgccccgtacgctgtggccgtcgtgctgctcgtcgcagccggcatcgcactgttcgccgttcgcaagaacaccactcgccgctgacgcgcaatagacgattcacatcgcatccacaagaccgggagtctgatgattcccggtctttttcgtcgctgggacgaacgatactcacgtgtgcggtactggaactaaaataggtatgctcgtcgcacaagggaaggatgatcgtcatgcggatcatgtatgtatgcaccggcaaccaatgccgttccgtgatggccgaatattacactcgggccagactcgttcaacgggaagacgattttcgcaacgccggcatcacggtacggagcgcaggcatcctgcattatcctccgcatcccgccgacccgatggtcgtcgacctgttgaaggccgacggcatcgacgcaagcgcgcattcctccaccgcactcaccgccgatataagtcaacaggccgatatgatcctgtgcttcgagcgcgggcaaatcgtcgatctgctcgatcagaacccgcatgccaggcgtaaggtcctgctgttcaatgatttcgtcaatgcctgccgtcatatgcgcgacgaagggcccatcgctggcgataccgccgcggatcggcttgccgaaatcatggattgcgtatccgtgatacgtccgttcctgccggaggccgcagaaaccgtggacccccaccgccaatccggcgaggtgttcgaacgggtgtatgcggagatcaagcatggggtcgataccatgcttgacgcggtggcctgacggcaccttcacatctgaatacatcggcgtcatccgcacatgcatcacaatggacgtcatactgctgactcgactgtatcgcgcatggtccggtcggaccaatgagagcatctccaagtatgtgcaacatgctttatactctctaattcaacatgtaaataatttgcatattacggaattattcaactacaatcgatgacgcaaatacgaatattgaaccgtgcgatagggagaacaatcatggcttctttactgcagggatttgaggagatcaggttggtcaagccggtggacaagaccgttttgaccgtcaccgactccgccatccgcttcaacaaggccaccgccgaagtgctcggattcccggcatacgtcaaagtgctcatcaacgacaagaccaggcagattgccgtgaccccgaccaccgccaaggccgacaacgccatcaaattcagtaagcccgaaggcaagcagagcacttccgtaagcgttaaggaagacacgctcgttgaagcggtgaagacctacttcactctgcccgaagccccggaaggcgaaatcgcctaccagtccgtcaacggcaccgcctatccggagagcaaaaccgttatcttcgacgtgaccaacgccaccgccggcaccatgaagcgccgtggacgcaagaagaccgcctgagccgcgaatcaacgccgcaaacgaaccgcgccccgttccgtcgatctgaacctcaaatcaatggaacggggcgcggttcgcgtatccccatcgctcagtgcgcctcggccttttcgccctgcttcgccttaccactcctcttgtgctggctttgacgctttctgccgttctcgtcggtgtcgctgccgtaatagtagtaaccgttcctctggggcttgtccatctcaccataattcatagccaggcccacgggctcgatgctcgccgtcttcaattcacgtgcgacctgccggatcatcttcttctccgtgatgccaagaccggccaccacaagcagttccggcccctccttggcgaacacggcagcgtcgttggacacctgcatgggagcggtatcgatgatcacataatcatagacccccgcaacatgttcgatcagagccttcatcgcgcgggaattgagcaaaatgctgggattcatggtctgcttcccggcgggcagcacgtggaagttcggcttccagtaccgctgaatcgcatcatgcgatgatacgccgttggtgatcagatgggtcaagcccaccgtaccctcaatgccgagggtcttgctcaccgaggggttgcgcacatcggcgtcgatcagcagtaccttgctgccgttttcggcaaatgcagtcgccagattcacgctcagcgtggtcttgccttcggacggtccggcggaggccaccacgatcacattggacatcggctcatcgggcaacacgaacatcatattggtgcgcagacgccgaatctcctccgcttcgcgggaagccgggcgggagatgatcaccggcgccgtgcccgtataggcttcgctgcggctcagcgagcccagcacgggggaatcgatcacggcggtgacatcggagtcgcgacgaacgcgagtatccatcacatccttgaccaaggccaccatgacgccgagaacaatgccggccacaaggcctatcgcgatattcagcttgaccttgggcgagctgggtgaggccggagcataggcctgctgcaccacggtcaggctgaccggggagatgatcttgtcgccctcatcgctgtatatcgtggaagtgacctgcttgcgcagattctcggcaaccgaattcgcgatgttcgaggcctgcttcggatccggatcattgaccgaaatgtccaccagcatcgtgctattcgggttggaggcggtaacgttcgcggccagttccttcaccgtggtgtgcagcccaagatcgtcgatgaccggctgcagcacggactcggtcttcaccaactgcggatacgtctgaatctggctgttgatgtaatcggcgccggaattcaactctcccgcgctgttgaaggtgctcggggcacccgccgtacccgccgaactgcgataggtggccaacagctcggaagtcgcggtgtactgcggtgtacgggtgaaggtgtatgcgcaaaccgcagccaccaccacgatcaacgtgaccaccgcggtgatcacatgcttgcgcaccgcattgaacaggtcaagaatggtgatcccgttaccgtcctgcggttgttcgactttatccatgaccatactccgttcttccgtatcctcggttcaaccctaatgtagggggtacccgttcaatcgaccacaggggtctgtctgaggaccattgcattatcgccggccgccgggctggccagcacatgcaccgtggtctcgaagcgctcccccgggcgcagggtcacggtcttcatacccaccgtcagattcccatgcatggcgagctggtcgaaatcccgggtccaatccacgatgcgtcccccatcgggggcatagacgtacaacaccgtctcgatctcccccgtgcggggcttgccgttgtgatcatacccgcgcaagaggtccggggcggcattcacgctggcggcatcggccgtgttcgtcaatgagatgtggatggtgtattgcttggcgccattgggataggtcttgtcataggtgctggtgacctcgcgtttcagataccagtccatcttgcccattgtggcgtcgttgaaatacacgcccgtcaccggatgggaggggcccgaatgcgattctccggcgatgggtgtgcccgagatgcgcttctgctcacgttcatgggcgctccacacatacaggtgtccatcggacgcggacttctggaacgtccgcatcagctgttgggttttgccatccatgccgttgagcacatgggtgaagatctcgccggcggccatcgtgaagaaactggtctgcgcggcctgcgtatcggtgtcgatgtagatctggttcagaatccgctgctcggcgttcccgccatccatcaccgtgccgtcggacaacgtcaccggaccggcgatctccaacagacgctgcaggaacaccgggtccacgctgatcacgccatccacgtcgccatgaccggagcgttgccagatccggcgcgcgatatcggcgacgcgcgggaagtcgggggtgaagttgatatccggggcatccgtggccatcttggtggagaacagggtacgctcatccgctgtaagcacgctcatcgcctcgtcctggctgaacaggccgtcacgcggcggatcggcgaacgtccccatgctgatggcgccgtcctcgaccgtcagcgtgctccatgcggtgggaatgcctcccgtggcgcgcaattcggcgttgttctgcgccagcaccagataggttctcggcccgttgcggccgtccgtgctgccctgcacgtcgagcatgccgggcagcacgtccgccagacggctggccacatccgtcagcttggcgagttccccgaacttgtcgcgcccctgccgcacggcctcggtgatctgggggatatgcgtgccgccgatcttgttcatgttgacgctggcatccgccaccacctcattggcggcggcgagatcggacgatgcaccggccatatcccccagatgaatcacgccgtccttgatgcctatgccgtcaaggcccagagcctgcaccgatttttccaacttcggcaacgcattgttcgacacatcctccaggatatgcaccatgtcccgcacggccttcacatcggagccgtagtatggcacgaacgcggcaagccgccacaccggctgctttgtctgcgcgtaggcggcatcgatgcggcgggagcaatcctcgatgctagcccgcgccttgccggtgtctcccgcctcgatgtgcgtctgcgcgcggccggcggcctgcaccgccgactccacctcgcgcttcacctgcaccgcggaaaaaccgaaccacaccgtgagcgcggcgaccaccgccagcagcaccccgaaggcgagtagcgccgcccgaatgcgcttccggcgcttgacgcgcctgatatggtcccggctcatgcgacggcgatgcctccgtcgctccgccgcacgggcatcctccgcaagcacctcaggatcaacatacggccgcactacttcgctgccgtccatatccgaatgcttgagcggagggactggtggcggagtcattcctgacaggttcgaatcggacatggcttaatgatataccgacgtgtttcccggcgaacccgaacagggccggaggcgatggaggcgggttcgccggtcggcggacaagccgatcagtacgctcctttatggctcagcacggcgccgaccgtgcggaagaggatcacgatatctcccatgatcgaccagtcctgcacgtaggccacatcaagggcctcgctttcctcggcggacagatcggagcggccggacacctgccacgggccggtgatgcctggcttgaccagcatacgggtggcatacagcttgttgtaccgctcatactcctccggcagcggcgggcgcggacccaccacggacatatcacccatccacacattgaggaactgcggcagctcgtcgatggagaaccgacggatgaaatgcccgaccttggtgatgcgcggatcgtccttcatcttgaagatgaaacgatcggtctgcccggtcttctcggcgagctccttcttcagcgcgtcggcattgaccaccatcgaacggaacttgatcatcttgaatgtcttgccgcgcagaccgatgcgggtctgcctgtagaacaccgggccaccgtcggtgagcttgatggcgatggccacggggatggtgatgatcagcgaacagatgatcgccaaggtggagatcaccagatcgaacacgcgcttgaccagacgacggcccgccgtgtattggggcatacactgcgtgatgatcgtcgtgccctggatggaacggacatgaatctcatggttcgaggggtcggcggccgaggcggtcatggccatctccagaccaagcgactccatgcgcgaggagaagatgtcgtagttgtccgagtatcgacgcagctcgtcggtcaccatcacggtctgcgcgtccatgccgacgatgcgcctgccgaggctgtaatcgtcatattcgagcacaggcagcggccagccccagttgtcgtcgatctgccgccgcatcgcctcgtcgtcgcgatccggttcgatcaggttggtctccggattgagccggatcggacacaccgccaccggacggtagttcagctgctgacggcgggacaggaactgcagcatacgtccgatgccgtgcggcgaccccacgatcaccgtgccgtaggcatattcgcctttgcggcggttccgcacgatgagcgcgcggctgacgacacgttccgccatggtgagcagcaatccggacagcatcatcaggcatgccgatgtaagcgttatcttgaagtcgagcaggtaatcgaacgcgcactggatggtccagcacacgaccgcgccctgcaccaacagtgcgttgacctgatacccgtcgcccatgacatgccgatgatagatgccgacggtacgcaacgaccagacccagaagcacgcaaggacgatcaggtacgggatggcgccgaagtcgaatccgaaccggagcgagtacagctgctgggtctcatgccgcacgttcagcaccgtggcgccggcgatcatgaacattgccgcatcgcacaacgtcagcgcgagattgaagcagaaccgccaatgcagcgctgggagaactgcccccccccccgggcaacacccgcaagccgctcatcagtgccatcagcggatgccgcacgatcgtccatacgcgcggacgacgcgcctttccccgcgatgctgtcatcctgcgacaccaactgaacacctctctctcctcccggcccgatggccgcgaccccgcgtccatccccggaatcgtcacaccgaatcgcttgtactctgatacgcatcatagcaaagaaacaccccccccccgtcgtcataacacacatggcgggcgtcacgacggccgccgcgcgcgaatccttgcgaccttcggaccaccctcgggtatatcgtattggggttgatttcgggagtctgaccggccaaacacccgaggcgagggccgccgtcggggccatcgggccgggctaacggaagtggggtgtgcgcgtggccggagcaaacggaatcaggaaccgtcgcggcgaactgcaacgggtgctgagccaggaggaatcatacgtcgacaacaggctgagccatgccgcgttcatctcgatcgcgatcctgaccttcatcacgttcgtcggcaacttcacgcagctgcaattgagctcggcgctgccggtcatcgtctcggaattccatatctccgtgaccaccggccaatggctgacctccgtgttccagctggtcatgggcgtcatggtgccgttgaccgcgttcctcacccgccgcttctccacccgtcagatcgtggtctgttcgatggcggtgttcaccatcggctcgctgttgtcctggctgggaccgacgttcgcggtcgtgctgctcggacgggtgctggaggccgccggcacaggcgtgatgtggccggtgcttcaaatcaccgtcttctcgatctacccgctctcccgccgcgggttcgccatgggcaccgtgggcatggccatgagcgtggccccggcgatcggccccacgctgggcggctggcagaccgacgccaatggctggcggtcgatcttcctcaccatgaccatcatcggcgtgatctcgctgctggcggccatgttcggactgcacaatttcggctcccacgacccttcggcccgcgcagacctcttctcggcctgcctgtcggtcatcggcttcggcgggctcatgttcggattcaccaactcgcaggcctacggattcgccgccccggtgacatgggggcccatgaccgtgggtctgatcggcatcgcatggttcgtcctgcgcaacctccgtgccggcagacgctatcgggcggccgcgggcgacgacggatcaccgcgcccccagccgccactgctggatctggacgtgctcaggaaccgttcgttcactatcggcaccatcacggcgtcgctggcgttcttcgccttcagttcgatcctggtcatcatgccgctctatatccagaccgaccgcggctattcggccacgatgagcggcctgatcatgctgccgggggccatcggccaatgcgtctcccaattcttcggcggacgcgcgatggaccgcttcggagcgcggccggtggccttgttcggctctatcgtgctggccctcggcaccctgggcatgtcgctggtgtcgatggacacgtggatctggtgggtgtcgatctgccagttcatccgtcagatcggcatgggcttcctgctgatgccgatcaccacatggtcgctgaattgtctggacggaccggacgaggtgtccgccggttcatcggtgacaaacaccgcccggcagatcgccggcgcggtgggcgcccccgtgatggtgatcctgatggagacgttcgccgccctgcacgaacgggacggcgcctccgccgtcgccgcctcggtcttcggcatccagtgggcgctgcgcatctccacgctcctatgcgtggcgatggtgctgatggtgctcttcggcgtgaagggcgacggcgccgggcgcacgagggacatcatctcgctgcggacgttgcgcgaacgccgccgagacagggcccgctgaccgtttacgccttgcccatcagcgtcagcacgatcagcagcacgttcagcgccacgatcaacgccaccacgatcatgaagatcacgtgtttgaccgtcccgtcgacccattcgcccataagctccttggtgtgcgtataacgcatcagcggaatcacggcgaacggaataccaatcgacagcaccacctggccgatgaccagcgcctgagtggggtctttggcgaaccacagcacgattagcgcgggcaccagcgtgaccacgcggcacgcccacatcgggacgttgacatgcagaagaccacgcatgatctcggacccggcatacgtgccgaccgacgtggaactcaacgacgaggccagcaggccgatggagaatatcgtgccgatcaccgggccaagcacctgcgtgatcgcccgttgcgcgccgtctatggaatccgtgccggacatgccgtgcaacgagttcgcggcaagcaccagcatcgccagattcaccgtgccggccagcagcagcgcccacgtcacatcgatcttcgaacctttgagctgcatggcaatcgacggcttatcgctgtgcgtgtagtaatggtcgttgaccaacgtggaatgcaggtagatggcatgcggcatcacggtggcacccagaatcgaggcggccatcagcaccgaatcggtgcctcggaagcgtgggatcaggccccgcaccaccgctgcgggatccggcggggccacgaacaggcccgcgatgaacccgaaggtgatgaccagcagcatcacgatgatgacccgttcgaacgtggtctgcgtcctgccgccctggaaccacagcatcaccgtggaggccgcgccgatcaccaggccgccgacgaacaacggcaggccaaacagcagattaagggcgatagcgccgccgatcacctcggccagatccgtggcgatggcgatgacctccgcctgcatgaaaaacatgaaccgtcccgcgtcgcgcatgcgctcccccagcagttccggcaggctcttgccggtgacgatgccgagcttcgccgactggtattgaatcagcacgctcatcgcgttcgccagcaccagcacccataccagcaggtagccgtatcgtgcgccggacgtgatgttcgccgccacattgcccggatcgacataggcgaccgcagccacgaacgccggccccaagatgctggcgagcgcatgctcgtgatgctggcgcccggacgcttcctcggcatggctgcgttcgatgtcgatctctgaatcggttttgtcatcgatcatctgacgatgctctttcattccctcattcctctcatgcgcccgacccctgggcgctactcgatccgcctaatggtatacaccgcgtttgtaacagaccgtcgaatttcccgccacacgactcccccgctgggcggactgcggcatttgtcgtcatacgagcgatgggctctattccgcccctcactgactggggatctgttgcgctgggcatgcacgcagcacggcgagcatcgaacgcttctcgctggtggtgacggtcagaccgtaatgccgtttgacgccgatctgtcgcgcgacgtattcgcaacgatactcgccgttagtgggaagccagtaagcggcggaggcggatcccttgtcctggttggcggggccatccacggcgagcagattgtaagggtcgttgccgaagcggtagcgctgggcggtggtccagtccctggcaccggattgccaggcgtttgcgagcgccacgacgtggtcgatctgcacggcggcgctggtgtttcggccgcgcacgaacaggatggtcttcccggtgtaggggtcggcgagcgtacccgaggagacttggcagcgcttggctgcgctgaatatgacatcagtcaggtcgcgggcgagcacatcgtcgcgcacgtcgcagccgtcgccatcatcgtcggtggcgcggaatccgaaggagtcgcggtcgtagccggtggagtcgggccggtcgtcgacctgcagcccgttcagcgcgtccgccgccgggccggaggcaatgtattcgccggtgatctcgccgatggaggggctgattttgggcaacgccagaccgatgacgacgccgagcagggcggcgatcaccaccagtatcataagacgttccagcggggatgatccgcggaatcggcgtttgcgaaaatgcgtgtgcacggtcaatcggcctgtcgttggttctgcagtcagtctcgtgggctgcgcggcggtatcgtcgtcagcttgccgtcgtcggctcaggcgcgcggcataagcccggactcacgccgcgtacctttctccccgccggatcaggcgtaggagaacgtgcgaggatcgtgccccgcgcgttccggaccgtcgagcgcgtcgatggcggcatgttcatcgagcgtgagcgcgaagccgaacaggtcgaggttctgccgctgacgttcggagtgcaccgacttggggatgatgatcgtgccgttttcgatgtgccagcgcaggatcacctgggcaggcgacacctcgtgcgcctcggcgattcgcgcgatcgtgccgttgccggccttcagatcggcgccgcgagccatcggggagtatgcttcgaccgcgatgccgtgctccttgcagaatgcgacgacttcgcgctgctgccaggtcgggtgcagctcgatctggttgaccgccggccattcgcctgtctcctcgtacagacgggtcagatgctccggcaggaagttgcacacgcccagcgtcttcacacggccttcgtcgcgcagcttggtgaacgccttccaggtcgctccggaacgccaattgaacggagtcggccaatgaatcatgtacatgtcgacgtattccagctgcaacagtcccagctgtcggtcgaaggctgcaagtgccatgtcgtacccctgctcggagtcgcgcagcttggtcgtgacccacagatgactgcgcttgcgccccttgttaaagccggtttcggcgagggcgcggccgacgccgccctcgttgttgtagcccgcggctccgtcgatatgccgataccccgccgccaacgccgatttgaccacgggagcgacatcatcgttctcgattcgcagcagccccaacccgatttgcggaatcacgttgccgtcattgagtttgattcccggcacgctcgcagcagccgccgcaacggcgagatcgctggttcccagcatggtcgtctccttgtcttcacactacatccggttcggagcatatgccatggcgatatgccgagcctccctacaccagtatgccatcatatcggatgaccggcatacgattcgcgattggcggcatcggtacaggggccggcagacaacgccgccggccgatgagtaccatgccgccagcgatggccagcagcacgaccagtccgctgaccgcgacgcgcccgtggcggacaggccatgctggttctgccggccaccatgctggccgtgcgacactcccgtcttgtcgtcatccgactcgcttggctcggtcggctcggcatcacttggctcggttgacttacccggctcggtcggctccgtcggcccttccttggccttcacggtgaccgtgcgctcggcggtggccgtgttgccggccttgtccgaaaccgtgtacgtcagcacgtactctcccggtttcgccgcgtccaccgaaccggacaccttgacggcatcggtcacgtcaccatccacatcgtccgtggccgacacgccggccaacggctcgaactcggaatcctgttccaccgtcacgtcatccacgccggagagcaccggcgcggtcgtgtcggcgggcggaaccggcttcttttgatacaacggagtatcaagacgagcaatgatacaccgctatatcggaacatgtcaacgcgcaagacagaggaacaccacctaccagggaacgacgtcgccggggaacgccgccgccatcagctgcgacacgcccggagtgcgcagcacaaccgtcatatgcagtcgtgacgaaccgcgcaattcctccgatccgcaataaccagcctcgcaattgtgccaccactccgggcgtgtcgtgacaaatcagacccgacgcgcaccacggttctacgcaagacccatggccgaagcatcccctcgaccaccccagctggcctccgaccgacagcccccgccagcgcccgccaggccgccgtcatgtcgattgtcagcgcccccatccggcaaaagtcccatccaaggccagtgaaacgggactttcgcgggacggagcacatgccgccaccgacctcaaatagggaaacgcggcgttatatctacaatcgcgctctcaaaactcacagggccaaattcaccaaaaaaggcctgtatctgcgagttttgagagcgtggttcccgtacgagattcaccgcgtgctgtcgcgcacaatcacgttgcaatcggtcatcaacaactcgggcttagcgatctcaccgcggatgcgcccgagaatccgctcgacggcggtaggcgcggtccactccagacgcgaatccatggtggtgagcggaatctgcaggtattgcgactcctcgatgttgtcgaacccgatcacctgaacctgccggggaatctcgatgccgttcgcgcgcatcacggtcaacgcgccgatggccagctggtcgttcaggccgatgacgccgtcgaacggcacgcccttgtcgatgagctcctgcgtggcatgggcgcccgcgccaatcgtccattcctgctcgacattgccgaccagccgcgcgtccagcgtcatgccgcgtcgccggcattcttcgatgatgccgcgcaaacgcagctgcgcgttgccttccaccgcgccgagcagcttcgcctcgtcatatgcgccacgtccgccgaccaccgccagcgacttcacgccgcagtcgaacatgtatccggcggccgatgccgccgcctgcacgtcgttgggcgtcacatgatcggccttgccccacgtggttcgcgcgccgaccaccaccagcgggaaatcgacctccaggtcctccgggttgatgtcctcgacctcgctcatcgacagaatcatgccgtccgacaccgtggtgttgaagttgcgcaacagctcgcgggcgcccgtcgccgacccttccgcgtatgtggtgacgtacacgaggtacccacgctgccgggcggcgtcgatcacgcggttcgcgagctcggacaggtacggcgcggtcagcgtcggcacagcgagcgtgatgaagccggtgcggtcccggttgaggttgcgcgcggcgacgttgacccggtatccggtctgctcgatgacggcttcgactttggcgcgggtggcgtcggtcatgcgtccggtgccgttgatgacattggatgccgttttcagcgacacgccggccgcggtggcgacgtcgcgcaacgtgacgcgccgacgtgcggccgtcgtcggcgagcctggcaggttctgcgcgatctcgctcttgccggtcttgccgttttcggtcttgcccatcgcgtcaaccttactcgtagaggaaactccccctatggtaatcgtcttcgccgaagttgtcatacggtcctccttaccgcatgtctgctacggttttgtcgtcttcgcgacatcgttgccatccgatgacgtgttcgccaccacgcatgtcgccgctgttcatgaccacgccaggctgctcatcgataccgtcaccggtctgatgagcggcacgccatccgtcccgttcgtcgaattcgagtctggcgaaccggatttcgcgcttgttgccggtgcggatgcgctcacccgtgtaccggtccacgccgcgcgggcgcatggcgtccggcagaaagcaatggtaggcgatgacccattcgtcggtgccggggacccgaagtatgcagtgattcccggtgccgagtatgccgaggcgttcgttggcgaccaggatttcgccgcggtaggtccactgcgaaccgtcgccttccatggtcgacgcggccgcataggcgactcgatagtcggggtcgttggtgtcgccgatcgagtacgtgagatagtacgtccacgttccggcatgctctctcacgttcagatatgcggcctcccggatgtcgggcgtggcttcggggatgatgtgcagcatgtcgccggacaggcgggagtagcgcgcccggttctgcccccaggctaggtaccatcggccggcctgcgggtcgcggaacgccgcgggatcgatgccgggcgcgacgatgccggttccgaagccgtgccgcgcggcgtgcgagctggttcgcgccaagtcgccctgcagagcgtatccgatatggtcggataccgccacgttggcctgcccgtcgccgcagaaatacaggtaatagcggccgtcgcgaacggcgagcaccggcacccaggcgtggccgggcaggatgttggttcggccgctgccgtcgagatgctggtcatgcaggtcgatgacgacaccgcggtcctgccaatgtgtcaggtcttcggaggcgaggcagtggatctgccagccgctccactcgctgtgtccgtcggtggtggcgaacaggtagaacgtcccgcgttcgtatgcgagttcagggtcggcgaagaaacgcatgccccgcctgccggtcgcgtcaggcgtgtcggggatgcgcacgggggtgtcgagtcgttccgcgacgacggagatgaccacgcgcgaggtatcggcagtcgagccgtcaatgcccgacccgtcatcgcggtgcaccgcgagcaggagcggacggaacagatcctgggtctgcggtacggcggatccgtcgagggccgtcacggttccgtaatcgctgcggaaccgcagtcgcagccgagtgatgtcagcgatttcgccgctgaccgcaccgtccggcgtccattggtccagcgtcagccgtagccgataatcggcccgcggccctgcggccggcgttgcttccgcgccggaagcccggtcaccgtcatgaacccgcgtctcccccgcgcagcagcattgcgatgtcgtccacgtcgacgtcgtcgcggacttcgccgcggcccgactctcctcgaatcgccggccccatgtctggagccggcgatccgtcaacgttgcgacaccgtgacgagcacaccgttgcgtttcagcgtgacggccctgccatcatcggcattgccgcatccgcggtagacgagcagggtctcgcctgccggctcgcgcacgacagcctcgttcttcgcacggttgaagtagaagtcgaacccccgatccaccgtccgcatcttttaccccgcgaaagtcccattcggaagcgccgaacgatatggcatgacaacgttgatataagcttatcgtgtcgacagatggcaccatccggcgatttgtgggtcatacgacgcacacgacatcgcaaagcctgtaccacaccagggcttttttgcctcttttcggccttctgtggtacacgcgcccgatacctgtttggagtcgaatcccgttttccttgatatttcaaggaaaacgaatgacatcatgtaccacaccaggtcatgtaaacgtttgcacgagctggtgtggccatcggcgtggccacaccacggccaaatcgggcaaaatcacgctggtgtggcacaactacgaaacgaagagacgcggcgacctgctgtctcggccaaaattcgagacgccgagctgcggatgataccccgaaagtcctcggccaccccagtcaccttcgcgaacagccctcgaccctgcagttacggacatgccatgcatgaccagcccgctggtctcactgccgttccccgccgacaagcagcccgatccgctagcgggagcctacaggctcaaaaataactcgtgaatgcgggtgtcgtcggtgagttcggggtggaaggccgtggcgagaatgttgccctgtcgcagaccgaccacacgcccatcaacctcggtctcgatcgtggcgtccgccccgacatcggagacgaacggcccacggatgaacacgagcggaaagtccttgatgtcaccgaaatcggccgtggagacgaacgaaccgagctgccgaccgtaagcgttgcggcgaaccgtggcgtcgagggcgccgaagtacacattgtcgtcgttttccagtcgcttcgcgagcagaatcattccggcgcacgtgccgaacaccggcttgccggcggcgatgtgcgcggcgatcggctcgaacagaccggtggagcgcagcagcttgccctgtgtggtcgactcgccgccgggcagaatcacgcggtcgatggaatcgtcgaaatcctcggcggcacgcagcagcttccactgggcgcccagcttgtcgagcatcgcagcgtgctctgcgaacgcgccctgtacggccaggatgccggtcacgccgtgctttgccgtctcggcaccggccgactcttccttcgaaatatattcaacagctacaaccatgattactccttggctcccgatgaggggagccgtcgaatgcggtggggaggggtggggtggctgaggatacgcctctaccaccccagtcgctccgcgacagcaccagccagcggaagcggattcatgcggaatcaccccccgccaagttgaccgccttcgccagcgggaggggcggctcgatcatcccgccgctagcgggctatgatcactcgccgcgggcggccatgatggtctggatttcgtcctcgttgatgccgaccatggcctcgccgaggttctcggagagtcgtgccagcagatcggcgtcctgccagttggcggtggccttgacgatggcggcggcgcgcttggccgggtcgccggacttgaagatgccggaaccgacgaacacgccttcggcaccgagctccatcatcagcgccgcgtcggccggggtggccacgccaccggcggcgaagttcacgaccggcagtcggccgttgtcgtgcacgtaacgcgccagctcgaccggcacggccagctgcttggcggcctcgaacacctcgtcgtcacgcaggccgacgagctcgcgaatctgcttgttcatcgtgcgcatgtgacgcacggcctggatcacgtcaccggtgccgggctcgcccttggtgcgaatcatcgcggccccctcggcgatgcggcgcagcgcctcacccaggttcttcgcaccgcacacgaacggcacgtcgaactgtgtcttgtcgatgtgatagacgtcatcggccggcgaaagcacttcggactcgtcgatgtagtcgatgtcgatggcctgcaggatgcgggcttcagcgatgtgcccgatgcgcaccttcgccatgaccggaatggagacggcctcctgaatgcccttgatcatggccgggtcgctcatacgcgagacgccgccggcggcacggatatcagcggggatgcgttccaacgccatgaccgcgcacgcgccggcgtcctcggcgacccgagcctgctcgggagtcgtcacgtccatgatcacgccgcccttgagcatctgcgccaggttcttgttcagttccgctcggttttcagccattgagggttctccttccatatgctgcggcgatggccgtcgcgacgactgtcgccatcgccgtcattgttgccgttactgtattgtctatattgccattgttgtcgttgcctcgaccgcccgcacatccccgggatgcgccggcggcacacaaggcaccatgctagaggcgttcccgccgcgaacacgcgcagcggctcatttccggcgataaggaaaacctataatccgttatcagccggccatgctgcaccgccgcgcgggaacaccgtccgcccgacgtccgccaccgcgccgccgccggcctgcgccgcgcggttgtgcgcgacgacaaaacccgacgccgcttttcgtatccatgcacaacaccgcaggaacctacggtaacgtacccttgacgatggaatacgtatcaggacatctgcaaaggaaatccacgatgtcacaggatcaggcacaggatcagtcgaacgcggcccaagccgccaagccggtggatgaaccggcacccagcatgacggcaccggccgcacggtcggtcggcaccgctgccgttccgaccatcatcagcgaatacacctcccccggcgacgtcaccgtgaacgacgacgagacactgtactcgctgctcaccgaacgcatcgcccgcaccggcaatgcgaccaccatagcggcgcgcaagaccggtccgggcgcgtggtcgagcatcaccaccggcgagttccaccgtctggtgctcgccgcagcgaagggcctcatcgcgttcggcgtcggcaagggagacgcggtgacgctgttctccgccacccgcttcgagtggggcgtgctggatttcgcgctcgccgcgatcggcgcggtgaacgtgccggtctacgacaccgattccgcggcacaggcggagcgcatcatcaacgactccggcgtgaagctcgccgtcaccgataaccgcgaacgctatgaccgtctcgattcgatcaacgaccgatgccccggcctgcagcgcatcctcatgatggacggcaacgcgctgggcgctttggagggattgggcgtgtcggtctccgacgaggagctggaggcgcgcatcgccgacacccatgccgacgacctcgccactatcgtgtatacgtccggctcgaccggcgccccgaaaggcgtggagcttacgcaccgcaatttcctgtcggtggttcgagccggatacgagtgcctcggcgaggtgctgtgcgacaaccatccacggctgctgctgttcctgcccctcgcccactgcttcgcacggttcatccagtactgctcgattggctccgacgatggcgtggtcggctatctgccggatacaaagtcgctgcttcccgacctgcgctcgttcaagccgacctatctgctcggcgtgccgcgcgtgttcgagaaggtgtacaacgccgcgtcacgcaaggccggcaccggtttcaaggggcgcatgttcgcgcaggccgcccagtgcgcccgtgaatggtcgcgcaccgagcaggacggaggcaagcattccgccagccagcgcgcccggcacgcgatgttcgagacatcggtgtaccgcgcggttcgcggcgcactcggcccgaacatccggtatgtggcgtgcggcggggctccgctgagcgccgatctggcgcacttcttcgccggcatcggcctgccgatgatccagggatacggtatgacggagaccgcggcgccgtttacggtgacacgcgtgaacgacaacaagatcggcacggtcggccagcccgcccccggctcgtcggtgcgcatcgcggacgacggcgaggtgcaggtgcgcggcgcgaacgtgttccgcggctatcacaatctccccgagaagaccgccgaaacgttcaccgccgacggctggctcaagaccggcgacctcggctcgctcgacgaggacggccggcttacgataaccggccgcaagaaggacatcatcatcaccgccggcggcaagaacgtctcccccatcccgatggaggaggagatcgccaagtgcccgatcgtcgagcacgccgtggtcgtgggtgacgggcgtccgttcatcggcgccttggtgacgcttgacccggaaggtctggcgtcgtggctgccggccatcggtcagccggccgacttgtcgctggccgacgcggccgcgctcccgcaggtgcgcgaggagatccagccgttcgtcgaccgcgcgaacgcgacggtctcgcgggccgaatcagtgcgcaagttcgtggtgctggatgcgcagttcacccaggagaactcctgcctgacgccgtcgctgaaggtcgtgcgtccggctgtgaaccgcgtgttctccggcgcgatcgaccaggagctgtacgccggcaagcgctgatcaccgggccgcataaccgaacgaggggtggtgcgaacgtgccgtctggcacattgatatggcctgatttttgatgctcctatacattgtcaaatgtgttggagtgttggctttgcccgaggattgagtccatccactcgatgatttgtcgttcgagttcgggcagatcccgaaccccacgttcgatctcgctgacgcgg

SEQ ID NO: 1158 - DNA, 15453 bp, Unknown
  R81_24m  MAG No. k141_10093
ggagctgactgtaaatcagccgcttcgtgcttcagtggttcgaatccactatccgccacgccccgatagctcagtggtagagcacttccttggtaaggaagaggtcgtgagtccaattctcactcggggctctctggcggggtagctcagctggctagagcgtacgactcataatcgtaaggtcaagagttcgagcctcttcctcgctacaaatcgcgcccgctaaccggtgggcgcgcactatacctaagaacacagaggtgaatgacaatggctaagagcgccgacatccgtccgggcatcacgctggcctgcaccgagtgcaaggagcgtaactacattacgactaagaaccgtcgtaatacgcccgaccgtcttgagctcaagaagttctgcccgcgctgcggcaagcagaccgtgcaccgcgagactcgttgatcgcaagcatcacagctttacaaaacccggcccattcgaccgggtttttgcgtattgactccagagccgagtggtagggtgcggaatcagtatccgcatcgcgtgagaaacggcagaaatcccgcgtctgaacgaacccctcgcgggcgttctgccgtttcagccgatgattgccccgatatcgcacctgcgccactaagataggaagtcatgacaagctttgcagacatcaccaccatgggcgtgggcggccccatcgcccatttcatcgagccgaccacgcgcgtggggctcatcgaagccgtggaggatgccgattccaaaggcctgcccttggtcgttatcggtggcggctccaacctgcttgtttccgataagccttttgacggcgtggtggttcgagacgcccgacgcctcatcactgtgccggacgaggctgcaccggtagagggcgaggatcgcaccgtgcatgtcaatgccgaggccggtgccaattgggatgatttcgtggccttcaccgtagagctcgggctcgagggcgtcgagggactgtccggcattcccggcacagtcggcgcctccgtggtgcagaacatcggtgcctacggacaggaagtcgccacttcggtcgaatcggtggaagtctgggatcgagacaccaaaacaacgcgcgacctcacacccgccgatcttcgattcggctatcgatactccgcactgaaggccagcatgtacgccggtcccggccagccggccgaccgattcttcccgacgccacgttacgtggtgctctccgtcacctttgccctgacccactcggccgaaggcacggtaggttacggacagcttgccaaagcgcttggcgtcgaagtgggcgaccgtatggccaccgccgacatccgcaaagccgtgctcgcagtacgtgccgccaagggcatgcttgaggatcccactcgctacgccttgcccgacatggccaccgccaagcgcgaggccaatatcctgaccgatctggagcgtctggcctccctcaatgaggccgccggcgttcccgttggcgatgacggcctgcctgctcccgactacaatcgccacagctgcggctcgttctttatgaatccgattctgaccgccggccaagcggcggccctgcccgaagatgcgccgaagttcgacgcgactctgcctgacggcactcccggcaccaagacgtccgccgcctggctcatcgaccatgccggctgccataagggatataaggtcgatgcgtacgcgccggccagtctatccacgcagcacacgctggccttgaccaatcgtgggggagcgagcgcggccgatatcgcagctttggcgcgtgcggttcagcaggcggtcaagagcgcgttcggagtggacttggtgcccgaaccggtctgcgtcggcgtgctgtaatcgcgctattgattgatggagttggatattaatcccatatattgcggactctaagtcttattaatagacaagacacgcgggctcttctatactcgattgtcggtattgtgcgcattcggtgcgcaaacaacagagaaaaagaagagcactatgcaactgttccgtacgaaatccgtcgaacagaccattgccgaaacgggtgaagagggccgcaagctcaagcgcaacctgacttggtgggatctgtcaatcatgggcgtggccgtagccgtgggcgccggcatcttctcggtgggcgcgcaggccgccgccttccacgccggcccggccgtgatcatcagcttcctgatcgccggcatcgtgtgcggcgcagccgtgatgtgctacgccgaattcgcttcgatgattccggtggccggctccgcctacaccttcacctacaccacggtcggcgagatcatggcctggatcatcggctgggatctgattctggaaatgctgatggccggctccgtgatttccaaatattggggcgtatacctcaacgatttcatgcgcctgatgggctggaacgccaacaccaacctggcgttcggctccttccatatcgatatcgccccgatcatcatcgtggcgttctttaccacgctgctcgtattcggcaccaagatcggcgcccgcgtggacggtgctatgaccgtgctcaagatcgccatcgtgttctttgtggtgatcgtcggcttcttctacgtcaaggcctccaacttcaccccgttcattccaccgagccagccggcctccaccgtggaaggttcctccgccgtcaccggcgtgatgacccagccgctgtggcagttcgccaccggcatgaccccatccgtgtacggcgttcccggcatcctttcgggcgcggcgctcgtgttcttcgcgttcatcggcttcgacgtggtggccaccgcctccgaggagaccaagaacccgcacaagaacgtgccgctcggcatcggcgtgggcatgctgctcatcatcgtcatgtacatgctcgtggccgtggtgaccaccggcatggtctcctatgccgatctcgccaagcaagacagcccctcgctggccaccgccttcgaactggtgggtgccgactgggccgccaagatcatcagcttcggcatcgtgctgggcctggccaccgtggtcatggtgctgttgctcggcctgacccgtatcgtcttcgccatgagccgcgatggtctgctgccgcgcggcctgtccaagaccggcaagcatggcaccccggccgctctgcagatcgtcgtcggcgcggtggtggcgctcgtggccgccttcttcgacatcggcgtgctctccgacatggtcaacatcggcaccctgtccgccttcacgctggtggccatctccatcccgattatgcgcaagaagcgccccgacctgccgcgcgccttcaagatgcccggcgacccgtggattccgatcctcatcgccgtggccaacttctggttgatgctcaacctgtccgtgctcacctggattcgtttcgtggtgtggctcgtggtcggcgtcgccatctacttcggctacggctactggcatgcgcgcctcggcaagggcgacctgaccgaaacgctgtccgccgaaaccgataaggccgttaacggctgagagcgaggagcgtcccaacgggcgcgtacccttgtatcagtatttgttaaggaggattccatgccatatgtgatcgctcagccttgcgtggatgtcaaggacaaggcttgcgtggacgagtgccccgtcgactgcatttacgagggttcccgctcgctgtacatcaaccccaacgagtgcgtcgattgcggtgcatgcgaaccggtgtgccccaccgaggccatcttctatgaggatgatctgccggacgagtgggcttggtacaaggatgccgctgtcaacttcttcgctgaagtcggcgatttgggcggcgcttccgccaatggcccaatcggtaaagacccggaacaggtcgccgcgctgccgccgcagaaccagtaagctgatttgcggataagcgctgcacacagcgcatagttcggattgaaccctcggtctatcacggccgagggttcgtcgtatcttaggaacataccgtccaagaaaggggttctcatgggcttccacgcatattcgtcgccatacgactggtctcgtatcgccggcttcaaagccaccgccaaaaccgtgccgggtggcatgatcgacctgtccgtaggctcgcccgtggacccggtgccgagcagtgtccagcaggcgctggttgccggcgcagacgcccccaacgcccatggatacccggtcaccgccggcagcgccgaccttaaggccgctatcgatacatggttccgcgaactacgcggtgtggatctgaagtccatcaacgctgccgccgtacccaccgtgggttccaaggaggccgtggcactgatggccagcctgctgcaccttggcgaaggcgatgtggtcgtccaaccggccgtctcctacccgacttacgaaatcggtacccaacttgccggcgccaccgtggtcaaagtcgatgatgtgaccgacgtcgattcctgggtgaatattccgaacgtcaaggccatctggatcaactcgccgtgtaatccttccggcgaggtcatctccgctgactggctgaccgacatcgtggctgctgcccgtcgcatcggtgccgtggtgctctccgacgaatgctatgcgttgatggactggcgttcggtgcgccgcaatacagcctcgtcctctgcgcctgccgcgtctgcatctgctgcgtctgtgcctgccgcaccggtggccgaatccaacgagcccgcctccgataccgcattcagtctctccgccacgccatgtgccctgaattcacatgtgtgtgaaggttcggcagctggcatcctggtgctctactcgctgtccaagcagtccaacatggccggctaccgtacggctctgattgccggcgattaccggctggtcaaggaaatggccgaataccgcaagcagatcggccagattatccctggcccagtgcaggccgccatggctgcgggtctgaaggacacagccgccgtgcacgagcaatggggtcgttaccgtcgccgtctatccgcgctggttgacgcgctgaaggcgtatggctattcggcgcaaatgccctccggcgcgctgtacgtatgggtcaaggccaagtccggcgactgctgggccgatatggccgagctcgccaagatcggcatcatccccagccccggcgaattctacggcgctcccgcctacctgcgtttctccgccaccgccaccgacgaggccatccgctccgcctgcgaacgtctcacggcgtaatgagatcgtaagtggcgttgagccgttcacgccccaaactgggcggccttgcagccgaatttgcggcgtacggcatccagcgcggcctcggcatcatgcaagcgtgcctgtgaggtctggccgcgggcattgtaggcctcttcgagcatgtcatccagtgaaggctgcacggccgtagccgccgcctcactgagcgaagacgtgctcataccggccaagcgaatagttttgggcaggggagtggcagactccgccgaggccggtagccccagcatgactttcagctgccgcacgcattccgggtacagcacgccggccgtatcggtcggccgctccatcgtaaaagaccgggtctgatagctcaggtcggcgaaccgcaacttcaccgtcagcgtgcgcgccaccagccccttgcgccgcagcgtgctggccacatcgtcgcaggccgaacgcagcagaccgcataccacgcgcatatcgcgcgtatcctcggccaaggtttcctcggatccaatggatttctcctcacgcaccgtggtgatttcacgggaatccaacccgtgcgaggccgcccataatccacgtgccgcagccggggagccagtggcgcgagtcaatgcagcctcatccagctgagccaattcagccaccgaatgcacgccccaagcattaagccgcttctccaaagacggcccgatgcccggaatgccgcgcaatggcatcatctgcacgaattcagccgagcgggccgccggaatcagcagcatgccgtccggcttggcattggtcgaggccattttggccaccagtttgttgcaggcgatgcccaccgaacacgtcacgtggaagcgctcggccacctgagcgcgaatccacgcgccgatcgcgctcggccgcccccactccagcagtgcggcggacacatccatatagccctcgtccaccgaaacctgctcgaaccggtcggtgacggtcaaaaacacctcgtgcatgattcggtgcgacatcatgcggtaatacgccatatccaccggcagaaagacgccgttcgggcacaactgatgggcgcgcgcggccggcatcgccgaattgatgccgtatttccgggcttcatagctcgcagcggacaccaccgcgcgcggcccggtgccgatgatcaccggcttgcctttgagcccggggttgcgcgccacctccaatgaggcatagaaggcatccatgtcgatatgcagcacggtgcatccggtctcgtcgtggccccaatcgcgtttggcggcctcaagtctcggtgcggtgctcatgccaccattgtaggaatgccgaacgaggtcatgctcactatgtggcgcgcatggcgcggcgctcattgtcgtaatgccaaatatcgccggaattccaagggtttgcacactgtgcggctgtttcgcatggtgggtgcgattccacggaatcgtccacattgcgtcactgtccgtaacgccttccaagtcgctgcgcgctgtcccgactctccgagtagcgtaaacctcgtgaagaaggcagtggtcggtatcctcaaccgtgttcccgtggtgcttatcgtgattggtgaggcactggtgatttatttggctacggccgtcgccaaacttgcgttcacccagctcgacccgctgtattcggtgtggtaccgcgtgggattcatggcggtgctgttgctgctgtggtgcaggccctggagcaaggctaagcgagcgcagctgtttcaccgcgacgcccgcggctgggggctggtcgtactgctcggctgctcgctggtgctgatgaataccctgttttatgtggccatcagcaatatggatatgggcattgccgtgtctatcgaatttttgggaccgctttcggtggcggtgattaccggcaaaagctggcgtgagcgggtcggtatcggcatcgcggcggtcggtgtggtgctgttggccggcatatcattggccaatccgtccggcaatggcacgtttttgtatggtctgattgcgattttgatcggcgggtcgatgtggggcatgtacatcatcaccggccggcgcgtggcggctggcggcaattcgctggataatctgtgcatcgccgtgaccatcggctggctggtccagtccctgttccttggcgtgccggctgtggctcatgtggttcaccccaaggccgatgccacgtgggcgcttgagcccggcggctcgctgaagctgctggctctgctgtttgtgatttccctgatggcctcgttcattccctatgtggtggagcagatcacgctgcgacgcaccacatccggcgcattttcggtaatgcaatccatcaatcccgccatggcggtggccgtgggactggcgtttggcgagattcccagcgttggtgaaatcatcggtgtggcgttggtgatttgcgcggttatcgttacgttctccggcgatgccgcgcccgcggacggtcaataatgtgtcgttcggcacgccgtatccgcaggacgtggtacagtaatttgctgttgcgcattattgcgtaacgtggagtcatgcctgagtggccgataggggcaccctgctaaggtgttagtcgtgtaaacggctcgagggttcgaatccctctgactccgccgattaaggttccgggtgaaagcttggaatcttttttgttttccggacactcctgatgatgggcctgttcgcacttcgcggagtcagagggattcgaaccccgggaatacggttctggtgggttgtccggatatctgttttgcgacgcattcctgggaatgtgtttctagtgggttgcttgggggtctgttttgcgaaactttcctgggaatgtgtcgctagaaataaccgaaataaccgaggacggtcggtctccgcttgtggtaagcggagtcggaggtacgccattgtccgtccgcctccaaaccgccattttagcgggtgaacgagtgcggcacctcggggaaaggctaacaaacgaaagaagaatgtccactaagtgagacttttgcgtggtgttcgtgaatggtgattgaagattaaccggtttatgtcgcttgtccaatcgcttgcccatcgccttcctccccgcagtgtttgactgagatgggcggtatcctagagagagaagaagagttccgaagggtgggcaaagatgagccatatcgctgggcaggggcaacatcgctccaactcgacacgaaccaaccgtgcggcgctgattatcgtgttcgtgatcacgctcgccgttacgctgggcatcggcgcatggttcgcaacccatcgcacggacggcaatggccccgcacgcgccggagtgtcggacgtcgcgttgaataaagcgaagaacacgcccaaaccggtgaccgaacatcacggcaattcaccggattgcccggatacggactgcatcgccatgctggtcaacggcgatttgttgttccatgagggattgtggagccatttccaaggcccgaaccccaacgccacggatggcaccgccttcaacttcgacccgctgttcgcgccgatgaagcagtacattcaggcttcggacatcgccgtgtgcgaattcgaaaccccgatcgcccagcgcggcggcccatatgccgcgtacccgatcttcaacattccgccggaagtggcggatgccgcccgcaacgtgggatacaacgcctgcacacacgccaccaaccattcctgggatcagggggcggatggcatcgcccgtctgtgggacacgcttgaggccgatggcatcgcccagaccggctcgtacaaaaccgaagccgactccaccaaaccgttagtcatcgattccccgaccggcggcggcaagctgggtctggtcaccggcacggtctccctcaacggcatgaccgccgacgaggactggcaggtggatcgtctgcgcgaagacggcgacccgaatcacgacagcgacatccagcgcgcggtagacaaggccaacaaggcccgcgagcaaggtgccgatgtggtggccatcgccatgcactcggtgcaggaataccttgattacgccgattcctggcagatttcggaagcccatgagcttgccgacactggtgccttcgacgttatctacggtgccggctgccattgtgcgcagcccatcgagaactataacggcacgtggattgtctacggtctgggcaacaccgtcaccgagtcggcgaacacgccggaaaccttggtcaacaaccagggtgtgaccgcacgcatccagttcgccggcaagaagggcgtcaaggggtcgtggcgcgtcaaccgcatcgactgggtgcccaccgccaacgtgcatcaaggcaactaccaatggtgcccgatatccagcgaccatcccataggcacatgttgggacgaagcctacgacgctcagatacgccaacgcatctgggatgtcatctattcgatgggcgcggaccagaacgtcgtcaaggaatggaacatcacgcaggagcaggcggcaaagcaatagttgctcggcttggtctcaaggaggggaagccgcaaggtgacgcttttcccgtcggcctcctaatgtggagcccatgaccgagatttacgaaacccaaagcgaacgcaccgatctgcccctcgtcgtgatgccgtccgtgctcgacgcgatgatcgagcccatcaaggcccagttccccgcgctccacgacgttgcccgcgtgcgtatgttcgaggaattcacgtccgacgaggcgatcgtagccgagcgtctgaaggatgccgacgccctgctggtgggcggctaccacatttcggatgatctgctacgcaccatcagcgagcaggggcacgtcaagtgcatcgtgttctgcggtaccggcgtcgccagctacatcaatctcgataaggcgcgcgagctgaagatccgcgtctgcaacgccgaacattatggcgatcacgccgtggccgagcacaccttcgccctcctgttcgagctcatccgccgcgttggccaactcgataaggatgtcaaggccggcaactgggcgtgggccggcggcgatggactgcaactcgccggccgtcgcatgggcatcatcggactgggcggcatcggcgccaccgtggccggcatcgcccgtgccttcggcatggaggtcgccgcatggaattcgcatgtgccgcccgagcatttcgaacgctccggcgccactccggtcgacgatctcaacgagctcatcgaaaccagcgacgtcatctccgtccatctgccgctcaacaacgccacgcgcggcatcgtcaccgccgagaaccttgcgcatgtgaagcccggcaccctgttcatcaacaccgcccgctccgaagtcatcgaatccggtgcgctgcttgcccgactgcaaaagggcgatgttcccgccgcactcgacgtgttcgaccacgagccgctgaccgccgacgacgccatctgccatgtgcccggcatcgtcctgaccccgcacgtcggctggcgtaccgacggcgcgttcaaggagctcacccgccagatgatcgcctgcctgaccgcctacttcgccggcgaggactataacgtcgtcgtctccgaacactgatagtcctgtctagcctcgcgctcaatcgaacacccagtcagccgaccaccggaacacgcttatgcagacgattctcaacacgtccgacgatcccgcccacgattcgctcgtcgaaaaaaagtccgaattcatcggcgacgccgcccatgtcgatacgctcgacgaggcgctcgcgttcgtggccgcgatccgcgagcagcatccgaaagcccgacacgtggcgtatgccgccgtgtgcggaggcgcggatgggcgactgtccgaacgcatgagcgatgacggcgagccgtccggtaccgccggcaagccgattctcgacgtactcaagcagtccggcaccaccgattgcgtagttgccgtcaccagatatttcggtggtattctgctgggctccggtggtctggtccgcgcgtactcatccgccgcatcattggcgatgaaagccgcccgcgccgcccgcatcatgaccgccaagcgataccgggtccgtctcgaatacccgcagctggcacgattccagcagatcctggcgcagctcggtggcgaccaggaggatgaatcgtatgcggtgaacgtcgaactgaccgcggtggtgccgcaagatgattgcgtgcgattcgaggagcgtgtgcgggaagcgttcaatgccgcggtggtaccggacccgattgacgtggtcaacattccgattccgttcgcgtgacgcctgtatgactaagctgggcatcatgaccgacgagaacaccaccagccagcagacccagcccaccgaggccgcaactgaggctgcaatcgacacgggcgcccagcagcgggaccaaggcgcgcagaccgcagccgagtccgccgctccggtggatttcgaaccgctgaccgctacatacgaacgtctgcgtcattccaccgacccggccgaactgtccgaattcgcccgtcggccgttgcctgaccgtgccgatcaggcggcgttctcccgcgccaccgcacttttggaggctgtggccggcaacccgcacaccccggtggccgatcgcgtgttcctcgccgacaccatgccgttcccgaacgtattggtcaaactctccgaagaccccgaaccgtccgtgcgccaagccgtggccgccaacggggatgacaagaattggctggtcggccgcctgaccaaggatccggtacctgcggtccgggatacggcgttgaaaaacaagcgcaccagctggaagatgcggcttgagggtgcgcaggaccccactgcggatgcggagacattggatttcttgggcgtacttggcaccgaatccgaagagggagcaccggcagtgctttcctcgatggtccgccgtgccgtggcgctgaaccccaatacgtctgaagcgatgcttgccaaattggccaacgacccctcggccgaggtgcggcacgccgtggaaagccgccgctaagcacactattgctgtgttttgccgtgcaaatttggccggcaatcactctctatccactattgtgagcgctcacatctcactatgtgagggtaaaaagtacataatttggcggaatcacggcattttgcttacggtgtggcgcaatcaaacggcgttagactggggctatgagtgagattaccgagagtgaagagcgtctggcccgtccgttgattcgactggccaagttggtcggtgtcggcacgagttatgtgggcatgagccatgactaccacgagatagacgatgacgtcctgatcgaggtgctggcagcgctgggcatcgacgcctccagcgagaacgcccaactcatcgccatccgacgcattctgaacgagcgttactcccgattggtggcacccaccgtgctgcatatcgccggtagcgaggaccgggtgctggtgaacaccggcattctggacgtgccttcggcgagcatcacgctggagaacggcgagccatatcagggcaccgttgaagttggtcctggagatggatcccaggcctacgacttggatggcacgttcatttcgaatgcggctgtggtcattcccgccgatctgccgattggctaccatacgctgcacgtcaaggtcgccgaccgtgtgcaagacgccactttgatcagtgcacctgatcgcgtcgatctgcttgacccgatgaagggcggcagtctgtggggctggatggcccagctgtactcgattcgctcctccaactcctggggcgtgggcgattacgaggatctgaagaccatgctggtggacgccaagcagaagaccggtgccgacttcgtgctcatcaatccggtacatgccgccgagccggtgtccccgctcaccccgtcgccgtatctgccggtaagccgtcgcctgatcaacttcacgtacatccgccccgaggcgatcgccgaatatgccacgctcagcgcgggcgacaagaacgccgtcgacggactgcatgccgacaccgaaccgctgaacggtgattcccagctcatcgaccgtgacgccatgtggcgcagcaagatgcacgccctgtggattatcttcaaggccggccgtaccgccgaacgccaaagcgcgttcgaccaattcaaggcggactgcggttccgacttggaggcgtatgccacgtggtgcctgtgctacgacaagtggggggcgcccaacggcgaggagagcaactgggagcgcaagttcaaccgcaactccccggaaatcgccaatctgcgcaagcagtacccggacaccttggacttctaccgctggctggaatggattgccgccgagcagctgtcctccgcccagcaggcagccaaggacgccggcatgcatatcggcatcatgtccgatatggccgtcggcgtgcacccctccggcgctgacgtgtggtggaatcccgagcgtttcgccaagggagccacggtcggtgcaccgccggacatgttcaaccagcaaggccagaactggagccagccgccgctgagcccgatcaatctggaggccaccggctacgagacctaccgcaatatggtgcatggcatgttcgcccgtgccggtgcggtgcgcatcgaccacattctcggcctgttccgcctgtggtggattcccgagaaccggtcggctatggatggcgcttatgtgtactacgactcagacatcatgctgggcgttctggccatcgaggcctctcgcgccggcggcgtggtcgtaggtgaggacctcggcgtggtgccggaccatgtggccgattccctgtcgagccacggtattctcggttgcgccgttgaatggttcgagcagtgcgacggcgtgttccgcgccccctcccagtggcgtccgtacgcattggcctccgtgaatacgcacgatttgccgccgaccgccggttacctggaatacgagcacgtcaagattcgtgagcgtctgggcttgctgaccggcccggctgaggaattcgaagcctccgcaaaggccgagcaggatgcgatgctggccatgctggtcgagcagggctatcttgatgccgacttcgccgaacatcgtgaggatcacgaggcggatatcatcgacgcgctgtaccgcgcactgaagggttcgccgtgcaagctgctcgccgcctcgatcaccgacgcggtgggggagaagcgcgcgcagaaccagccgggcaccaacaacgaatacccgaactggcgcatcccgctggccgacgccaagggcaacgtggtaccgctcgaaaccctcttcgacacccccggcgtccaacgcttcgcccaaatcttcaattcctgacccactttacctccctctgacgagccgagtcgttaagcggacagtccggtggactgtccgtagacgaggcctgaacgaagcgatagctgagagaaggcagggaattgcctcaccgtaggcgagtcggttagccgaagtgggtggaagagaaaccataaataggggaagagaagccataaacccaatggagtgtccccagttgccctatgtcaagcccggcgatatactagtggattgttgtgtttccctaaggggtccttcaaagcgctatcccactcgccatcgaggactttcagggagcccacggataatgaggttcgatgcctcttggatgcggccctgaccaagccacgccaagcagctgagacccggaacacaatatagaaaaggtaatccagtgaaaactttcactccgaagccagctgatctgactcatgactggtatgtcatcgacgccaccgacgtggtgctcggccgtctcgccacccaggctgcaatcctgctgcgcggcaagaacaagccgacctacgctccgcacgccgattccggcaaccacgtgatcatcatcaatgccgacaagattgctctgactggcaacaagatgggcaaggaactctactcgcactccggtcgtcccggtggtctgcgtcgtgactcctacgccgagctgctcgagaagaaccccgagcgcatcatcaaggaagctgtcaagggcatgctgccgaagaaccgtctggccaaggtgcagctcgatcgtctgcgtatcttccgcggcgctgagcacccgcacacc

SEQ ID NO: 1159 - DNA, 14025 bp, Unknown
  R81_24m  MAG No. k141_10327
ctcggtctgatcgtgggtcacgtacagggtggtgacacccagctggcgctgcagggcagcgatctgggtacgggtctggacacggagcttggcgtcgaggttggacagcggctcatccatgaggaagaccttcggctcacggacgattgcacgacccatggccacacgctgacgctgaccaccggacagagccttcggcttacgatcgaggtactcggtcaggtcgaggatctcagcggccttctcgacgcgcttgcggatctcttccttcggagtgccggcgatcttcagagcgaagcccatattgtcggccacggtcatgtgcgggtacagggcgtagttctggaacaccattgcgatgtcgcggtccttcggctgcatcgtggtgacatccttgccaccaatgaggatgcggcccttgttgacctcttccaggccggcgagcatacgaagggtcgtagacttaccacagccagaagggccaacgaggacgaggaactcgccatccttgatatcaagattcagatcatccacggagggcttatcgttgcccgggtagatacgagtgacgtggtcgaaaacgacttctgccataattactaatcctttcagaggcaggtacgtgcctcacgatccgttgtaaagggatttgttctttactgcgcttccgccctcgccaccgacgtacaactttgctttcggaaactgcaagcttcagcgtttacttttttccggttcagtgaaggttctcttcgttgagccgagaactactatacacggaccgtggaccaaggcaagtggcgtgtctgaaaatgtagttaactttatgggcgtttctgggggtgttgtgtggttcggcccatgacacgcctgtttctcgaacgtgcgaaccggcacgcccggcgtagagcaggcctgctcttcccgaactgacggattccatcagtcgccgactaatgcgacacagactcgaaggtgacgccgttgcgggcggctttgcgctcggccttgcgctcctcggcgttttcgatgcgctggatgcgcagctggcgccagtcctcgcgcatgtcgcggaaacggtcggccagcgttacgtcatcgttctcggcatcgccatcagtaccgctgccatcggccttaccgaacgtgccatcggccaccttggtgatgcccagcttgagcagtccgagcaactcacgcaacgtttccggtacgggctcatcgccctcatcggcggactgggtcaggccctcgatgcgacgacgaagcgcgtcggcgtcctcgggatcgatcttgagcccggcgatcagcgactggcgcatggtctcgtaatcgaggttggcaaagaaattcagctgttgcagcgtcatgaagcccttgagctcggggaatcggtggacgatgtattcctcgcggtcgtcggcggcgcgggtccagtcgcgggtgagctgcggatcccagttggcggtaatcgatccctcgcgcatgcggtagtggtacagcgccttgggcagacggaccacgcgcgtggcctcgccgatcacgttgcagatacgggagagatcctcgattttgcgccccaccgggaaggagaatccggtgccctgataggtggaggcgggtgccaggaaggcccagaaatagccgtcgatctcagccttgacctgctttttgatggcctcgaccggggtcaggatctgcacctcggtgaagtcgttgtggcgatagttggacagcagcggcttgttgttctcggagatggtgtcgaactggaacatcaccagatcggcatcgtattcacgcatggcattcaggcagtcctccaccaacgtgggggccacggtgtcgtcggaatcggcgaagtatatgtacgcaccggtggccccggcgatgccggtgttgcgggcgtcggacaggccgccgttgggcttgtgaatcacgcgtatgcgcgggtcgcgggcggcccaggcgtcgcacatggccgggcaattgtcgggcgagccgtcgtcgaccagcagaatctcgaggttgcgataggtctgcgcaaccacagacttcacgcattcatcaaggaatttctcgaccttatataccgggatgatgatgctgaccaacggctcctgttccatgcctccagcgtagcgccgtcgtgcgaacgcggcggcgctacgggttcgcggaccgcgaaacccttagaaatcccagtcgtcgtcatcggtttcttcggctttgcccatcacgtaggaggagccggagccggagaagaagtcgtggttttcgtcggcgttcgggctcagggcggccaggatcgcggggttcacatcgcaaatctcagccgggaacaaagccgggtagccgaggttcatcagcgccttgttaccgttgtaccgcaggaacttctcgacgtcatcggtcaggcccacgcggtcgtacagcgactgggtgtactccacttcgttgtcgtacagctcgttgagcaggtcgtacgtgtagtcctgcagatccagacgctcggcatcgctcagctgggcgatgcccttctggtacttgtagccgatgtagtagccgtggacggcctcatcgcggatgatcagacgaatcacgtcggcggtgttcgtcagcttggcgtgcgcggagaagtacatcggcagatagaagccggagtagaagaggaaggattcgagcagggtggaggccaccttgcgcttgtacgggttgtcgccctcgtagtagtcgagcacgatttccgccttcttctgcagaaactcgttgttctcgctccagtcgaatgcggcatcgatctgttcggtggagcacagggtggagaagatggacgagtagcttttggcgtgcacggattccatgaaggcgatgttggtgtacacggcctcctcgtgcggggtgagcgcgtccggaatcaggctcacggcaccgaccgtgccctggatggtgtcaagcagggtcaggccggtgaagacgcgcatggtgagcgtgtgctcgtcctcggtcatcttctgccagctggggatgtcgttggagacgggaactttttcgggcagccagaagttgccggtcaagcggtcccagacctcaaggtctttctcgtcttcgaggcggttccagttgattgcggagacgcggtcgatgagtttcagcggtttgcgcggaatggaaatcggtgccatgagtgttccttattactcgttgtcgttgtcgttgtcgttgtcgttatcgtcgttggacttgttttcgaactcctccggcgcggtcagccggagcagtgctctatagatggttcgtgacattgttggttccttagatggtggagcccccctcagtccgcttcgcggccagctcccctctctgaggggagctgtcggcgttagccgagtgaggggagtaacaacggctctctggttgttcaatgcgtgcggagaccgccgtctgaggccgaaggcgtacgaaggtacgtcgagtgccgaagaaaggcggtatacgctccctcgaacgatcagagcatgcaggagacgcagccttggacttcagtgccttccagggcttgctggcggatgcggatgtagtagagggttttgatgcccttgcgccaggcgtagatctgggccttattgaggtcgcgggtggtggcggtgtccgggaagaacagcgtcagcgacagtccctgatccacgtgctgggtggcctcggcgtacgtgtcgacgatggccttccagccgatctcgtaggcgtccttgtagtacccgaggttgtcgttggtcatgtaggcggccgggtagtacacgcgcccgatcttgccttccttgcgaatctcgatcttggaggcgatcgggtgaatcgagctcgtggaatggttgatgtacgagatcgagccggtgggcggcacggcctgcaggttctggttgtagatgccgtccttcagaatcgcgtcgcgcagggcctcccagtcggccgcagtcgggatcgcgatgccgtactgttcgaacagcgcacggacccgttcggtgcgcggagtgagcgaacgacgaccatcggtgtacttgtcgaagtagttgccctggccggccggcttggcgtagtcgctcgtagcgaagctggcgaacgtgcggccatgctccacggcgagcgcgtgcgaggcacggtaggcgtggtaggccacggtcatgaagtacatgtcggtgaagtcgaggccctcttcagaaccgtactggatgccttcgcgggccaggaagccgtgcaggttcatctggccgagaccgatggcgtggccctcctcattggcgcggcgaatcgaaggcaccgcgttgatgctggtgtgctcggccaccgaggtgagtgcgcggatcgccgtctccaccgtgtggcccaagccgccatccatcgccttagcgatgttgagcgaacccagattgcaggagatgtcgcggccgacatgcgcatacgtgaggtcctcgttgtatgcgctcggctcctgaacctgcaggatttccgagcacaggttggacatggtcacgcgaccttcgatcgggttcgcgcggttgaccgtgtcctcgaacacgatgtacgggtagccggattcgaactgcagttcggcgatggtggtgaagaacttacgggcgtcgatgtaggtcttcttgatgcggtcgtcggccaccatctcgtcataatgctcggtaacggagatgtcggcgaacggcttgccgtacacgcgctccacgtcgtacgggctgaacagggccatctgggccttctgtttggccagttcgaacgtgatgtccggaatcaccacgccaagagccagcgacttgatgcggatcttctcgtccgcgttctctcgcttggtatccaggaagcgcaggatatcagggtggtgggcgttgaggtacaccgcgcccgcgccctgacgtgcgccgagctggttggcataggagaaggagtcctccagcagcttcatgaccggaatcacgccgctggactggttctcgatgtgcttgatcggggcgccgagctcgcgcaggttgctcagcagcagggccacgccaccgccgcgcttggagagctggagggccgcgttgatgccgcgcgaaatcgactccatgttgtcttcgatgcgcaccaggaagcagctgaccggttcgccacgctgggccttgccgaggttcaggaaggtcggggtggcgggctggaagcggccggcaagcatttcgtcggcgtattcgatggcctgctgctcattgccggcggcgagctccagggccacagcggcgcaacgctgcgggaagtcctcaagatagaggcgaccatcgaacgtcttgagcgcgtaggacgtgtagaacttgaacgcaccaaggaaagtgccgaactcaaagccggcggattccacgtgctcgtagatgcggtcgaggaattcagcggagtactggttgaagaccgcagggttgtagtactggttgctgatcaggtattcgagacgctcggcggtggaggcgaaccgcttgctgttggtggccacgtgccctgtcacgtattcgcgttcggcggccttgtctttgtcgaactggatcttgccgtcggcgtcatagaggttgagcatcgcgttgagcgcgtggtaatcgtgcgccgggtcgtactgttccgctgcggtgtcggcagtattgtcgagcggcaggccggtggcggtgaggtcagtcattggaaatccttggaatatggcagaagtgtgtttactcagacagttgctcccctcagtcaacttcgttgacagctcccctcggagaggggagccaatacctcgagggggtcaagatttactgttcggtgaagaagcggacgaggccgtttcgcacggcggcagtgtcttccggggtgcccatgagttcgtaacggtagaggtagggcaccttgcatttggcggcgatgatgtctccggcggcacagtaggcctcaccgaaattggtgttgcctgaggcgatgacgccgcgaatccactcgcggttggctggatcgttgaggaagcgtttgacctgaatcggcactgctttcttgaccacgccgccgccataggtgggcaccatgatgacgtacggttcgcggacgtttagcgccgggtcggcggcccgcaacgggatgcggtagacgttgatgccttcgtcctgcaaacggcatccggccacgaaccgtgcggtgttttcggaggccgacgagaagtagaccaatgcgccgatcgtcttgccttcggccgcgaattcgggctggctcagactcacgcggacaccgtggcggcggcgcggttgtcggcggccacctgctgggcgacttcgcgaatcaggtcggggcggtagccggtccaggagttgtccggcgtgatgaccaccggagcctgctggaaaccggcggcctgcagctgctcaagggtggaggggttctgcgtcaggtccacggtttcaaacggcacacccagcttggtgagctggcgcttggtggcatcgcactgcgggcaatgcggcttggtgaacacggtgacggtcatggcgactccccttgatgtggttctgatgaacagtgaagcgaaggccatattacagcggtgtgatttgaaatcaaggcactatatgtagtggcgcgtgtcacataacaaacctagatatagggtttttcgttgatattccgccattcccatgcacccccgaaaatcggcgtgcagcgacccgcccaatcacatgtggcattgttcacatttgcgtttgaaccgctcttcgactgatcctcaaccgccctgcaaccgccatcttgagtttcgaggggctgttttgaccctttccggagatctatctccgtttcgaggggctggtactcaagtaagcgcatccccaaaatggcggaatgacggtggggcgaagccgtttatacccgtgttctagcgggccaccagcccctcgaaacgggagtaaacctctacggaaggccaaatcagcccctcgaagcggagaatggatacctcggcaccccgtgtggagccagaaggcctggccggatgtccaaacgagcatccggccaggccttaaaagtagttgttcagttatcagaatcgatgcggcgcgatactactccgcgtctttacggctccaacagatcttcgatgcggcagccaagcgtgcgggccaaagcgagcacggtggagacggcagctttgccaaggtctttgcggcgctgctcgtacatttggatggagcgcagggtaacgccggagcggcgggccagcccggattggctgagtccggcgcgcacgcggatcgtgtgcagccgggagtcgccctcggtgcgattatgggcggcccgctcgtcgtacacgtcgacgaatcggctttcgtcggcttcgtgcagagtcgggtacagtcgcacgatatcgtcgagcgacagcacatcgagaatgtccgagaaccgcactcccctggtccattggcagtatgcgagtacccatccggcccagtattcgggtgttgagccggcgcgcagtgcggctggcggcatatcgagaatgcgcgcccaaccggtttgccgcatgatttcggccaccagctcctcgccggacatgccacacacgtatttgggcgtgcctcgcccgaaaagcgcggccgcctcggaggtggcgaagaagtccatgaataggccgaccggcaacccgcaatcgttcagcgcataatcgaaggcgccggccaagttggccatggcgtccggcaagtatgtctcatcataggcggggatcatcgttggtcactttctcgcggatgatgtcgcgcatgaacaggccgtcgagatcggcttctgcacttttgcggcggtaggcttcgcgagctgtgcggtcgcgctcgttacgcaatccgtggtaggtcgaagcgcgggcgatttcgcagccttggaaccgcagtgccgcgaatgcctgaggactggcgagtacgatctgcttgccgagctcgcccaaccgcatcgcctcagcgagttggtcgatggaaatcgcgttattgacaaaagcgcgggcgaacgagaaatacgaatcgtcggcacgatatccgacgatgacgtcagcctgactggcatccggcagaaacacttgtttcagatattcgatgccttgcgcggcgacggcggtggtcggctggaaacgacggttttcgaccagcatggccagccagttcaggatggtgtagggcggctgggacagatccaggaagaggagcccgtccgtggccaacgtgtaccgattcgcgaaaccgtcatccagtcccgcgcacgcccattccttggccagctcgacgctgcgcgtgcaatagaatccgcggccataatcgttgttcggcttgaccagcccgtattcaggatgcttgatgacatgcgaagagccatgccacagttcgatcgatgcggtctccattggccggctccttctctctccttacatattcttgattatatcactgtggtgatagtcataagggaaatacgagatgaaaaataccgctgtatacgttcgtacacaacgtgaaatgtatacgaacgtatacaacactgatgtccggagtcatgctccgcagtggcgcagcggacgcgccactacaatcggaatatgggactgaagacgtggaagaagtggacggactggccgctgatggtgctgtccgtggtgtttctggtggtgtattcgtgggaaattctctcccgcacgcatatcgcgctgtgtgaaaccgtcatcaacgtgatctgggtggtgttcgtcgtcgattatgtggtctcgctgtggttggccgacgatcgctggcggtggttcaagcacaacctgttcacgctgctgaccatcgcgctgccgatgctccggcccttgcgactgttgcgtttgctgaccgtgctgcacgtgctgaaccgcacctccggcatggcggtgcgcgggcgcatcaccgtatacgcggtcggcgcggtgggaatgctcatgtacgtgggcgcgctggccgtgtattccgtggagcgcggggcgtccggatccacgatcaccgacttcggcacggcgttgtggtgggcgttcgtgaccgtgaccaccgtgggatatggcgacttctcgccggtcaccttccaaggcaagatcattgcggtggtgctgatgttcaccggcatcgcgttgatcggtattgtgacggccacgctggcctcgtggatcgtggatcaggtcaatctggagacggatcggcgcgaggacgctcgggagaaggaagtggccaaggaagccgcgcaagaggctattgcaacatcagccaatcccgaaatcgacctattgcgcgaggaagtgcgtgagctgaccgctacggtagccggtctgcgcaccgaacttgagcgacgttgattggcgaagcgggacaaacaacgattctgccaagaaggtccgcgtcagttgttgtcaccgcggattgcggcagaatcattgtcgccacggctgttttcttcagtcggctcaacccaacttttgataatttttattttaggttgattcagcgaggaggcggtccacatgaaggcaaaggaaaacccattcaagccaacggcaggaggggaaccgcccctgctcatcggccgaggcaaagttatccgcgatttcgagaaaggtctcgataacggagtcggtgccccagggcgcattatgctcgtcaccggcgctcgtggaaccggaaaaaccgtgatgctcactgtgttcggagaccgggccaaagcgcgcagatgggatgtcatcgaagaaacggcctctgccggactatgcgaacgccttgttgatgccttacgaaccgggcgaggggcccttgaccacctcactatccgaccatcgttgacttttgctggagcgggcatcggcctcggagaagccgaactatccccgaagcgtatgcccgaaacgttgagaagtgccattgccggacggttggatgcgcttgagaagcgccatgctgggttgcttatcaccattgatgagactcaagcggctgagcgatccgacatgattgccatcgccactgccatacagcatcaaatcagggaacgacgcaatatcgccatcgtgttcgccggtctcccacagatgatttctgatttgttcaatgacgaagtcatcacgttcctacgtcgcgcgaaaacgaacatgctcacagatattcctcttgatgaagtgcgcgatgctttcgccacaacattccgcgcctccggcatgtccatcaccgacgctcaattaagcactgcagccaatgtgacagccggatacccctatatgattcaactggttggctaccatatctgggatgccgcagacatgcgggactcggataccatcatcgacgctgatgttacggcaggtatcgaggaagcacgtattgaccttgataacgccgtgtgcatcccggagttgcaaggcttatccaaaaacgaccgtgagtatctcgaagccatggcagcgtcagatggtccctctcccaccgtgaatgttgcacagcgcatgggcaaaacgcctaactatgccgccacctaccgcaaacgcctccttgacgccttcgttatccgcgaaacagaacgaggcgaagtcgattttgccgtgcccttcctgcgcgaatacttgcgtcggaatcagtaatcggcacaatgcacagtatcgatatattccgttccatataatgacttttcgcattcagatacacaatggacggcctgttgagtagcactcagcaggccgtccattctatttagctattcagttatcggagacacacctcaggccttggcctgagcgccagcgacctgctgggaggccatcacgccgaacaggtagccgtcttcggagaagtattcgaaggtacgaccggcgaagtcgcggcattcgaatctgatatcgttatcgattcgatcagcggctcacgatactgcccttgcatcgctgtgccactgttgaatgtgcccggctggctcacctttgggtcatcgccgacacatccttgatgccgatggttatagagtcgcaaattcacgactggcgcacctgcccacgcacctatcctgtcatttcgagcgcataatttgctaccacatccggtcagggcaatcgaccttaatggcgtaaacggcacttctcaatacgtaaacggcacttattcttggctctcctctcagagaggggagccaagaaatatcaagctcggcctcccaggagagagccagaataatgcaccggcaaggcattaggatggagggcatgagcgatttgaacgcgttgaatcttgagcccggcgaagtggttggtgggtatacgctgatctcccggctcggctcaggagctatggggtcggtgtggcgggtgcgcgacgacggcggcaccacctatgccatgaagattctgcgcgactccctgaccgacgagtcagtggcaggctccggctctgcgtccacggccctgcacgaccccaacctcaagcccgatgtcacgccgcgcgagcgcctgcggcgcgaggccatggccttgaagaaggtcaatcatccgggtgtgtgcggcatcgtggatatggaactcgacgatacgttggcgttcatcgtcactgaactcatcgagggcaagaatcttaaggatgatgtggccgccaatggccggtatgtgggcgacgatctggaacgcttggcccgcaagctcatcgaagccaccaaagccgtacatgcggccggcatcgtccatcgcgacatcaaacccaccaatgtgatggtgtcggccgccggaccggtattggtcgatttcggtatcgcgatgggcgagggcgaaagtcacgtgacccgcaccggcctagtgatgggtacacccggattcatcgcacccgagattattgacggtgccgaatccgacgacgccaccgattggtggtcggtggcgtccgtgctcgcttttgccgcaaccggcgcgcctgtgttcggcaccaagccgatgatggcggtacttgagcgcgaggcctcgggcaacgcgaatctttccggactaccggccggcacattggctgccttccgttctgcactggacccggatcgcagggatcgttgcacgccggatcaattgctgaatgccatcgccttggatgcgttgaatcccaacgcttggcagggcgagcaggcgggaccgttcgccgcgggagccgtggctggacaaccggctgcgatcgttgccgaagccgcggaggcgatgcccccttttggcgcggccggcggcgttgaccgcaataatccccgaaccatctggcgcgcggccgaggaagccgctgaggctcccaccatggccgtgttctccggcaataagggcgataacggcgatggcgaaaccgccgtattctcgccggctggcgccgctaccgccacgctgcccttagccgatatgccgccacgtccgccggccggtgcggagcaggccacgcaactgttgcccgacgctgctgccgatttcaccgacgacgccggcacacaggtactcaccggcgcgaccacaccgatgccggaccaaaccacaccaatggccggcgccaccacaccaatgaccaacaccgattcgactccggccccgaccacgccgctggccgagcgcaccaccgtactccccacgccgcagccgtcatcattccccccgtccggcaccgcccagagcagctgggatcccgcaagcaaccagcccacagcggtggaccccgccattcgcccggcattgcagcgcatcatcgaccaaaccgcccaagcggcccccaccgaaaccatggtccaaaatcctcccatgcccaatccggtggacgtgaagcgaggggaatatctgcggcgcggcaccctgccattgatcctgctggcggcgccgctggcggcactggcggcaaatgctccgctcgtggccatcatcgcggccactgcgttgttgtggctactgctcaccctggcctataacaccgaaccccagcttgagcgcgagggcaaacgcggcggcgagcgcaaaaactccgattcgtggattcgcgtggcgacttttccctggcatctggtcaaagccctgctgctggccattccccgcatactgctgctagtcatcatctatatggcgggaaccgccgtggccaccgcggctctggcactgcccgttcacaccatctcctggtatttcaccgcggattggggtattccggtgccgttgctcaatgatgtgccgttctccgcttccgggctggcgctgggcggtttcatggccatcggctggctggtcactgtgttcgccccacagtcgatgatgattcggctggggggcggcgtactgcgcgggctcaaacacagtcgcccggcgggcgcgccatccaccgaagtgggtggggctccacctgctccagtggcgccggcgcccaagggcggcgggcgcggcaccgtgctgttcaccatatgggccatcatcaccgtggccttgtgcgcgatgccgattctgggcatgccgatcaactggatgccgttcgcctagagcggggcggaatctcacacatcagccatccgcacacatggccgttgtgtatccgatacgttcgttccgtcacacttttacagggaattcacctcagatcagctctgggcgcagtcctcctcaggcccggtcattatgatggggcccaaacattgaagcgattgcaaggggatagctatgtcagatccgaagcgtcaggccaagcgtgccacacgcgctgagcgccgagcggccgaggaggccgcccagcaggcacgggccgagcaggcggctaaggaacgtaagcagcagaccatcatcggctgcattgtggtggccattattgtggtgctggtggccatcgctggattcgccgtatacaaggctatgcggccgtccaacaccagcagcagtagccagcaaagcaacatgaccgtggacgaggcctatagcaagctcaagaaagtcagtacccagccggc

SEQ ID NO: 1160 - DNA, 3917 bp, Unknown
  R81_24m  MAG No. k141_10346
acgatggcgaaaacccgttggatttcgcggcgttcgaggccaatccgaccggattcaccgtggtggcctgcaatgccgaggacggctcgaccaagtatttcgacaagtcacgcgtacgcttcgatgatttcgacatcatcaaggcttcgtccgccgtgccggtggcctgcgagccgtatgtggtggatggtgtgccgtatttcgatggcggcatcgccgatccgatcccggtacagaaggcgctggatgacggctatgatcgcgtgattctgattctgtcccgcttgcgtgacgaagtacgcaagcagcagaaggatctggctccggcccgcatcctcgaacgctcccaccctgccgcagccgagaagctgcgcatgcgctacaagacctacaacgacgaactcgaactcgccaagcgttatgaagcggaaggccgcgcgctgattctcgcccccgaagacctgtatggtctcaacaccctgaagaagaacttcgagggtctggagatgatgtatcgcaagggatacgcggcggctgaagccatcccggcgttcctcgggaagtgacggcaccggcgaagtacccgttcacgccaaaccgtatagccgttccacgttggcatgcgcgatggcgtcgataacccgtttcgcctgattcgcgttccatgcgccatccgatacccagtcgatggcgattcgcgcaatatacctgcggaacagcaccgcggccagataatgcaattcactgatgccgacgccgtccgacgcatagagcaacttgtcaaatgcgcaccacgccagaacattgcgcagcacttccctcacctgcgctcccatatgcgtattggcaaggctgacatccatgtatacgttggcatgcaccgagcagagaaacgccgcttcacgctcgtatggcacgcaatgcagaagcggaagtgtcaaggtgcaggcgcagatcgccagacacgttgaatttctcgttttcggcgaacgagttgtccgcgccgaacaccacccagaccagggcggcgcccaatccgttgcgttcgaaggcttcacgcctgcgggcgggaacggatttggcacgggtcacgccggcatagtccacataggtgccggtgacgatgtccacgggcttgcgttctgcggaaacggtgttgggaatgaagttggacatggcgatttcctttactggtaagaagacaatgaatggattgttagtaagttatcgatatgagtagctgaggcggaatgcggatggacgacaagcccgattcaggcgaaatactcctgaaggttctcgctggcacccagcttcttgcggaagaagccggtgcgaatcgcaatgatgatcaggccgacgaccaacctctttctgtgtttccccaaaccatcgggggaggaacgttgtggttcactgtagtacccgcgaccggctgatggggccgtgtccttatttgaaaatcatcgcttttgatataaggcgtgccatctcccgcatatccgacgcgacccgcgttatgatcactcgcgcgagcctcgtcggacgaatctgtcggccggccactgagtttttaacaatcaaccggatatgccatcgagctcattcgaggctgtcgtgtccgagccgggcgaaggtgccgttgcggtcgaccagttgacggtaggtgccggtttcattgacgtggccgtggtcgaggacgataatccggtccatgccggttagcacgcggggccggtggctgatgacgatcacagtggtgcccgccggacggttggcgatcagatcatggtagattgcggcctcggcggtggcgtcgaccgcggcggtcggctcgtcgagtatccacaacggcttgccggacaggaacgtgcgggccagcgcaagccgctgccattgcccgccggacaggccaacgccgccccactcctgaccgagctgcgtatccaagccgccgggaagcccatccacgatgtcgagcgcgcgggcgcgacgcaacccgtcacataactcatcgtccgattgccgcagagcgggatcgatgaactcgcgcacggtcacctcgatgtgcgtgaaatcctggaacaccatgctcgacgcgcccaaccgttcggcccacgaccccaaggtacgaccgttcccgccgtccgcgcccgagggcagggtcacggtgccgtccggggcgtcgaggatgccggcgatgagcttgacgagcgtggtcttgcctgacccgttctcgcccaccagtgcgacgatcgatcccgcttcgacatccaacgacacgtcgtccaacgccggagtctgaacggccggaaccgacgctgccgacgcgtcatccgcgtcatcgtcatgctttgcaacagtcggatacgcgtacgtcagatgctccacgtgcacgccgaccggaccggtcgtttcggggatcgcggggttcgcgcgcagcaggcccatgagccgttcgtaggcaagaatcatcggcgtggacgccatgaggttgccgaacgcctcgccagtggtgcgcgtgaccgacaatcccgtcatgatgcccaccaacgcggccgggatgctcgacacggacgcatggccggacgtcaggatcagccagaacgcgccgcccgtcagcacggcgaacacgagcgaactcacaccggtcaactgcaccgtgcgccacgagatacgctcccacatgccggccatattgaaatagcgcacgcgcgcctgcgcagggatgccgaacgaaccggccgtggccgcgatctccgtgctcgacggtggataatccaacaaccgctcgaaatagttcgcccgacgcgactccctgccgcgcttgggccataactcgttcgtgagcttctccacgccgaactgggccaacagctccgggaccatcgccaacgcgatcatcagcgccgccaacggatgcgtatgccacaaggacgcggccagcatgaccatcgacgccagcgcgcccaccactgaggtcgcgtccgcggcctgcgaagccacgttgtacgggatcgcgtcgcgcgcggcccgcacctgcgtcgtcacctcgtcgtccaacgtctgcgcgggagtcagacgcgccagcgcgtcggtcagatcggactggtattcggccatcaatggctcctgcaacaagtcacgcatgttctgcgccaacgacgacgacaccgacatcaacaccgcgcccaccgtcagcaccgccaggatcactgcgaaccggcccacgcccagccccgaccccataccaagcccgtccgggccgcacgcccaaccgatcagccacacctgcaacgacggcatcgccatcatcaccaacatcgacagccacatcaccaccgtacgcaccggacgcctacgcaacgcatacgcactcgtccgccacgacgtcgccaccgcatcacaaaacggccgaaatcccgcgacaatcggcatttacgacgcctcccccacaataatgatagaccgcacgagttctaaatagaagcgcaacacccgctccatggctggaagtgttcaagttcataaccagagagaaagtgtcgcgctcgatatgagagtgtattcccacctgtcggcagaggaacgtgtccggatcgacgagctgaggacacagccgatcggcgaacgtccgaaacgcgtggactcgcgccgcgagttcggccattatgagtcagacacggtcatcggcgcctccccgtcgaggcggtgcggcgacacgcaggtcgaacgcaagagccgccgtctgttcgccgggttcatccccgacaagagcgcgctgtccaccgcgcgcgccgaatacgacatctacaaggacatccccgcgcccgcgcgcatcgaccgggcctggtacaacggcacggagtcctcctgccacctgctcgtggacgaggccctcggcatgctcacctact

SEQ ID NO: 1161 - DNA, 15206 bp, Unknown
  R81_24m  MAG No. k141_10364
gtacagcagggccttggcggagttcacgcgagcggcgaagaactgcatctgcttgcccacgcgcatcggggagacgcagcatgcgatggcggcgtcgtcgccccagtgggaacggatttccttgtcggactcgtactggatggccgaggtgtcgatggagatcttggcgcagaagcgcttgtagccttccggcagcttcggatcccagaagatggtgatgttcggctcagggccaggtccgaggtgctcaagggtcagggtgttgagcagacggaaggaggtcttggtgaccatcggacggccatcgtcgccgaagccggcgtcggaccaggtcgcccagtacgggtcgccggagaagatcgcgtcgtagtccttggtgcgcaggaagcgcacgatgcgcagcttcttgacgatgttgtcgatgatctcctgggcgtcggtctcggtgatcttgccggcctggaggtcgcgctcgatgtagcagtcgaggaaggcggagttgcggccgaaggacatggcggcgccgtcctgggacttgatggaggccaggtagcccatgtaggtccactgcacggcttcctgggcggtctgagcagggcgggacaggtccaggccgtactcgttgccgaggttgatgagctgcttcagagccttgatctgctcgtcgtgctcctcgcggaagcggatccagtgctcgatctccggctcggtgaagtcgttgcggtacgggatggagtccttgtcgcgcttcttgaaggcgatcagcttgttgacaccgtacagggcaacacgacggtagtcgccgatgatgcggccacggccgtaggcatccggcagaccggtgaggatcttgttgtggcgggcgaccttgatgttcttggtgtagacgccgaacacgccgtcattgtgggtcttgcggtacttggtgaagatcttcgtgatctccggatccggctccttgccggcttccttgatggcctgctcgaccatacgccagccgccgttcggcatcatggcgcgcttgcagggcacgtcggtctgcaagccgacgatcacgttgtcgacttccggggagtcgatgtagccggccgggaaggcatcgatgccagccggggtgtgggtgtccacgtcgtagacgcgctgcttgcgctctacagccaggtagttgtcgtcgaggtacttccacaggtgcttcgtcttctcagtggcaggagccaggaatgtctcgtcgccctcgtacggggtatagttcttctggatgaagtcgcggacgtcaatatccttctgccagttgccctcggtgaagccggcccacgccttggcgtcaagctcctcttgggagacagctgcattttctactgcggtcatgtcactccttaaatggggttgtaggtttcgcatcttcacggaacccttggttcaacagtgtagttggcacttgcttgggaaaagccgaaattgggagtgagctatctcacattgttttttgtgaacgctaccattccaatggtttctaggtattgatggggctattgcacgtctccagatatgggaaaccgctcatactgtgatgttcgtatgagcggcttggtgagcggttcggtcttgagattgacagcagaaccgtatccgtctgttttggccgtcagtcttcatcgctcgcttgcgcggatttcacaccgtagttcttccagcgccagttctcctcctcccatctggcgttgcggtccaccacgatgtcccaggcgtgttcggcatcttccttggtcttgtacggacccatgcgctgttcaatcggtgagaccatgcccagctcggcctgcttcttgacggtgttgaaataccactgcttcttgttatcgtctgtcattggtacctcctcaacggtattacttgctcccgctggcgggagcaatatatgtttattccctgaacgcgttgatgacgggcagtcggcggtcgcggccgaacgcgagggccgtgaccttcggtcccaacgggtattggcggcgcttccattcggcgtggtccaccaatcgcatcacagtgtccacggtggcctggtcgaagccgtcggccaacaggtcggcgcggccgtgcgcgtgctcgatgtatgcagcgagcaccttgtcgagcagcgcgtattcgggcagggagtcggagtccttctgcccggggcgcaactcggccgagggtgccttctcgatggaggagaccggaatcatcacgccgtccttcaacgggatgccggcgttgccgtcctcgttgcccacgatcttgagcccgccgataccgacgcctgcggccgcggccttgttacgccaacggctgatctcccagacacgggtcttgagcaggtccttgatgggtgcgtagccgccgaccgcatcgccgtagatggttgagtagccgcaggcgagctctgacttgttgccggtggccacggcgagcaggccgcgagaattggaactggccatcacgatcacaccgcggatgcgggcctgcaggttctcggcggagacgccatcaaggtcaagttgctgttggtaggcgttgaacaatagctcaataggctggacctcgtaatgggcaccgatgttggaggccaggtcagcggcgtcgtctttggaaccatcggaggagtacatggagggcatggagatgccccagacgttctcgccgccgcatgcgtcggccgccatggcggctaccagtgcggagtcgatgcctcctgagaggcccagcgtcacgccggtgaagtggttcttggccatgtagtccttgaggccgagcacgcaggcagtgtatacctcttcgtccgggtcgagttccggaacgatctcggccttgacctgatgttcggcggtggaatcgaagtcccagaacgtcaggttttccatgaacatcgggccgcgttcgataagcgtgccgtcggcatcgaccacgaagctgccaccgtcgaagaccaggtcgtcctgaccgccgacctgattcaggtagatgaccggggcgttgacttcggcggcacgacgctgggcgagctcgaaacgggtgttggtcttgccttcctcatacggcgagccgttgatggtgagcagcaggtcgatgttcttggtggccaggtcggccaccgggccaccatcctgccagatgtcctcgcagatggccacgccgatggtggcaccatccacgtcgagggtcacggaacggtcgccggcggagaagatacggaattcgtcgaacacgccgtagttgggcaggaagtgcttgtcgtagccggcccagaccacgccctgatgcaataccaccagtcggttgcgcggcttggaggtcttacgatcagtgcccacggtgccaaccaccacgaacagattgccgaggccgtcgtcgttgagctgggcggcgagttcgttggccttgtcccatgcggcttggcggaaggtgcggcgcagggccagatcttcgatggggtatccggtgagggtcatttccgggaaaacaaccacttgggcattccctgcggcggctttacgggagtagtcgagcactttggcggcgttggcatcgagcgcgccgacgcaggtgtcgatctgggcgagtgcgaagcgaagctgtgtcatagcttcttagtgtagccgcgtatggcgtcggattgcctgttcttccggcttggcgtcattcattaggtcgtttttgcgttcattaggtcactgcaatgcgatatcagtcgttgcaatggcgcgattccaacaaccagtatcgccgttcaccgacctaatggacgatgaatcgacctaatgaacgaatgccactcccctcagtcagcttcgctgatagctcgtcctgcacttatggacgggcgaggcccgcgcatatctggttcggctgtcgcctcactttcggctgcagacagcccattgggctgtctgcctaacgcctcagcctccagaggggagccaaaaaaggatttacctcagctcgttgagcacgcgcagggcggcgttgacgtagaagttgacgaaggtgggaatggattcgtcgagacccacgaaatgcgggctatgccagtcggcgcaaccttcctggccgtttgacccgacgaacgcgaacaccggcaacgtcaccttggcgaattcgcagaagtcctcccccgccatcgactgacgtatcggttcgagctgcgcgtagtcgttgacatccgccgccacggccttggcaagacctggatcggagaccagcgggtcttggaaatcatcccagaccacatcggcgctgataccgtatgcctcggcggtgtgttccaccacttccttgaatcggcggccgaccagattgccatccgacttgtggaaatagcgcacagtcccttggaatccggcttcggcgggcaccacgttccacacatggccgccgtgcacttcggtaacggacagcaccagcgggtggaagggcgtgacgttgcggctcacgatggtctgcaggctcagaataatactggcgagcgcttcgatgggcccggtgcccttgtacgggtagccggcgtgggtgccttgggcgtggagggtcacgcggaatttcacgcagccggccatcatcggctcgacgccgatggccagctggccggacgcatagttggggttgttgtgcgtgccgataatggcttcgacgtcatccacgagtccggcgtcgatcatggcgcgagcgccttggccggtctcctcactcggctggaacagaatcttgattgagccggcgaacttgtcacggtgctcggcgagccagaaggcggcaccgagcagaccggtcatgtgcaggtcgtggccgcagccgtgcatcacgccttcattgacggagctgaactccagtccggagtcttccacgatgggcaggccgtcgatgtcggcgcgcagcccgatacgcggcccgggaccggcctcgccctgaatgagccccacaacaccagtctccagcgggttgtgcaggatctcgatgccgtgcgccttgagctggtcggtcagatagatgctggtgtcgaattcacggaaactacgctccggatgggcgtgcaggtagtggcggatggtgatgagttcgtggtcgatgtcgatatgttcactcatggttcccgattctagtagcgcgaagaatatattgcggccctcgcttcatattggcgagggccgcgatctatggggtcagtatgccttgttattgctggcgtttgagcagtcgtttggcgatggcgttggcgatgccctgcaccacctggaccagtacgatcatgatgatcacggccgtccaggtgacggtctggtcgaacttctggtagccgtaggcgatggcgaagttaccgagaccgccaccgccgatgtagccggccatggcagacatgtcaagcacgccgatgaacaggaaggcgtaggccaggatcagcggtgccagggcttcggggatgagtacggtgcggatgatggtgagcttgccggcacccatcgaacgcgcggcctcgattactcccgggtcgaccggcacgagattctgttcgaccagacgagaagtggcgaaggtgcacatgaccaccatcgggaagatggcggccacggtgccgatggacgtgccgaccacgacgatggtgagcggctgcatggctgccaggaaaatgatgaacggaatcgggcgcacgatgttgacgatgatgtcaaggatgcggtagacgaccgcgttctcgaacaggttgccggggcgggtgccatagagcaccacgccgaggatcaggccgaggaatccgccgatgacaagggtgacgagcaccatggtcagggtctggccgatggattcgaacaatagtgggcgcagcacgttccagtcgctacgcgagttggcgaggatgatcatgcgttgtctccttcatgtgcggcggcggatacagcgggcgcggtggcagtatcggccgccagtgggtcatgggcgcagtcttcggcgtaggaggcatgtccggcaactgcgtcggcgtaagccacgggctttgcggcggtgccgaagtcaatgacgtcgctattggcggcgagctcgcgcaggaattcgtccacatgccagccgggcccgttgaattcgtaggtgatggcaccgatggcggtccccttgaccgtgtcgatgccgccgtagagcaggctggattcgacgccgtatttggcgatgagttcggagatgttctgtccggatgccttgagttcgtggccatggctaccggaaacgtccttttggcggatgagcacggtgacgatgcggcccgaccattcgtggtgcaatcgctcgacccggtcttcctcgggcaggccggacagggcggtggcgatgaatcgcttggtcaccggctgctggggcgcggcgaacacgtcgtatacgtcgccggattcgaccacgcgtccggtgctcattacggccacgcggccggcaatctgctggaccacgttcatctgatgggtgataagcacaatggtgatgccgaattcctcgttcacacgcttgagcaaggccagcacttcggtggtggtttccgggtcgagcgcgctggtggcttcgtcggcgagcagaatctccggattagtggccagtgcgcgggcgatgccgacgcgctgcttctggccgccggacagctgcgaggggtatttgtttgcgtgctcactaaggcccacgaattcgagaagttcgttgacgcgacgatcctgatagtccttgcgccagtgatcgagttgcagcgggtaggcgatgttctgcgccacggttttggtggagaacaggttgaactgctggaaaatcatgccgattttctggcggatgggccgcagcttggtctcactcaaagaggtgatatcggtgccgagcacggtcacggtgccggaggtgggtcgttcgagcgcgttgataagccggaccagtgtggatttgcctgcaccggaatagccgatgatgccgaagatgtcgccgcgatcgatggtcaggctgacgtcatccacggctcgtgcgatgttcgcgccgcgtccgcgtgttttgaattccttcacgacatggtcgaaggtgatgatggggtcgctcatagtgctccctgatgctggttgttgatgtccggtcacggaagcggagcgaatcccgattgttggctcgggtactcgctccgcttggtggtaatggctatggacaggttagtcgtgcactcgtatcagccacggctcactgctgggctttggcgtccttctcaatgtcggacaggaagccttgcagctcgctggcgctgaacttgtcggcgaacaccgcggtaccgccggagttctcctgcagggcgtcgagcacatccttctgctggtagatggaaacgagcttcttgtaggtctcgttgttcacgtccgccttgcgggccacccacacgttgatgtaggggcgagcttcttcggattcggcgtcatcctggtagatggcgtccttcgggttgagaccggcgtcggccacgtagtcgttgttgatcacaccagcggcgatggtcgggtccttcagggtggtggccacctgttcggccttgagcggggtgaccttgaccttgctcttggcttcgtcgatgtcggccggagtggagaaggcggtccagtcgcccttgagcgtcacgagaccggcggccttgagcacgccgatagcgcgggcctggttggtttcgtcgttcggaatggtgacggtgtcgccctgcttcaggtccttgatgtccttgaccttggtggagtacacgccgagcgggtagatggcggtgccgccgatgggctgcaggtccttcttgttgctcacgttgtagttggccaagtagagcaggtgctggaattcgttgaggtccagctcgccggagtcaagggccgggttttcggaggtgtagtcctggaagtcgacgatgtcgacgtagatgccggccttctcggcgtcctgcttgaacttgacccattcggggttggtagcgccgaccacgccgatcttgaccgggttgcccttgctgcccttggcggacgactcgttggcaccggcaaacgcgcggtagccgaagaacgcggccacggcgataatcgccacgaccacgatggtgatgatgacgttgcggacggtgtggttcacacgcaccggctcgttattgttaggagcggccggagttgccgactgggttgctgctgtcattggatttcctctctccaaaattgatgtcgggtaacaccataacgcgcttgaaccgcgaaagtgacggaaaatggccgattgccgtataggtgtcttttatggcgcgcatgcaatggccgggattcgtgcgtttgataacccgctataggcgtgccgaacacgccggaaagcacgtcgagaggggctttgacaatggaagctatgactaccgatactgccaatgccgatatccgagccgtattcttcgatatcgatggcacgctcaccagtttcacgacccatacggtgccggattccacaatcgaggcgattcaccggctgcaggccgcaggcgtcaaggtgctgatttgcacgggccgcgcgccttcacagatgcacgtggtgctggataccatgccggtgacgttcgatggcgtggtggcgttcaatgggcagtattgctttgatgacaccggcttctttgcctcgcaggccttggatactgctgatattgaggtgattctcgactggctggaccgtcaccccgatgtggtgtgcaatttcggcgagaaggattacgtgtacttcaaccagtccaatgatctgcttcgcgccacgtggagcaaactgggcaaaaccgcaccgacccggtattttgaggacccgcgcacccgcgcgctggatcatgagactttccagatcagtccctttgtcggacccgagttggaggccgaactggtgggactgtgcagcaatgtgcgcggggtgcgttggcatccggatttcacggatctgattccggccgatggcggcaagccgcgcggcatccagcggttcatggcgcattacggcatcacgcgcgggcagaccatggccttcggcgatggcggcaatgacacggatatgctcgcctacgccggcatcggggtcgcgatgggcaatgcgaccgccgagccaaaggccgccgccgattacatcaccgacgacgtggaccacgacggtgtgcgcaatgccctactgcatttcggggtgctacgcgattattgatgccgtagcgcctcgaccgggtcgagctttgccgcgcgcctagctggatagtagccgaaaatcacgccgacagcgatgcagatgcccactgccagtccgatggactgcacggaaactgctggcgcgatactcatgccaccggcgatgccggacaccaatccagcggcgcccaacgacagcaagtagccgatcaacgtgccgataagacctccaagcactgtgattgcaatggattcggcgaggaactgcgcggtcacgtcacgccgagtggcacccaatgcccggcgcaggccaatttcgcggatgcgttcggtaacgttggtgagcatcatgttcataatgccgatgccgcccaccagcaacgagaccccggccaccgaacccgccagcacctggaatgcgctcatgaagctggaaagctggtcgatggaggattgggcgcttacgaccgacagattctggtcgatctgttcggttgggatacgcatgatgcgagcgacaacggtcttcgtctgttccgtgagctggtcgatatcaaccccgtccttggccagtccgtagatctgcatgtatcccatgttcgaggacgcaaaccgcagcgccacagtggtggcaggcatatagatattcacgctgtcgccgcccatgccgcccatcaatccagacgactcgaccacacccacaacggttgcttcattgccgtcaagcgtgacggttctgccgatggcgtcaatgtccgcgctgccgaacagcttctgcacgccctgcccgtcgagaatcaccaccattgcaccactcgttgcttcactcgatgtgaaggcccgtccacgaccaatcgtcactccggatacatcgaagaaatgctcgtcgacaccggtgatgctcgccgacaccttgtcggtggtaccgggcgcggcgattgacgaggcggcaccatagttcgtcggcgagaagtactcgtagtcggtcagttcctcgcgcatcgcagtgatctgttcgtcgtcaagggtgccgacgtccgtgtaaatcgaaatcgtgcgcgccgcgttcatacccagttcgccgaccagagagtctcgaatgccaccgatcagtgaggtcatggtaatcaccgcggcaatgccgatgacgatgccgagaatggtcagtgcgcttttgcctttgttcgccctcagtgcggagccggtttccgccagcagatcccgtgttctcatcggtacatcccttcacgcagtacgccgtcacgcatgtgcaggcatcggtcggcgcgttcggccacttcggggctgtgggtgatgagcacgatggttttgccttgctgcttgagctgttcgaacgtgtgcatcaccgcatcgccggttttggagtccaggttgccggtcggctcgtcgccgagaatcagcggcgggtcctgtaccaacgctctggcgatggccacgcgctgcatctgaccaccggagagttcattggttttgcggtcgaacagttccggactcaacgccactgattggagtgctttgatggcacgcccttcccgttcacgcaccgggcagtcggaataggccaggggcagcatcacgttgcgcagcacgctggtgcgcggcagcagattgaaggattggaacacgaagccgatgagccacccgcgcagttcggagcgttcgtcatcactcagattctgcacgtccatgccgcacaggcggtaggtgccggatgatgggcggtcgagcaggcccagcgtgttcatcagcgtggatttgccggaaccggatggtcccatgatggcgaggaactcgccttggcgcacgttcatggtgatgcctttgagcacatgggtgtaggtgtcgcctgtctcgaagatgcggttgatgttttcaacctcgatgacgttggctgtggcggtgggcacggcaatggtctcattacgccgtttgccgcgatttgcccggctcgcgtcggaacgaaacgggaacatatcagcgtgccctttcgtccgaagccgcggtttgcgaggtggaagaagcagcatcgccagtattgtcggcagccgaagcgccatcaagcatgatgacatcgcccttgctcacattgccttccacaacggctttggtgttgttcttggctttgaccgtgactcgcacccgcttgaactcatgggtttcggcgttggtctcgagcatgaccgcgctgctctccttaccctcatccacgatggcggcgagcggcaccatcaaagcgttgtcaatgctctgcatggtgattttcacactggccgtcatgcccggcttcagtttcggatcaggggcgggaatgatgagacgcacggcgtatcccacgccgccgttgccactctgcccgcctgccgaggaatcagccaactgcgacgtggtgctggcgatggtatccaccttggcatcgagcgtcagtcccggcaccgcggagaacgtgactttggcgctctggtccttggccactttagtgatatccagctcattgatgttgacattgaccttcatctgactcaggtcggcgatctgacacaatggtttaccgtctgcgccggcggaagtggatgagccatcggaggaagctccgatggcggcaccgggcaccgcgctcatggtcagcaccgtgcccgagaccggagcagtgaccgtacgcttgttggcttgggcgaccgcctcgtcataggtggcttgtgcttgctgaacggcgacctgcgcgctctccacgccgctttgtgcagcgggcagctgtccggccgcatcatcggcagcggcttggccttcctcaccatcctgattacgtgcctgacctatggtcgcattgatttggttcacctgctgctgggcggcattaaggtttgagttcgctgctcgcagagccagatcggcctgattcacgtcgctatcgagcttgtcgttgttgatggtaaacagtacgtcgccggcgttgacggttgcgccttcctgcaccttgacttcgccgatggtgccgtcgatctgcggggcgacgacggtggagttgatgggttctatggaaccggtggagctgacttggtcgacgaaatggccacgttccaccgttgccgtggataccggagacacgcccccatctgacggggtgataatcgcgtgcaccaccataaagccgataatcagtaccgccacgacggcgacggcgatgatgcgatgcaccacgcgctttttcttgcgcgtctcacgttcgcgcattaatcggttgaattcggcgacttccgcgttctccgcctcgccttgggcaagggcgtcgacacttgattccacggtgtcggtagcgtccaacggttgtatgattgcggtctgctgctgatccttctgcatgtgctctcccccatggctggctccgagcctcgcgcccggatactggttccaagcctatggaggaatggcgtggtttccatcatgcgcaggattgaattgatggggagttgtcatccttaaggattagttggggtggggaatttatgggctgttttcagtcttggctctcgccttcgcttccgcttttctctcccccagtcatgcttcgcatgacagcctcctcgtcagagggggcttatgaataagcaaagggctcgggacgaatcccgagccctttggcgttagcgaactaacaacaccgtggaggtgttatcactcgttgtcgccagcggtagcggcggtagcggtgacggcacccttcttgtcggtgttcacgccggagtacacccagtcggtgtagtccgggtggtcgtagcccttgtcgacggcgaactggaaggcctcatcacggaacttctcgagctcgtcgatcttgtcggcgtacttgtcggcgtcgatcatgcgcagggcctcagcggtcagctcgtagcggtcgatgcggttgacacgaaccatgtcgtacggggtggtggtggagccctcctcctcgtagccgtggacgttgaagttgtcgtggttcggacggtcgtagatcaggccgcgcacgtcgtgagcgtaggagtggtacgcgaacagcaccggcttgtcggcggtgaagatgtcggcgaactcctcgtcggtcagagcctcgtcgttctccttggcggactgcagggagagcaggtcggcaacgttcacaaccttgaacttgacgcccagttccttcagcttgtcggaagcagccatgatctcctgagtcgggacatcgccggcggcggcaagcacgacctcggcctcatcgttgttcttggcggtggaagcccaatcccaagcggcggcacccttctcgagctcggcacgagcctcgtccagggtcagccaggtggcagcaggctgcttgccggcgatgatggcgttgatcttgttggtggacttgtagcacttctcggcgatggccagcagcatgttcgcatcggtggcgaagtagatgccgatgacgtggtcgttgtggaagcacttgttcagcaggacggaggtgacacccgggtcctggtgggagaagccgttgtggtcctgacgccaaacgtgggaggagaccagcaggttcatggaggcaatcggcttgcgccacgggatctcgcggacggtagcctcaagccacttggcgtgctggttcagcatggagtcgatcacgtggacgaaggactcgtaggagctccagatgccgtgacgaccggtcagcaggtaggcctcgaggaagccttccatctggtgctcggacagctgctcaacgacctggccggagacgtgcatgtgctcgtcgacctcgtcggagatgtagccggcatcccactgcttgttggtgacttcgtaggaagcctgcagacggttggaagcggtctcatccggtccgaagatgcggaagtcgcgcgggttgttcttgatgatgtcgcgagtgtagacacccagacgacgggtggcctcgagctggccccagccgtggccgtactcagccacttccttgacctcgtagtcctcgaggttcggcagcttcaggtcgtcgcgaatcacaccaccgttggcgttcgggttggcaccgatacgcagctcgcccttcggcatgaaggcaaggacgtcgtccttgacagcgccgttggcgtcgaacagctcttccggcttgtaggactcgagccagttcttgaggacctcgaagtgggcctcggtgtcgcgggcggaagccagcggcacctggtgagcgcgccaagagccctcggtcttcttgccgtcgatgtacttcgggcaggtccaacccttcggggtgcggaagatcagcatcgggtagaacggacggtgcacgttgtcggtctgagcggcggccttgatgtcgcagatctcgtcccagatggtctcccacagctcggcgaagcggcggtggatggacatgtggtcctcatcatcgaagccagcgacgaactcgtagggctcgtaacccatgccgtggaagaactcgtggagctcttcgtcggagatgcgggacaggatggtcgggttggcgatcttgtagccgttgaggtgcaggatcggcagcacgataccgtcggtgcgcgggttcacgagcttgttggactgccaaccggtagccagcgggccggtctcagcctcgccgtcgccgacgatggccgggacgaacaggctcgggttgtccatgatggcaccgtaagcgtgggacagagcgtaacccagctcaccaccctcgtggatggagcccggggtctccggagcgaagtgggacggaataccgcccgggtaagagaactgacggaagaacttctgcagaccagcttcgtccttggtgatcttcgggaaggtctcagtgtaggtgccgtccaggtaggactgggaggtaccggccgggccaccgtggcccgggcccatgatgatcacggtgttctggccgtggtcagcaatgaaacggttgatgtggccgatgaggaagttcaggccaggggtagtgccccagtggcccac

SEQ ID NO: 1162 - DNA, 2971 bp, Unknown
  R81_24m  MAG No. k141_10615
agagaagcccgcaaggccagtacgagacgttcggcatccccgcaagatacggcaccggcatcgactggaacgagttccacacacgggtcgaatggcagtcgaacgactagaccgccggacacacattttggcctataacccttcaccggcgtgttgcaagaattcgattgcgtgaccatccaggttcaccttctcgcaaccggtcatcgcatatgcaaaaagggacttccctttatgggaagtccctttcagtagctattgaagctcgctagcctcaggccagggtgttcgggtcaaccggaacgcccgggttcatcgtggaggtgatggtcgccttggtcaggtaacggcccttcacggtggacggcttcagacgcttgacttcgtcggccacagccttgaagttctcgtccagagcggactcatcgaagctcatcttgccgatgaggaagctcaggttgccgttcttgtcgacacggaactcgatcttgccgcccttgatgtccttgacagccttggtgacatccatggtcacggtgccggtcttggggttcggcatcaggccacgcggaccgagcacacggcccagacggccgaccttgcccatcatgtccggagtagcaaccacggcgtcgaagtcgaggaagccgccctgaacctttgcgatcaggtcgtcatcaccgacgatgtcggcgccagcctcggtggcctcggtggccttcgggccacgggcgaacacgaggaccttggcggtcttaccagtgccgtgaggcaggttgacggtaccgcgcacgagctggtcggccttacgcgggtcgacgctcagacggaacacggcctcgacggtctggtcgaagttgtaggcaggcatgctcttgagcagagcgatggcctcgttggcggtgtagaggttgttgcgatcgacgcgctcagcggcttcgcggtacttcttggaacgctttaccatctgtccttctccttatcagtccgtaaccgtgatgcccatcgagcgagcggtgccctcgatgatcttcatgccggcctcgatatcgcgagcagacagatcttccatcttggtctcagcgatttcgcgaacctgcgccttggtgacagagccgaccttgtgggtcagcgggttctcggtacccttctcaatgccagcagccttcttcagcagagctgcagccggcggggtcttgagaacgaaggtgaaggaacgatcttcgtaaacggtgatctcgacagggatgacctgacccatcttgtcctgcgtctgggcattgtatgccttgcagaagtccatgatgttcacgccatgcgaacccagagccgggcccagcggcggggccgggttggccttgccagcctggatctggagcttgatcagcgccgagactttcttcttgggagccatattatggttcttctttctataacgcggttcgaatggtcgccgtcctcagatccgcttgcctgctatcatgctcggtcttgactcattacttatccgtgcatgctgtaggcaatcggcctgtggtcggtctcctcccgcaacttatattgctgtgctgtgctagcgggtcttccctccagacacaagctttcctattatgcaaatccacccggacaacgcaaaaagcccgaccacgatggtcgggctctgcaaagtttggggttaatccagcttctgaacctggtggaagccaagctccaccggcgtatcgcggccgaagatggacacgagcacggtgagcttttgggtggtgggctccacgtcggaaacaacggcggccatggtggcgaaaggtccatcggtgacggtgacctgatcaccaacggcgtaggagacttcgaccttgcgcttcttggcggcggcaggcttgtcgccggcggccttgagtgcctcggaagcgatcatcggagccatcattgccacgacttccttgcgggagagcggggctggatccttggtcgggccgacgaagccggtcacgccttcggtttcgcgaacgatacggcgggcgttctcatccggccacatacgaatcagcacgtagcctggaacacgcacgcgggtgatgaccttcttgcccttttcggtgtgcttctcgacttcttccatcggcacctcgacctggaagatctggtcttccatgccgaaggaggcgacgcgggactcgatattggtcttcacgcgcttctcgtagccggagtaggtgtgcagcacgtaccacttgccatcaagggaacgcagggacttggagaattcgtcaacggcctgctgaccggcatcggtttcctcggcctgctcggattcgttgacttcttcctcgtcctcatccagagaaacggtctcgttctgagtggaagcaacaggagcggattcagtcacggccggagcggcggactcaacatctgcattgtcgacggatgcgtcagattctgcggaaaggtcagcaaccggttcagccggggcagctgcctcatcggcagcagcttcggaagcctcgacaacaggctcctcagccggcacggcgtcgagatactcgagattaagatcatcactcatgagtagttattcaccttaggttgtgcggatcagccgaacacccacagcacgagcttgcccagaccgaagtccatgcccgtgacgagggccatcagcagcagcacgaagataaacacagccagagaccagaagaacagttccttggcagtaggggttatgaccttgcgaagctcgtcgatgatctgcttgataaacagaccgatacgcatgaagacattcggcttgactaccttttcgctgttgttcgtcttagccattctgtacctcgcgtcagctgcttgattattgaaaacttggcagggaaggcgggactcgaacccacaacctacggttttggagaccgttgcgctaccaattgcgccacttccctaggtgaaaatccacctcggcgtgcattccgta

SEQ ID NO: 1163 - DNA, 30449 bp, Unknown
  R81_24m  MAG No. k141_10727
caagggcgcaaccaactacgccatcggcatgtccggcgtcgacatcatcgaagccgtcctgcacgacaccaaccgcatcctgcccgtgagctccatgctcaaggacttccacggcatctccgacatctgcatgtccgtgccgaccctcctcaaccgtcagggcgtcaacaacaccatcaacaccccggtctccgacaaggagctcgccgctctgaagcgctccgccgagacgctgaaggaaaccgccgcccagttcggcttctgataaaaaatcgctgtacggagcgcctttcacaccgcacaaggttcgaactacctttgtaggccttcaccttgtgcggcacgaaaaatcgcacacgtacagcgattttttataccctgctgaatgcttccagagggagcattttttattcgtggaattcgttggaggagggggagctatagccctcgggctcaagctggaaggtggtgtgggggaccgagaccgggaagtgctcgcgcaggcaatcctgcagttgggtgaggattgtggcggcatcttccatggtgaggtctttgtcgactaccacgtgggccataagaatcggcatgtcggtggacaccgtgctggcatggaggtcatgcacggcaagcacatgcggcacgtcttccagatgctcgcgtaccttatcgagatcaagaccatccggtgtttcctccagcagcaccttgaccgcgttgtgcagcagcttgatggcgcgcggaatcatcatcagtgcgatgacggcaccggccacggcgtcgaagccattccatccggtggagatcattaccagggcagaggccaccacagacaccgagccaagtgcgtcgttcattacctcgaggaacgcggccttcatgttcatgttgtcttcgcgctgcgaggcaaggatgaagatcgagatgatatttgcgacaagacccagaatgcctacgaacagcagcaagccgatatcgtcgatttccgctttggagccgccgaacagacgcatgccggcctctaccaacgcatagatgccgacgataagcaatactacggcgcccgcggcagcggtgagcacctcaagcctggcccagccccaagtacgagtgttgttgggcttgcggcgcatcagtatggcggtgattgtggatgccaccagcacggacatatcggtgagcatatgaccggcatccaccagcagggccagtgagccggttaagacggccgacaccacttcgatgaggaagaccgaaccagtgacggtcaacgtggcaatcagcctgcgctggtgcgcggcagggtttacggatgtggatggtgcgggtgtatgggtatgggccatgtgtactccttcgctctatcgagttgaaaccgcttctcaataccatttgcgatatggtctgaatacgacgaaaccccggcgcgaggccggggtttcgtaagcagtgtgcgactatagcacgaccagcgcgattcagcgcacgctgatcagctggtggcgaacaggctataatttgcgcagtacggtgaccaccttgcccataatcgtggcatgtgtgccgtcgatgggcgagtatgcggggttgtgcggcatcagccagacatggccgttttccttgcggaaggtcttcaccgtggcctcgtcatccaacagagcggcgacgatatctccgttgacggcggaattctgttcgcgcaccaccacatagtcgccatcgcagatagcggcatccaccatggaatcaccgtggacttccagcatgaacagggtgccggagccggtcagccgttcaggcagacgcatgacgtcgtccacatgctgttcggcggtaatcggcacgccggcggcaatacggccaacgagcggtacgtcatgtgattcggcaatggcttcggcggggaattggtatatctccgccacattgctggcgctggttgcctcttcgctggcttgtgatggcttttcggcattcggggcggatcctgccatcacctcgatggcgcgacccttgttcgcgttcatgcgaatgaagcccttgtcttccaaaacttgtagctgatgcttgaccgaagacggacttttgagcccggcggcatttccgatctcccggaaagagggagcaaagccttgttcgtcgatatgcgtgcgaatggcgtccaacactttgcgctggcggtcggtcagggtggactcgtccggcttctgcttgggggagaggggaatggtgctcacgtcagggctcctttcgttatgtcaccagcataacgtgttgttcgtgtgaaatcaaacatctgttcgagcttcgacttgaccgtgtcgaacatttgtgccattataagaacagttgttcgatagaacatctgttcgagagaggtggtcgtgatgactggttcaatggtgatggccccggcccgtagcgcacgtgtagctatgcagcatgctggaacgtcccgccggaatgtgcgtgggcggattatcgcagtgatgatcgccttggcgctggcctggtgtggtttcggcgcgcttaccgctcagcgggcccaatcagatacgggtgccacgcaggtgaccagctatatcgtgcggccgggggatacgctctggtcatatgcttcggctattacacctgctggccatgatgtatcggaaacagtggatgagctgattacgctgaacaatctcgagtccggaacattgcaggccgggcagcgcattattgttccggttgagtaaatgaaacccgagcggcatggtttttccgcccgtacacgttattctggagagcatgcattgccctttttgccagaaccccgacaccaaagttattgatacgcgcattagcgatgacggtcattccatccgtcggcgtcgcgtatgcccgaaatgcaacaagcgttttaccacggtggaaaccagtatgctgctggtcactaaacgttcgggtggcgtggagccattcagcagagacaaagtgatttccggcgtacgtaaagcctgccaggggcggccggtcagagaagaggatctgaagctgctgggacagaaagtcgaagaggatcttcgctcccgaggccttgccgaagtcacctcagatgaagtgggcaaagccatcctgaaaccgttgcgtgacttggatgtggtggcgtaccttcgattcgcgagtgtgtaccagaactttgcaggtctggaggatttccaaagcgccattgatggtttgcgtgaataatatgcgaatgccgtgcaccgtgatatgcgagtgattcgcaaaccatggtgcgaaccaatcatgaagccctgcacttatgaaagagacccgtcagcgacgggtctctttcatatcaatcgaggatgagctgcgtcagctgatgacacgcatgcgaacggtgccctcgatgttgcgtagtgcttcaagcgtggcggcgctgggcttctgagccacgtcggtgaccacatagccaagttcgccttcggtggccaacgactggaaggaaacgttgatgttctcttcgccgagcacgcgattgacatgagccagcacaccaggaagattgtcgtgcagatgggcgatacggcacacgcccttgcgttcacctaggttgatctgcggtaggttcacggacaatgaggtagaacccttgaaccagtaatcctcaagacgctgagagacgaaatggccgatggattcctgagcctccaaggtggagccgccaatatgaggagtcagaatcatattgtcttcgttggccagtgaggtctcgaacggatctccgctcttcttcggctcaacggggaacacgtcgaccgccgcgccagacagatggccggaatcgaggtgctgcttcagagctcccagatcggcgacgaaaccgcgcgaaaggttaatgaaaatcgcgtcctgcttcatgtgggcgaattggtcttcgccgaagaagccggtgttcgacttgcggccatccacgtgcagggtcacggcatcggactgttccagcagttcgttgagggtatcgcaacggtgggcgttgcccagtgccagtttctcctcgatgtcgtagaacaccacgcgcatgccgagggcctcggccagtaccgacagctgggagccgatgttgccgtagccgatgatgccaagggtcttgccgcgcacttcatgcgagccggaagcggacttgtcccacaggccatgcttgatgtgatgcgtgtgtgcgggaatgcggcgcatcaagcagatgatgtcgcaaatcaccaattccaccacggaacgggtgttggagtagggggcgttgaacacggcgatgccacgcttgccggcatgtgccagatcgacctgattggtgccgatgcagaagcagccgatggcgcttagcgtaggacgcgcatccagcacgcgggctgtgacgttggtcttggagcgtacgcccaccaagtccacgccatccagcgcgtcgatgagttcgtcctcgctcagggctcccttcatggtctcgacttcgaaaccgtgatcacgcagcgatttggccgcgtcggggtgaatgttttccaataacagtgctttgggcatgcttcataccttagatgttcagggacttttcgtccgttcttgtccgaactataaccagtttctgggtcggcctggtcattgccacgtacaggtccgaggcggcgaccaggcggctcggcgcgtcatcctcgatgagaccgggctcgaccaccacgacgacatcgaactccagacccttgaccgtttcggtgccgcagacgctgatttgctcatcccattcgggctgctcgatgagccttgcgtattcggccgggtcaagaacggcggccagtttgcggcgcacggcgtcgcgcaccggggcgatgagatcatccggacagatgacggcgatgcggccggtgccgtctgccgaaacgaattgttcggcaagctgcgccgcctgctcggccgtcgtttccagcaaggacgacatgtcgggcaccacattgcgggacaccgaatcggggatggtgcgcaccgcattgaccgtggagatgtagaggccttccttctcggcaaagcgtgaggcgagttcggaaacttcctgcggattacggtagttgatggtcaactcgttcagatcccagtggctttcgccgaacaggcggttcatcgatttgctccagcgtcgggtgccacccagcgccgaggtctgcgccacatcgcccacgatggtgaacgagcgggaggggcaacggcggatcaacatacgccagtccatggcggtcagttcctgcgcttcgtcgaccacgatgtgcccgtaggtccattcacggtcggccgcggcccgctgcgcggtcagctcggcgtcgtccccgttcatctggtcgagcagcatctgactggagacgatgcctccacccagaccggtcgcggccagcgtgtctttggcatactgctcttcggcggcacgacgtgcgtcggcggcggactggcgggccaccgtcttgggatcggggcccagcatatccatcgcttcgtcgagcagcggaatatcggagcgggtcagcggggagcccttggggcgggcaagtgccgcgatgtcgttgtcggtcagccaaccagccagagacttcagacgttcgggatgggcgaacagctgatcgatgagccatggggcggtcatcggcagccagcacaggttcagggtcttgcgcacctgctcgttcatacgcagcaacgacatcgcgcggttcagctccgcctgatccggcgtgtaatcaagctgttcggcataacggttctgcatgctggtcagcatcgaacggataaaggtctcgcgggccttgttatgaggttgccgggtgcgcttcgcgtccgcctgcgcctgctcgatatcagtggccagcattggtacctgaatgccgctaatggttactgtcggcagaacagcgggaacacgcacgcgcgcggcgatggcattggccactacggaggtcatgcgtcgatcgcccttgagcttggctgcataaggggagtcgaccgccgtggcggtgatgccgggaatcagatcgctgatggtgcgtgagaccacgccggtctcgcccaaggagggcagcacctgatcgatgtagtgcaggaacgccgagctggggccaacaaccagcacgccggaacgttccagcgtgcgccggtgcgtgtacagcaggtaggcggcgcgatggagcgccacggccgtcttgccggtgccgggaccgccctgcaccaccacggcacgattcatgtcggagcggatgatgcggtcctgctcggcctgaatggtggccacgatatcggtcatcttgccggtgcggcgtgagctcagcgaagccagcagcgcaccctcgccggtcaacgtgccggcggaagacgcctggccgacttggtcggaatgcacgtcgagcacctcatcctcaacgcccacgacttcgcggaaactcaaggtgatatgcctgcgcatcacgatgtcgccgtgattggagggggtcgcctcatagaaaggacgtgcggcttcggcacgccagtcggtcagaatcggctcatggtccgggctcgacaggccgatgcggccgatgtaatgacggtcgccgttcttggcgtcgagacgaccaaacaccagccgatcctcaacgctgcgcaattgcgtgaggcggttttcgtacattgtggcaaaggagtctcgttcgctgcgttgcgtgggggatccgtgggagccggcggcgcgtacggtgtccaggcgttgccacatttcggctcgcagatcatccaatcgtccataggcgcgatcgacggcctgctgctcctcatgcagctgggaggcgtaactcgacatgctgttctcttcgttccatttccgtggggcagaaaaaacttaaggcattcaaatttaccgcacaccccctacgtcagtgatgcggacaacccggaataggtgaattcagcgtgaattcgccatgctgctcggtcggtggagtgcgcaacgtggattggatgtgcggagcgcccattcgtgcgacagtcgtggccgacacgcgcaatccatcggtaattgccctaaaagggtgagcaaatcgtgcatgagtggggagaaatggggaatcgtggggtagagtggtgaaccagttggccgaagtgtatcccacgtaacgatgaaggaggtggagccatggttgccgatcagacgattcgcgacgctgatgccaacgcacaaggctccaccactatggctgatctcatggctggtctgccgccgctgcttctcggcacatatacgccgaagatcgacgccaaaggccgtatggcgctcccggccaaattccgctcccagctggggcagggcctggtcatggcccgaggccaggaacggtgcgtgtacctgctgccgttcgatgaatttcgccgtatcgcctcgcagattcagcgtgtgtcggtgggaaacaaagccgcccgcgaatacctgcgtgtgttcctttccggtgccgtcgatcagcagccggacaagcagggccgcgtgctggtgccgcagatgctgcgcgattacgccaatctgggttccgacgtcgtggtgatcggcgttggcacccgtgccgaactgtggaataaggacacgtgggagtcctacctcgccgagaaggaagagggatattccgatattgctgacgatgtgttgccggaggtggaattctgatggttgatgtggcgaatattcatctgccggtattgctggacgattgcgtgaacctgatggcgcctgccctggaacatgagaacgccatcgcagtggattgcaccctgggccttgccggccattccatcgccttcctcaaagccgcgccgcaggctcggctcatcggcattgaccgtgacagtgaagcgctggggctggccaccgaacgcatggaacgggaggggctcgccgatcgattcatcccggtgcatgccgccttcgatcagctcgatcaggtgttgacggaccgaggcatagaacgtgtggacgccgtattcatggatctgggattatccagcctgcagatcgacgaaaccgatcgtggcttctcctattcgcatgatgcgccgctggatatgcgcatggacgtcagccagccgttgacggccgaacggattcttgccacctatgatgcggcggaactggtccgtatattcaaggaatacggtgaagaacgtttctcgcgtcagatcgcccgcgccatcgtggcacgtcgagacaaggagccgtttaccaccaccgcacagctcaaccgtctggtcgatgaagtggtgccgcaagcccaccgcccggcgggcaatcccgccaaacgcgtcttccaggcgttgcgcattgaagtcaacggcgaattggacaagctcgcctccacattgccgcaagccgcgaaccgactgcatgtcgggggacgactggtggtggagtcctatcattcgctcgaagacaaaaccgtcaaatcgttcatggcacaagggctgcgagtggatgttccggctggtctgcctgtcataccgccggatgcccaaccgtttttcacggatctcacgcgaggtgccatcaaggccggcgaacatgaaatcgcagccaacccgagatcggcttcggtgcggttgcgggcggtggaagtcagccgtgatattccgtcacgatggaggaaacgctttacgcaaaccgcgcagggcctgaatgacgtcaagatacaaggctccgcgtctccgggcagagccaaaaacacagcgcgaattcgtacaaggaggggataacggcatatggcaaccacacgtaacattcgatcgaacgcggctccggcctcgaaccgaccgcacaccaagcatcagtcctcctcccgacctgagctgcgggtggtctccaacccgcgtggagacgagcggggcaatgtcgtcggacgggtcatcgaatggaccagaacaagaagcgcaccgctggtgcacgtggccatcgcagtgatcttcctcgtcggcaccttgttcggtgcgctgatgttgcgtacccagatggtgcagaactcgtttgaggcggcacagatcgaaaccaatatcaacagacttacccaagatgtcgaagacgatcaggccaaactcgatcaattagtcgcgaacctgcccgacaaggccagcgacatgggcatggtcccgcagcaaggatcagtgtccatcgacttaagcggataccagtccaacaaaggcggaacccagtgaacaccattcgtcgcatcgtagagttcgccaaggtcaagaccttcgcgttcaaatgcattgccatcggcgccgcattggcgttggtggcgtcggcatgcgtgattcagctggcctccacccagctcatcggcggccgtcaaaccgcacaagcggccacggctaaccgcaccctgaccgtgacgttgagcgccaagcgtgggcgtatcctcgacgccaacggctccgtgctcgctcaaagcgtggagcgttatactatcgtcgccaatccggaggctgcacaggagttcgagccgattacttgcaatgacagcacccgtgattactgccacgaaattgacggcaaacccgtgggtgctaccggagcggcggccgtgggccgactgctggccaaagtcctggatatgaacgccatggaactgggagctgatctgtccggtaccgggcagtatgtgattctgaagaaagacgtgaccccacaggtcaagcgcagcatcgaggcgttgcacctgggcggtattgtctggggtgagctgagcagtgaaagactgtatgcggatggcgatctcatgggcgcgctgcttggcggcgtgaacgacaacggcgatggcgtcgccggcatcgagcaggtcgagaacaagacgcttaccggaaccgatggccatgaaacctaccagcgtggtaatggcggcgaagagattcccggcaccatgaccgaatcggtggcggccaaaaatggcgacgatgtcaccctgaccattgaccgtgatgtgcaatggtatgtcaaaaaggccttgaaggaggccgaatccaagtatggcgcagcgtgggcgatcgccgtggtgcaggatgtccagagcggggagattctcgcactggccgatagcgatgaagtacaggctggtaccgatgcggcgaagatgagcccgtctcgggccgtgtccgaaaccttcgagcctggttcggtgggcaaggtcatctccatgtccggctatctgcagacgggactgcataagatgagcgatcaattgtcggtcccggaccacatcacacagaagggccagacctacaaggactcattcgaccatggcactgagcgctggacgctcgccggtattctgcagaactcatcgaacgtcggcatgattatggccggggagaactatccggatgagcaacgctacgagtacctgaccaaattcggcatcggacaaccgaccggactgaacctgcccggtgaatcgagcggtctgctcaccagcccttcggcatgggatctgcgtacgcgcaacaccatcctgtttggtcagggctacgccgtcaacgccctgcagctcaacaacgtggtggccaccatcgcgaacaagggcgtcaagcagcagcagtcgatcatcagatcaaccaccgatgccaatggcaagaccactgagaccaagaagggcgaagccacccgcgtggtggatgaaaaggtcgcatcggacatgatgaatgcgatggaatcagtggcggagagctacaacaagttcgtcaaggtcgatggttaccgcatggccgccaagtccggtaccgcagaggtgcagggttcggatggcgcgctctcgtccattctctccgattattccgtggtgattcccgcggacaacccgcgctatgcggtcaccgtggtgctgaaggatccgaatggtgtgttcggcggtctgacggccggccctgtttccgcacagatttgtgagttccttatgcagaaatacgaggtgcctgtctccagtccacgaaaaaatgctattccagtcacgtggtaaggatcaggggagaaaggcgatagcccatgagtgcagtgagcgaatccatcgcccagcgggtgaccttgggaatgctggtcgaacggtacggttttgaagtcgatccacccttcgccaccaatgtcaccattacctcactcagcgatgccgtggataccgtgattcccggctcgctgttcatctgcacgcatgagcaggaacccgatgtgctgcatgccgcgcaggcaggtgcctatgcggcgttgctgccacgcgcgtccaaagggcagatcgccaatgccgatataccgttgctctacggcgattgcgacgatcgcgtactcggcgatctggccagcggcctggccggcggaccatccaacgccatggcggtgttcgcggtgaccggtgcggatgagcaggccgttgacgcaggcgtgtcccagctctccgaattcctgcacatgctgggcaatccggtggcggtaatcaccgcatccgggtccacgtcgatgacacgtaccatgaacctgaactatcctctgggcatcctcgatatgcagcgcgcgctgtccgtgtgcgccgaagacggtgtggcggccgtgatcatcgccatggatgaccgcacattggccgagcatgcgttggaatcggtgaacgtggatgtgctgggcacggaagatgtcaacgcaagcgcaagcttggacgaattgaagacacgctacgcattcgttgcggaacatgacatgtccatgacctcgtcgacacccgaatcggatgaaatggctgcggattcaccggcaatgtacgaccgcgtccgactcgggcacatgtccttggccatcgccatggtactggccgccggcgtgaggaaaaacaacatacgcagtgccctgcatgtggccaacaatctcaattaagtccgtggatgcgggacgaagcgtaatcgtaaaggagtttgaaacaccatggttccgatgagtgtggaggagatcgccaaggccgtcgatggtcgattgatcggagacgccgattccgagtctcgagccaccaatacggtcagcgactcgcggcaggccggccccggatcggtgtttgtggccatccgaggcgagcgtgtcgatgggcatgactttgtggcgaaaaccgctgaacagggagccacggtggccatcgtcgaccatgaggtggagtccgatggcctgccgcagatcgtagtgaaagacacggtcgacgcccttggcgagctcgcccgacacaacatcgttcgccgccgcgagctggacggcgacttcgacatcatcggattgaccggttcggtgggcaagaccaccaccaaggatctgctctcctccctgcttgccaccgtaggcccgaccgtggctccggtgggatcgttcaacaatgagatcggcctgccgctcactgcgttgcgggtcgatgagcacacccggttcttcgtggctgagatgggtgccagccatatcggcgaaatcgcgcgactgacccgtatcgcaccgccgaacacggcaatcgtattgaaggtcggcgtcgctcaccttggagaattcggctcccgcgaacgcatcgcacaggcgaaaagcgaaatcgtgcagggactgcttcccggaggcaccgcggtactgaacgccgatgacgaacacgtggttcccatggccggcctggccagcggcgatgtgctgtggttcggcttggggtcgtcgcaggagcccgaggtacgggccattgatgtcactgccgaccggtccgatcatgctgaattcacgttggtcgatgcggacggcaaccatacgccggtgcatctgggcattcctggacgtcacaacgtgatgaacgcgttggccgccgcaaccgtggcgatgcgttacggtatggcacccgaaacggtggcgcggattctggcctcgcagcacaccatcagccctcatcgcatggcattgtccacggtgaatcgcgaggggacttccttcacactgatcgatgattccttcaatgccaatcccgactccatgaaagccggcctgaacgggttgaaggcttggaactcaaatgacggcaaggatccgttccgcgtggcgctgctgggtgccatgctggaactcggcgccgatgagacggcattgcacacctctatcggcacgtatgcggccgaattgggcatcgacgcgatcatcgcggtcggttccgcccaagaccaacatctcgatgcactggcacaggctctggcggacggtgcccgtcagagccaatccgcgtcggtggattgcgtacacgacatcgatgcggccgaacagctggtcatcgacttggcgcgcaaccattccgacgctgtggtactgctcaagggatcgcacgcgtcaggcctgagcgctttggctgaacgctgggcaaagaactgacccgataaccaccccaagaaaccgacaagaaagagaagctgcacgtgattgctctgatcattggaatgctggtgtcgctcatcgtcaccttagtcggcaccccgctgctgattcggctggtccacaagctgcactatggccagtacatccgccaggatgggccgcagtcgcatctggtcaagcgcggcacccccacgttgggcggcgtggtcatcaacttcgcgattctgctcggttgggcatcctccgcactgtaccgatacctgcgttcgggcgacgtgccctcctggtccgcggtgctcgtactgttcgccatgctgtcgatgggtctgctgggctttatcgacgacttcgccaaggtgcgtaagaagcagaacgaaggcctatcggtgggcggcaagttcatcggccagttcatcttcgccaccatctacgcggtacttgcgctgctgattcccaccaaatcgggattccccagtgcgcaggcgggcatcagcttcatcgaacagccgttcttcaacttcgacttcgccggccgtgccgtaaccatcatcctgttcgtcatctgggtgaacttcctgatgaccgcatggaccaacgcagtgaatctgacggatgggcttgacggtctggcggcaggttcgtcgatgatcgccttcaccggttttggcatcatcgcattctgggaaagctaccacatcaagggcggcagccatggcggatattcctatgccgtgtccgatcctctcgatctgaccgtcatcgccgtatgcgcggccgtcgcctgcttcggcttcctgtggtacaactcgaaccccgcatcgattttcatgggtgataccgggtccctggccttgggcggcctgttcgcagccctgtccatcgccacgcacaccgaattcctggcggtggttctgggtggactgtacgtcatggaagccatgagcgacgtcatccaggtcgggtacttcaagatgacccacaaacgtgtattcaagatggcaccgatccaccatcatttcgaactgaagggttggaccgaaaccaaggtggtggtgcggttctggatgatcgaactcatcttcgtgctgctcgccctgacgattttctacggcgactgggtcacccgctccggcctgctgttcagctagcggaaatctgggtgggattatgctcacccacggaattcctatatcaggaggaacaatgcaagtagcggataagacagtggtgatcgctggactgggtgtgtccggcacctcgttggcggaggtattgagggaatgcggcgcccacgtgattggcgtcgacgagaggaagcccgaggccggtctccgctcctttgatgacgtggactgggaccatgtggactacgtcatgtcgtccccggtgttcaacccccgcaccccgttcgtgctggaagcccaacgccgtggcatccccgtgatgagcgaggtggaattcgcatggcagctgcgtgtgaataacgagcgcaccggtactccggctccatggatcggcatcaccggcaccaacggcaaaacctccaccaccgagatgacctcggaaatgctcaccgcctgcggactcgacgcgccgaccgccggcaatatcgcctccggagacatgagcatgagcctgtctcgttgcgccaccaatcctcagcacgacgtactgtgcgtggaactgagctccttccaattgcacttcaccgattcgctggcacttgactgcgcggcgatcaccaatatcgccgacgatcacctcgactggcatggcgggcgcgagaattacgccgccgacaaatccaaggtgttccacaacgccaaacgcgccatcgtctacaatgcgcaggacgccaaagtcagcgaactggcggccgaggcccaaaccgccgaaggatgccgcaaggtgggattcacgctcgaggccccccaggccggtcagatcggcattgaagatggctggatcgtggacaggagcggcgtggccggcggcgcagtgggggagccggtcagactggccgccatcaccgatttcacgcatctggcagagccggacggctcactgtacccgcatctggtggccgatgcattgacggcattggcgttggtgctgggacttggcgctgatcgagataccgcgttgaaggcgcttacctcgttcaagccgggcggccatcgcatcgaaaccgtggctgaggccgcagtcgagggcggctccgttcgtttcgtggacgattccaaagccaccaacggtcatgcggcacgcgcctcgctgtccagcttcccggccaagtctgtgatctggattgccggaggtctggccaagggcagtcgattcgaggacctggtcaaggaccaggcacataccatcaaagcggccgtcatcatcggcaaagaccagcagccgatggtcgaagcgtttgccagccaagctccggacatcccggtgaccatcatcgatcccgaagacaacgataccgtcatggatcgtgccgtcgaagcctgcggcacgtatgccgccgccggcgacatcgtgcttatggctccggcctgcgcctccatggaccagttcaagtcctatgcggatcgaggcaatcgattcgccgccgcagccaagacgtggagcgaggtgcatggcctccactgatatccataagcgtaaggcatacagagcccctgacaggcccgcactcgagatcaccgactacacgggttggcgaagcttgctcaacccgctatggtgctaccacggattccgcatggccgtggtggggctgacatgcttcggcctgatcatggtgttctccagctccacggtcaccatggccgcactgggcaagtcgccgttccttcagcttctgaaccagggcgcgttttgcctgatcggcttggtgctgggcttcgtggcattgacgatgccggtgacgttctggaaacggaccggcgtgttctttgtggtgggtgcctgcctgttgcaggcgctgacctttactccgctgggtatcgacgtctacggcaacaaaggttggctgaacctcggcttcaccactatccagccggccgaattcatgaagttcgcgatgtgcatatggctgccctcgtcgttgcatgcctgcagcaagatgtaccacaagaagggaatcaaagcatatgccgcgccgttggtgttgtatgcgataggcgtggcgctggtgatgggcggcaaggacctcggcacggccatgattctggtctccatcggaggcgtggccttcctgatcgtcggattccccggcaaatggatgggaatcggcgtattgggcgcggtggttatggtcggtgcattggcggtttccagcccgaaccgcatgcgtcgtattctggccacatatggtgattgctcggccgctgacgcgcagagcgtatgctaccagtccattcacgccaagtacgccatcgcctccggaggctttctgggattgggcatcggcaattcgcgtgagaaatggaattacctgccggccgcccataacgatttcattttcgcgatcatcggcgaggagaccggattcgtcggttgcgccatcgtattgctgttcttcgcgattctcgcctggtgcatgatcgtcatcgcattgcaggtcaccgatcgttatgttgccatggtgctgatgtgcgtcaccatttggatcgtgggccaggccatggtcaacatcggcgtggtcgtgggtgtgttcccggtattgggcgtgcctatgccgttcgtctccgcaggtggctcatcaatgatcatgtgcttgacggcggccggactggttgtgggacttatgcgttctcaaccgcagataaaacagtcgcgtcagagcgcgtaagtagactcggtaatcatgaatcaaggcacaccacatatcgttcttgctggcggcggtaccgccggacatgtcaatccgctgctcgcggtcgccggagcgattcgcgacatcgaacccacggcacaggtcaccgtcatcggcactgcggtgggtttggagaaggatttggtgcctgaggccggctacgagctcgacaccatcgaaaaagtgccgttcccgcgtcgccctaacctgtacatgcttcgcttcccggcaaaatggaagcgagaaaccgccaaggtgcgctccattcttgaaacgcggcatgcagatgtcgtagccggattcggcgggtatgcttccgcccccgtctacgccaccgcacacaagatgggcattccgattgccatccatgagcagaatgcgcgtgccggcatggccaataaactgggcgctcgttgggccgatttcatcggtaccgtgtacgaaggcaccggtctcaaaccgcgtgccggagccgacgtcgagcgtgtcggtctgccgttgcgcccggccatcgcctccctgaccaaacgcatcggtgacgatcgtgccgccgtacgccgtgaatcggccgcgcagcttggcgtcgatccgaaccgtccgctggtgctggtcactggcggatcgctgggagcgcaaagcctgaaccgcgccatcgcctcctccgccgcagacctgttggcccacgcacaaatcatccacttgaccgggcgaggcaaaatcagcgaagtacgcgaactggtcacggcctcggccggcgcggacgtgcttaccggcatcggccccgaatcggccggacaaggtgactaccataccgccgaatatctggaacgaatcgatctggccttcgcctgtgccgacttggtgatttgccgcgccggagccggatcggtatccgagctggctgcactgggtctgccggccatttacgtgccgctgccaatcggcaacggcgagcagcgtttcaatgccgagccagtggtgaacgccggcggcggccttctggtcgcagacaaggacctgaccccgcagtgggtgcatgagcatgtgcccgatctgctcgccgatcacgaacgacttgccgaattcggccgcaaggcatgggaatacggcatcagaaacgctgccgaaatcatggcccggcacgttctgcaattagccgaaccatccaaatagtattcagatatcatcccgtgcgcgatacagaccaatcccgtcccgcaacacgagatacggtcataatatagggtgctggaatccccaaaggagttttgaattgtctcaagatcagcccatcgtgcttgaccccacgtatgcctcgttcgatgctgcggcccgccccgcggatctcggcgccacccatttcatcggtatcggcggcgccggtatgagcgttctggccgaaatgctgcacgccgaaggagtcgcggtggacggctccgatcgcgcacacagcgccaaaaccgaccgacttgaaacgctgggcatcaccgttgaattcgggcagcgagccgaaaatgtcgcccaggccgagaccgtggtctactccagcgccatcaaaccggacaatccggaaatcgtcgcagcacacgcggcgggcaagcgtattgtgcatcgcagtgacatccttgccctgctcatgaacggcaaacgagccgtcaccgtggccggagcgcatggcaaaaccaccaccagctccatgctgtcccacattctggtgaacgccggtgctgatccaagctacgccatcggcggctttatccaaggcccggacggcaccacgctggacggtggacacgcgggcaaaggcgatattctggtggccgaagccgacgaatcggacggcagcttcgccaaataccatccgaccatcgccattatcaccaactgtgaagccgatcatctcgaccattacggcgacgaagcccactaccgtgccgcgttcgttgcccacgccggccgggccaccggtcacgtgatcatcagtatcgacgaccccgacggacttgccgtgctggaggccatgcccgccgacgtgaaatcccataccgttgcctacggcactaccgcgcgtgaatccctgcccgatttgggcggtgccgcgtatgtctggatcgcttcggaaagcgagaccgcaggcagcggcgtcgaacagctcaccctgcatctgccggccgcggtgacggcgggggagccggtgtctcagagcgttgccctgaaggttcctggcgtgcacaatgcgcgcaatgcggccgccgccatcagcgctgccgtgctgctgggcgtgagccccgcagacgcggccaaggcggccggcacattcctcggtgcggcacgccgcttccaggtgcgcggcacggtcaagcaggtcactgtagtggacgattacgcccaccatcccaccgaaatcgcggccctgctggatgcggcccgacgccggtaccccgattcgaccattcgtgtgatcttccagccacacctgttctcccgcaccaagttcttcgcgcaccagttcgccgaatccttggccaaagccgatgacgtcattatcaccggcatcttcccggcccgtgaaaagcagaccgatttcccggacatcagcccctccaccatcgtggacgcggctgcgggactcaaggatgcttccgcaggcacgtggattcagccggtcgaggatatgtgcctggccgccaagatgatggccatgcgcgcccaccacggcgacgtgatcttcaccgtgggcgcgggcgacatcaccgacatggatcaggtgctgctcaccgcacttgaggcccatcgggaaagctgcgagtgatgtccgggcgcacggtcagatccgggggcaatgacaacggctcacgtcgttcgtccggaagtccccgcaagccgcgcaccatcggttcacgcggaaacacgggtcactcgtcgaagtctcgcgctccccggtccgtgtcttccgggcatgagatcaacgagccggagatcatcgacgatgtgacggtagccaagggccaggccggtgccttcgtcgatgcacgacggctgcacagcgaggattacgttgccgaaacgctgcaccagaccaccggctccctaggagtcgtatcacgcccgaaagtggtgaatttcaccgaacgcgccaaagaacgcaagcgtgcgaacgtacgtgtcgtcgcgttacgcgtgttgattgctgtcgtcagcgtggctgtagtgacggggctaacgtggctgctgctcttctcgtcggtgtttcgtctggaaaccagcgagatcggcgtatccggtgccaacgaatgggtgagcgcgcagaccatccatgccatcgccgataagcaggctggaaagtcgttgttcctggtctccacccatgaggtcacagagcaactcaagtccattcccggcgtcagcgaggccaaggtctccaaacagttccccaagtcgatgagcgtggaagtcaaggcgcaacggcctgcggccatgctgaaaagaggcgataccctgaccgcggtggattcccaggcgcgcgtgttgaactcggtgaagaacgccaacgtggatggtatcccggtgatcgaggtcaaggatatagacgccagtctcaagaaccgttcggtgaaggaggcgctggcgattctgggcgcattgccggaatcgatgcgtaagtccattaccaaggtcaccgctgagacgcaggattcggtgaccaccacgcttaacgacggtgaccgcgtaatcatttggggagactcctcgcaactgaagctgaagctggcggaagtcgaggaaatcgacaagaacatcaccgctggcacggctggctttgccggcaaacatcagattgatgtttccgcatcccagaagcccatcatcaagtgacggcgattcagttggttccgttggttccggggcggcgttcgctccgttggttctgctgacaacgttggtcccgtcaatgccggggcgatgttcgctgccggcgatttgcgcgagtagcgccatagggtgtatgctgaaaagtccggccgaaaagccggaagcttgataactcaagattgggggcgatcggtttcgacggtgacctgttcgctgcagggaagcgtgccgagaacgccgggtccgctcgtggatgaccccggcaaaagaataagtgctaaatctaaccgcactgagttcgctctcgctgcctgatttttagtcaggattaaccagtgagcagccgctccgttcactcctcctcgtctttgggaggatgctgagcgtcgtttagaagacttgctgatgcagttgagcctcagggctgcatcgggactttaactgcggatatgctcgccatcagttgtctgcgacatcgatgggggcagaaaaatcgccaacttggccagcagactacgcacgtagaagactgtgggctcggtcatcggaccggggttcaattccccgcgcctccaccaatccgcctcggcggaaacaagccgcttggctttacgaaagtaaggctgagcggcttttcttattcccgtcgattccctcgtattctctcggtttcacgggataatgtgggcaaaatgtgggcaaaaatcgagcccgcgaagccctctgccacaacgcgagaacggccccgaccggcaagtaggccgactcgggttgagtcgtctgcgatgccggacggggccgaactgtgcgtggtggtcatgcggcgagatcgaggcgctgtttgatggcgctgacgccgatgagcgcgccggcgaggatgccgagcgcgttgagcgtggtcactatcgcgtccacgtgagtccagccccatgcggggccgaccgtgctgacgaacagggcgagtgcgggcaggacgatgaggcccaaccatttgaggatgtcgtagacgcggctggggattgcgcggttggcttcgatccgacgacctgcggttttggagaccgccgctctaccagctgagctacgcgcataggcggtcatgccggttgattgccatggcacatgaccattgggtggatatgagtaaagcccctgaaccggttgattcagaggctttcacactaatcctgatacggagtatgccacggggcggattccccctactcccgcttgtgttttgttttttcaggcggcttggatggtgaggcgtccgccgagggcgtggattaccttggcgatggtctggaagctggggttgccgtccttgctgaggctcttgtagaggctttcgcgccccacgcccgcgtccttggcgatctgggtcatgccccgggccttggcgacgttgccgagcgcggcctgcatgagtgcggggtcgtcgtattcggctatggcgttgaggtaggcgatgatgtcctgttcgttttcgaggtattcgctggtgtcgtagtcggtgaattcggtgctcattgtcgttgttccttgtagtcgttgaggatgtcgtgggcttgtctgatgtcggtctgctgggtgcttttgtcgccgcctgcgagcagcagcatgagcacgttgccctgcatggcgaagtagacgcggtatccggccccggtgtggaaccgcatctcgctgaccgggcctcccacgggtttgatgtcgccgaatggcctgcctgcgagcttgcagacatcgagccgggcttggatggcggccttcgctttgtggtccctgagtttcttgaaccacttgcggtattcggcggattgcttgatttccatacctctattgtatcctacagactacatcatgtcaagccgaacggccgctggagcccatagccaacgcaagaatctcccgtatgttgaactcccggtagccgtcatcgacgggtctcgagctggggagtttgccccggttgagccagttgctgatccgcttgcggctgacctcgtacccgtagtttcccttgagccattggctcatgcctgccggtgtcttggtcaggtggattgattcggcctcggcttggctttgctcgcgcagctcggccacgttgacggggtcgccgcatttgcacaggcgcagcgcctcgcccttcgcggccatcacttcgcgtctgcattcggggcagacgccgattatcctgcgggtgcgcggcctgcggtcaaccttggcagagcgtccatggtgcctcgacctgctggctgccgcagtattggcatggttcggtggtgatgactgcacacgttgtactgtagggaaccatgaaagtcgtattgcaacgagtgtccgaagcgtccgtggacgtggtcaatgaattgggcacgctggatcccacgttcgagccgcagcagattggcccgggattcatgattctggtgggcgtcaccgatgaggacggcgacaagcagatcgcctggctggcccataagattctgaatctcagggtgttcgaggatgcgcagggcaagatgaaccgttcgatccaggacatcggcggcgagattctctccatctcgcagttcacgctgttcgccgacgtgcacaagggcaatcgcccgagcttcatcaaggccggcaagcccgagcatgccgatttcatgtggatcaagttcgacgaggcgttgcgctccgggggagtgccggtgaaggaaggtcgtttcggtgcgcatatgcgggtcggactggtcaatgacgggccggtgaccatcgtcatcgacaccgagcatgacatgcctgacggaacacgctgaattgcgatagtaatttgacatcatatcccgttccctccaatatgttactaaagcgctttagtcttctgcgggcgagggcgcatgtcgatatgtttcccatgaacgggcagcacaatgatgtggccgcacaagcggcagagataaggggagtgaacagcagatgttcctgaaacctgaacagcaactggagcggtgcaagcgcatagtgcgccagcgcgtggaccctcatatccacccatcgatcgcacagcttgcggtggagtcctttgacattcccggagagccgatgcccactgacgagttcttcgagaagctcaatcgaggtgacatcgacttcaagccgtttacgctcggcggtgaatggggcaccacatggggcacagtctggttccgcctgaccggtaccgtgccggccggctacccgaaaggcaagccgctggagctcatcctcgacctcggctggtacccgcactcctgcggcggccatatcgagggcctcgtctaccgtgccgacggcaccgccatcaaagccgtacacccgctcaactattgggtgccgttcatggatgctgagggcaacgcgcaagtgccggtcgccgaagacggcagcttcaccctgtacctcgaagccgccagcaacccgctgctgctcggcgtgcctccgttcattgagaccgaactgggcgaccatgccaccggcaagccggacgagccgtacgtattcaagtccgccgatctggccgaattcgatgaacgctacgagaactactccgtcgatctcgacgtggtgagctccctgatggaattcgccgacaaacagtcgccgcgctactggcaactcgccaaagcattgcagcgttcgctcaacgcctacgacgagcgcaaccccgaatccgtggaagccgcgcgcgcagcactcgccggcgtactggccaagccggccaatgcctcggccatgaacgtcagcgccatcggccacgcgcatatcgactccgcatggctgtggccggtgcgcgagacccgccgcaaggtggcccgcaccgtatccaacgcattggcgctgatggacgccgaccccgacttcaaatacgcgatgagctccgcccagcagtacgcctggctggaagaggatcatccggacatcttcaagcgcatgaagcggcgcattgaagaaggccggttcatcccggtcggcggcatgtgggtggaagccgatggcatgttgcccgccggtgagtcactgatccgccagattgcatatggccgcaaatacttcaaggaacatctcggtgtggagcccaagggcgtatggctgccggacagcttcggctacaccggcgcatggccacagatcgcccgccgtgccgggtacgaatggttcctcacgcagaagatctcgtggaacgacaccaccaagttcccgcaccactcgttcatgtgggaaggcatcgacggctcgcgcatcttcacccacttcccgccggcggatacttatgctgcttggtgcaaggttcaggaactcgactacgccgagaagaacttccaggacaaggatctctccgaccgctcgcttctgctcttcggtttcggtgatggcggtggcggccccacgcgcaacatgatggagcacctgcaccgctacgagaacctcgaagacgtctccagggtaactattgagagcccgaacgatttcttcgacaaagcccaccgacagatcgaaaagaacgccggagaggaaatgcccgtctggaagggcgagctgtacctcgaactgcatcgcggcaccttgacctcgcaacaggacatgaaacgcggctgccgccaagaggaatcgctgctgcgcacggtcgaatacctgggcgcggccgccacgttggccgacccgaactacgcctatccgcgcgaagagctggaccgtatctggaagaccctgatgctcaaccagttccatgacgtgctgccgggctcggccatcgcatgggtgcaccgcgaagcccgcgaggactatcgccgcgacctgaagcgtctcgccgaaatcgcccaagacatgtgcgccgtgctgcgcaaggccaacccgcaggccgacctgctcgccgaagcccgcatcagccagttccgcaatgacggcgcgtcttggcatgccaaccgcatcaacgaaccgaccgacgcgctttccgtactgacccagacattggacaacggccgtgtactgctggccaacggcgtactgtccgtcaccatcgaggccgacggtacgatctcgtcgctgcttgacgaggagcatggccgtgaactggttccggccggcacccgactgggccgatacgagctgttgaaggacgaacccgccgtttgggatgcgtgggagatcgaacgcgaatccctgctcatggcgaatgccatgaccggatcaatcgaatcggtcgataccgaaaacggtgcggcccgagttcgcgtgcgcaccgccgacgatgacaccgttatcaccaccaccatcacgctgcgcccgggttcgcacacgctcgatttccacgccgacattgactggcacgagcgtgaacgcttcctcaaggtcgccttgccgctgggtatcgtggccgaccaagcaacatacgactgccagtatggtctggtccgccgcccaatcgtcaaaaacaccgcatcagacgaagccaagtatgagagcagcacgaaccgtttcgccattatcggcgacgccggttacgcggcggccgtcatcaacggatcggtgtacgggtccgatgccacgccgatctccgggaacgccgccgaaggtcgtgactcgggcaccatgttccgactgtcattgctctccgcgccgaccttccccgacccgcgcaccgatatcggctcgcacgagttcgactggtccgtggtggccaacgccacggtgggccgtgcgcttgacgccgcttgcgcactcaacgcaccgacgcttcatgacatgcccgacttagcgccgctcgcctcgatcgagtcagcaaacggcaccgtggtgttggactggataaagctggccgacgatggctccggagacctgattgtgcgcgcctatgaggcggccggcggcagggccgatgccacgctgcacgtctgcccggcgctcgcaggcgcttcggtgcatgagaccaacgtgttggaaggcgacgatctggccgccgacctgccggtcgcgctgcaagacggtagacagaacgccgaaggcgccacactgcacttcggcccgttccagctcgccaccctgcgcgtcacgcgctgaattcccgcctgacgcttctgcctccttgtaccatgaggggacagaagtatgtcgtattacggtttctccaattaccatcactcccacccctaccaccagacacagcaaaggagttgaactctccatgtttcttctgcccaatcagcagttggagcgctgcgaccgcgtcatgcagcagcgcgtcaaaccgcatatccacaccacactcgccgcatgcaccttgcgttcgttccacaatcccggcgaaccggtgccctccagcgaatttctagccaaagtgcgcaacggccaagtgcccttcgaacctttccgcgttcccggcgtctggggcaccacatggggcaccacatggttcgaggtgaacggccacatcgacatggcggcggtcaaaggacgaaaagtcgaactcatggtagacctcggctggctcgatcaccgcggccccggattccaatccgagggacttgtctatcgtgccgacggcaccgccatcaaatccgcgaacccacgcaaccactggattccactcgtctatgcggacggaagcagcactgtagaactcgatgaacatggcgacttcaccgtctatatcgaagccgccgccaacccattcgtcgaaggccccaccccgttctcacccaccgaactcggcgaagaggccaccggcacctgtgatttcccatacacactgagtcgtatggacgtcaccatcttcaacgaagacgtgttcgcctactacatggatctggaaaccgtctcctcgctgattcgtgagctcaaggacgacgacccgcgctactggcagctcgccaaagcactgcaacgctccctgaacatctacgatgaacgcgacttggaaaccgtgtcggcagcccgtgcggcgctcgccggcgtactcgccgaaccggccgcctccagcgcaatcaaacacatcgccatcggccacgcgcatatcgactccgcatggctgtggccggtgcgcgagacccgccgcaaggtggcccgtaccgtatccaacgtgctggctttgatggacgaagacccggactttacgtatgcgatgagttccgcccaacagtacgcatggctggaagaggagcatcccgacctgttcgcacgaatgaagcggcgcatcgaagagggccgcttcatcccggtcggcggcatgtgggtggaatccgacaacatgattccttccggcgaatcattggtgcggcagatcacgttcggccgccgatatttcaaggagcatctcggcgtcgcgccgcgcggcgtctggctaccggacagtttcggctacaccggctcttggccgcagatcgcccgccgtgcaggattcgactggttcctcacgcagaagatctcgtggaacgacaccaccaagttcccgcaccactccttcatgtgggagggcatcgatggcacgcgtattctcacgcacttcccgccctcggatacctactgctcgtggatgagcatgcacgagctgatgtattcgcagcgcaacttcctggacaaggacctctcccgtaacgcgattctgctgtacggcttcggcgatggcggtggcggccccacccgtgagatgaccgcgcgcatccgccgcgaccatgatctcgccggcgcgccgaagatcgatttcggtactcccgaccaactgttcgatcgcgtgcgcaaggatatcgtggacgatgcgcaaggggagacaccggtgttcaagggcgaactgtaccttgaactgcaccgcgctaccctcaccgcccagcaggacatgaagcgcggctgccgccaggaggagtcgatgctgcgcgtcaccgaatacctgtgcgccgcggcccgcatcaagaacccggactatgtctatccgcgcgaagagctggaccgtatttggaaaacgctgctcctgaaccagttccacgacattctgcccggttcggccatcgcatgggtacaccgtcaggcgcggaccgaatacgcgcgtgacatcgctcggctgaacgagatcgcccttgaagccgggcgcgcgatcgcagtcgtggaacccgatgacgcaaccataaccgacgccgtaatcgccccatattcccgccaagcctgtgagacgtgggtggtacgcccggcttcgagccgagccgaagcgggaactgcatccatggctcgggtcgccgttacccatgacggcgatacgattgtgctcgacaacggccgactgcacgtgcgcattgaagccgacggcaccgtttcgtcaatcgtcgatcagcgaaccaatcgtgaactggtgcccgccggcacccgactgggccgctacgaaatgctcaaagacgaacccttccactgggacgcctgggatattcaacgcgatgcattcctcaccgccaacgcgctcagcgaggcatcgattgcaagcgtggacgaaaccgccaacggtggggtcgtcgtgcatgctgtcactcgcgcgaagggcgttgaaattcgtacgggcattgtcttaaggccgggctccgccacactggacttcaccgccgatgtggactggcatgccgtcgaacagttcctcaaagtggatatgccggtcaccgtgcaagcggtgaacgcgcaatacgaatgccaatacggtctggtcgaacgccccatcaacaagaacacgcgcagcgatgatgccaaattcgaaagctgcacgcaccgcttcgtgcgtatcgccgacgccgactatgccgtcgctgtggttaacgcctccacctacggctccgacgtcagccccatccacgccgatgcggcacatggcaccggccgcggcaccatggtgcggctctcgctgctgtccgcaccgctgtaccccgacccacgtaccgaccaaggcgcacactccttcgcgtggtctctggtcgctgacgccgatatgaatgcggtgctggacgaagcggcgcgactcaacagccccgtaataggggagttgcctgatatggcgccgctggtctcgctcgccgacgccaccggcgtcatcgtattggactggatcaagctcgccgatgacggttccagcgatctgatcgtgcgcctgtacgaggccgccggcggcaatgccacggccacactgcgccttgacgccgctctcgccgatgccaaggccagcgtgcaggaggtgaatctcatggaggagccgga

SEQ ID NO: 1164 - DNA, 4010 bp, Unknown
  R81_24m  MAG No. k141_10760
cctcattgtgacgaaggatgagtcgttgaaaatcgaaattactagagccaccaacagccagaacgccgtcaagcgtgagcagttggaatctctgtccggtttccagaggaaacttgagcagcattacggcggcatgagcaacagcttcgggaaagatgcgctggtatatcagaggcgtgaagggcaatatcggggtacggaatatcagaattcacccttgctggttactatcgcacaacaaatcaaggcatatgccgcaatgtatgtatcaaaaccacatgaggtgtccggacgatacggtgtggttctgcgcaagatgggtaaatccatcttccaagatactgattcactcgctccctactatttaagtgtgttggcgctgaagaaattcgaagcattacttgggaatggtatcgatcgccgataccgtaagtgccggtatcatgtgctgatgctgatgcgtacggtaatcgacatgcagttctccgacataaagccgaagaagcgtcgggagggaagcgacgcgatgattacggccatcctgcaggatcccacggcctctcttcgttgcttccgccatattgtcgactacatcgcgagccaagcggaagatatcgagtttgataatcgaaaatgcttcgaacgcaaagagacaacggagaaactgttgaagtctgagcgtttggccaaactcgaaaaggcgattcgcgaggattcggctatcgctggttgtgcagctcgataacggcatggcattcggctgattccccgttatagatgatgacttctgttgacggcttgcaataaggccactatgccaatggcaatctgatgtctgatggttgggtgacataccgtttgatgtgtagggcaagatgacctggcgcagatttttttcggcggcctcgctcggcaacgagcgaggccagtttattgttctcgactacccaatttctgtgtcatggtacgtaaaacttgtgttattgacgcaaaaacttgttccatccgaaatttcggagccaccgtcatctaccggccaccggttcacgtaagaaaagcggcatatgttgcacctccccgcaagggtgataatagggggagtgccggcaatgaggcaaggagcagtttatcggggatgaaacctaccctactaggggttagaaaagcccgtataacaagtactatcatcccaagctatgacatgcccccatattcaagggggtgcgaacgaaccttccagagagtgcaggagatgaaaatgactgtcggtggagggagctttagccccgaagagatcaagtacctgaagtcattgccggcggtggcggaagccacttcgaaacgcattacctacactgacgacttcaaacggtatttcttgacccgttataacaaaggtgcctcgccggtgcgattgttccgtgaggccgggctcgatcccgccctgatcgggtacaagcgcatcgaacgttgtcttgcccgctggcgcgaggcacaggatgagatcctgggtgccgaagcgtcggaacccgcccagccttggggggggggtatctcatttgaggctttatcgatcgggaaccgctggaacgtcagatacttcgaacgagtggcgcgaggcggagagtgccgcgattacggcgaaagccggcagcgaatccgatttctacgtatcccccgaacgccgcgccatcatcttccccatctcccgcaaagagcagaacaacgatctgcgtgacctgctgatcgcacagcaagtacgtcgtatcgatgagctggagcggcaggtcgatatgcttgaggctttgctgcatagcgggcgacgggggagcagggcatcatctttcttgcttctgaaacgcgaatcgggcgagcggggcttgtctgcgggcaataatgacgttgctcccgcggattcggataaggagaatcgtagcgaggatcatggtgagggccatggcgagtaatcgatcgtattggagacttgcctaacacacacgctaagatgggcatcgcaataatcggcaatgagcaggtaatcggcgaggcggtgcatggagcaggaatccaacgagcaagaacctaacgaggcgacggaaatcgtaggcggcaaagtagagaccgtcgaggtttccaagcaccccgaggcttccatacccgagaccgatttgtctctggcggatatcgagcgccgtcgttcgcatccgttgcgttgggcgctgattattcttgccgtactgtgcgccatcgttgcgccgtactggttcggccgttcgttggcggtaaataatactgactccattgtggccgtgctcgggggagtgtctccgcaaggcatcgcactggtcggttgggtgaccgtggtgattgcgtacgtcggattggcgatggcggtggtcgtctcgccgtcctggccgtggctgatcgtgttcgtgatcgggttggccggcgagcagttcatcgcgggactcagcatgctcaatctcaatttctggtattccacgtacgtggtctacggtaagcaggccggcctggcgaatgccgcgaatctgggcattatgggtgcggcgatcggcatcgccgtatatgccctgatgttcgtgggtctgctggtgattatccggaagacctcaccactgaacgtactgaccaaaagctgggcgagcttcattctgtacttcgtgattgaaaccatcgccctgctcgtggtgttgtttggcggattgctcaccactgtgtgagcgcgtgtgccccagtccggcccctgccgtatagttctcatttggcgtaatttcgcccgcggatagagagcgtttcgagcgaacctgcacgaaacaccgcgcaacgacacaataaggaggacgccgtggcactgacggctgacgagaagacccagattatcaacgagtacgcgacgcacgaaggtgacaccggttcccccgaggtccaggtggctctgctgtccaagcgtatcgccgacctgaccgagcacctcaaggagcacaagcacgaccaccactcccgtcgtggtatgcagctgatgatcggtgaccgtcgtcgcctgcttgactacctcaagcgcgtcgacatcgagcgttaccgttccctcatcgagcgtctgggtctgcgtcgataattgaagacttccgcccgagcacctaggatggtgcccgggcgttttacatatcgccagccaacggcaacaacggcaagagggttagaggataggccagcaggtaaggccgacaagagaacccgaatgaaggggttgacacgaggaacgacggccaaggggccagtcgaaacaaggtatgtgacgtccgctgaagaggacagttgcggttcaagcgagtcgccaaaccgcaacacagtatgtaggaataattagaaaattaaagaaggaggaaccctatggagggtcccgaaatcaaggccgttgaggccgtaatcgacaatggatcgtttggcaagcgcacgctgcgcttcgagaccggccgcctcgcccagcaggccgatggcgctgtggccgcctacctcgacgatgattccatgattctgtccaccaccaccgccggttccagcccgaaggagaactacgacttcttcccgctgactgtcgacgttgaagagaagatgtacgccgccggcaagatcccgggctcgttcttccgtcgtgaaggccgcccgagctccgaggccatcctcgcctgccgcatcatcgaccgcccgctgcgcccgctgttcccgcacaccttgcgcaacgaagtgcaggtcgtcgagaccgtgctcgccgtgaaccctgatgacgcttacgatgtcatcgccctgaacgccgcttccgcctccaccatgatctccggcctgccgttcgaaggcccggtctccggtgtgcgtctggcgctgatcgacggccagtgggtcgccttcccgcgttggagtgagcgtgagcgcgccgtgttcgagatcgtggtcgccggccgtgtggtcgagaacggtgacgtcgccatcgc

SEQ ID NO: 1165 - DNA, 16156 bp, Unknown
  R81_24m  MAG No. k141_11123
accacgcgatgaatcttctaccacgatgtcagcgtaattttgtattccgcggaataaagccgttttgcgtcaccacgtggtgggtagtttgctacgtcgtggggattttactacgtggtggaggtttgactatatggtgggaccatgcgaaaggccgccgctccgaatgaatcggagcggcggccttttggtacgtgctgggtactctcctcaggcgcttatgcgccagcgggagctacaggggctcactgaacctgggcgcgggcgatcttgccggtgaaggagttggcctcgtcggcatccttgacgccatccttgttccaggagaacatggcgcgcagcttcgggccgacggtctcgatgcgctcgttggagtacttctcctgcagttccttgaagtgcggggcaccggcatcctgatcgtcgatgaactccttggcgaaggagccgtcctggatgcgctgcaggtggtattccatgcgcttgcggcagtcctcgttgatgacggtgttgacgtagtcgccgtactgggcggtgtcggagcaggaccaacgagccttgttcaggccgccctcgttcatcagatcgacgagcatcttgagctcgtggcagacctcgaagtaggcgatctccggctggtagccggcgtcggtcaggacttcgaagcccatctcgacgagcttgttcacaccgcccatgagcacgttctgctcgccgaagagatcggtctcggtctcttccttgaaggtggtcttgatggcaccggcgcgcagagcaccgagggccttggcgtaggccagggtcagagcccaaccatcgccacgcggatcctgctcgacggccacgacgaccggcacgccacggccagcggcgtactcacgacgaacgatgtgacccgggcccttcggggcaaccatgaacaccgggtgatcctcagacggcttgatgtagccgtagtgaatgttgaagccatgagcgaacgcaacagcagcacccggcttgatgttgggctcgatgtcgttggcccagatggtgcgctggtactggtcgggggccaggatcatgatcacgtcggcctcggcggaagcctcggccacggacttgacctcgaggccctgctccttggcgaagtcgaccgacttggaggtcggacgcaggccgacgaccacgtcgacaccggaatcgcgcaggttcagcgcgtgggcgtggccctgggagccgtagccgatgattgcgaccttcttgccttcgagaacagaaagatcaccgtcgttctcataccagatctgtgctgccattattggcactccttttcagtagtggggtgtggcgccgctgggcgccggggtatctacggtgtgcagataagtcctgtgttgcgaggattgtgtccttcaaaccgaaatcaatcctaccgagaacgccgtcgcagccccgctggagtccacaacgtgagctaggtcactattggagtatggacagccgtgtgcagagaacgattctcgataacaactctgcacccttttgaacagaatcgcacaatcccacatatggggaaaggctgagatatcaacgatcttgcatattcggtgttcgtttgcctgcaagaaatcagcgcatagttgttattgagaatgattcgctgcgcgcaacaacacaaaaccgccgctcccgtatgggcgggaacggcggtttgctagcttaaatccccttcaggggcggcaatcactgaacctgggtacgagcgatcttgccgttgaaggactcggcctcgtccttgtctttggcctcggcgttgttccaggagaacatggcgcgcagcttcgggccgacggtctcgaggtgcgggtgagagtactcttcctgcagcttcttgaacttcggggcgccagcggcctggtcgtccatgaactccttggcgaaggagccgtcctgaatgcgcttgagctggtactgcatgcgcttcttggtctcctcggtgatgacggtggaggtgtagtcgccgtactgagcggtgtcggagcaggaccaacgagccttgttcaggccaccctcgttagccaggtcgaccagcatcttcagctcgtggaacacctcgaagtaggcgatctccggctggtagccagcctcggtcagcacgtcgaaaccgaggtcgcacaggtggttgatgccacccatgaggacatcctgctcaccgaacagatcggtctcggtctcctcggtgaaggtggtcttgatggcacctgcacgcagagcgcccagagccttggcgtaagccaggcacagcggccaggtcttgccgtccgggtcctgctcgacggcaacgacgaccgggacgccacggccagcggcgtactcacgacgaacgatgtggcccgggcccttcggggcgaccatgaacaccgggtgatcctcggacggcttgatgtagccgtagtgaatgttgaagccgtgggcgaaggccagggcagcgcccggcttcaggttcggctcaacttcttccttgtagaccttggcctggtactggtcaggcagaaggatcatcacaacgtcagcctcagagacggcctcgccaaccggcttgacctcgaggccctgctccttggcgaactcgacagacttggaggtcggacgcaggccgacgaccacgtcgacaccggagtcacgcaggttcagcgcgtgagcgtgaccctgagagccgtagcccaagatggcgaccttcttgccatcgaacacggacagatcggcgtccttctcgtaccagatagttgctgccatttttggcgctccttttatttatttggttatgggggtgaaatctttaattgttattgtgctctgatggttctgaagaaaatgtttttagttttggctttccttgtgggcttttccgatatgcaggtttagtcctgttgacccggaaaagccctgcagaggttcacttagtggaattgagatttttcacgttgtgaacttggcgatatttagttatggaggatttcacttggtaaagtcagcgtccttcgtctcacggcaggtcaggaccgacaccaggcagcacacggccatcacggcgaggtagaggcccacggagtgaacgccccaatgggagctcagccaagtggcgatggtcggcacgaacgccgcaccgacgatggcggccaggttgtagccgatgccggacccggagtagcgcacgttcgcctcgaacagttcaggcaggaacgcgccgatcgggccgaaggcgacgcccatcagggcaaagccaacgcacaggaacaccatgttggcgaggaagttcttctggccgaccagaccaccgtccagcaggaacgggaagagcgcggcgaacacgacgagtgcgcaggaggagaaggtcagcacgcgcttgcggccgatcttgtccgcgtacaggcaggacagcacgatgaacagggcgaacacgcagatggagatcatgagcatgagcaggtattcctggttggtgaagccaaggccgccgccgccttcgccctgctccttggtgccccaagcgagggaccaggtggcgagcgtgtagaacagcgtgtaggtcacggccacgaggaaggtggcctgcagcacctgacgccaagacttgcggaagacctcggtcagcggggacttgacgaccttcttctgctcctgagccatacggaagatcggggtctcctccatgtgaacgcgaaccacgaggccgacgatcaccaggatggcggacagcaggaacggcacacgccagccccaagccagcatcgcgctctggtcattgaaggattcgagcacgaagtaggtgccgttggacaggaagaagccgatcggggcaccgagctccgggaaggagccgtacagcgcgcgcttgtcttcaggcgcgttctcggtggcgaccagtgccgcgccggaccattcgccgcccaggccgatgccctggatgaagcgcagcaggcagaggatggcgactgcgccaacgccgacctgatcgtaggtgggcaggcagccaatcaggaaggtgccgacacccatggtcatcaggctgacgaccagcgtggtcttgcggcccatgcggtcaccgaagtggccgaagatcagcgagcccagcgggcgggcgatgaaggcgatggcgaaggtcagcaagctcatcagcagtgcgacggtggggttgtccttcgcggagaagaagatgtgcgggaagtagtttgccgcggcggtgccgtaggcgtagaagtcatagaattcgatggcggtaccgaccatcgatgcggcgatcacggtcttgaccgaatcgcgtaccaaggtagcggctttacctgccgcctgccctaagccagtctcttcgactgctgcagtcattgttactcctgttttgctctcgttcactctcattggcgggcgattatttcgtctcacagggaggttgttgttctgttgctgtgttgttgccgtgtactgtccgctaccgtttccgtctgcgggattctgccgtaagccttgtgagcgcaacaaaaaaagccccgcaacttgcagggccttaccgattgtgtcagcttgattggccctgccttcgttgacggggcttcaagcatcaatgccgaattagtccgccagcgaagacgggctaataattcgtgcggatacaaacgcagaagcattgaatccagtcatcgcgtggcctcctttcggtatttcctcaggccgttcgacctgaactggaatgtaaacataggtttggctgtcttgccaatccagcaagggttcacattgtggacgccacgtcgccgagacgaacgcccccgccgcggggaggaacgccgccggcggccggggagccggaccggcccgtcattgcgcggactcggcggtgagggtgacgattccggccagcagcaccatgacgatggcggacgggaagagcaggtaatagccgaagctgtgctcgaaggcgttcaccagtagcgcgccgatgatggcggcgagcgccagaccggccgagttggcgagcgcataaatgccgaggtcgtggccggctcggcgcgggtcgggcaaagagtccatcaccagttcaaggcctaacgcatcgtagacgccgaaggcgaatccggagatcagcgcgaagagcagcatgccgttttcgcgtgccgtgccggtggaccagacgccgagcccccatgccaccgccacgccgatggcatacagcaggcaggatgccgccaccactgcagtggtggcgatgttccgttcctcgatcttctcggagatcggcccagcggcccaggacgcgagcgcagcaccgatgagcgttgccacggccatgccggcgatgaggaggcccgcgggaatggtcaatggcgcggaagtgaacaccacagccttgccatacacccaaaagcgcacgagataccacagaaagaccccggtcagcccaacgcccgtcatcatgcacacgcgagcggcgaacacacgggcgaatgcaggcgcatgtgccggcggacgcaactggtcaaacacctggctcgactcgaatcgttgatgtggctgctcctggctggaaggctccttgggcagcatgatcacggtcaggatgccggaaaccgcaaacagcacggcggtgtaggcaaacggcgtgaaggagtcgaacatcacgccgagcgcacccatgcatacaccaagcgcttggccaagcatcacgccgataccgtgccagcgctcaatgcgcggacggaatttgtccggaacccgttcgctgatggcgctggccaacggcacggaaatcatcgcataggcaaactgcatgagcgcccagaagaaacacagcactacgaggcctgtgttctgccccagaaccagcgtgatcagcgcgcacagcacgccacccgccaccatccacggggtacggcggcccagaggaatacgtgtgcggtcggacagcgcggagaccaagggcatcgcgaacatggaggccaccacgccaacgaccaccagcacggccagaggcaccaccaagtcagtggcgacgggcagcggacggctggtggacggattgatggtgaccgatatggcagaagcggtgtcgtagccgaacagacgagccaccgcgttgggcatggcgatggtattcaatgctatccaaggtgcgccgaccagaatggaagcggcgaagaacccccagttgagacgggatacctgacccgtggtgggtcgctgaccattggcggcgaccatcggatcgcgcatatcgagatatgcagacgacagatcaggcgcaggggcatccacgctggccgcggcagcggcagcagccgacgaaccggcggccgccagacgcacggcctgggcctcgggctgatcggcggatgcctcgggaggacgccgacgatctttgatggccagtcgggccacggcatccttgtcttcgggactcaatgccttgtcgagatccgggcggtcgtcaatacccggtcgcacgtacggttccaacatgttgctgctctttctttgctctcatcaccggcgggaggtaccggccagctccgactgagcatgacccgcaaccccggcacatgcaaaaccgcccgagcgcactagcttcagtgcactgcgggcggtttgttttccatggacccagcttacgccggacgcactacttggagcgcgcacagcggagtggcgtttataggccaacggttagtcgatatcggcaatcggcgggttgctcagcagatcatcagtctcgtggtcaccggcggcatcggtccaggcgaggctggcgaccggagtggtgttatccgtgccgagtccgcggccgggctcgaagatgagggcggccttggtcttgccgtcggcagcgatccagcggaaggtgatggatgtgtcgccgtcggcttcgtagctgaactcgccattgaatgcaggcagttcgttgcggaacttggccagggcgttcagggccttcaccaccgggcgctcgaggttttcgtcgatttcggcggtggagtagtaatggcgattgatgtcacggccgttgttggtcttgcgcagcagttccatgtcgttgcggccggcgagcgcgcccacgtagtagacctgcggcactccgggcaggaagaactggactgcgcgggcggccagatagtgctggtcgttgcagccgagcgcggagtagtacgtgctgttgacctgatagaggtcgaggttgctggcggcggcaccggtggcggcctgggattcgccgtgggtgttggcgtggatggtgttgaccagattatcgacgtcctcgtcgggcacgaggcccttgaggctgcggtcgagctgatcggagccgatgtcgatcacgccgatgccgtcgtgcgtatcgagcacggtgacggcgttgttcgggcggatttcggtccagtggaccacgggttccacgtgaccggtgaacagcgagtgcaggagcagcggaggcagggcgaagtcgtagacgcggtccaccttggaggcgatttcaacctgcttcttgtagtagctatgcacctcaatgagaatttcgaggcctcgcttgacgccttcctcgcgtaggcgtgagatgagcttaaaggtcttgggggtcatgaagcagctggtgccggcctccttggcgccgtagcccacggcgtcgagacggatgtagctgacgtgggatgcggccatctgatcgaagatggacatgaggtattcccagcccttgtcggaatcggtgtcaatatcaacctgctgcggagtgaagctgacccagaccaggcgggtcttgccggcgaacttgtagtgggtgaacggcaggcccgggcgcgggcggtagatgccggccagttcctcttcggtggcgccgttcgggaagacggagctcatggtcagaaacatcgggtaatactcggattcctcacctttttcaagcacgtcttggaactgcttggattcccagctcatgtggttgacgatggcatcgaccatgatgccgtgggtcttggaaagttcagcgacgtcgtcccagctgccgagacgcgggtcgactttggtgtggtcgatcgggtcaaagcctgcatccgcaccatcgaacggagtgaagaacggcaggatatgcacgccgtcatacacgccgtcgaagcgggtgcgcaggatgtcggtcatcgagctaagagtgccatcgccgagacgatcggcgtaagcgatgagctgcactttgtttttcatgggacctcccttggttcatggatgcaggtgcaatgtgtacgcgtctgcctgtttgttgtttacgtatttgcatactcacgtatgcatcgaaccggttcgatattacctcgagaggggagtcaatgtccagtcacacagcggaacgcgcgtgtcgaaccggttcgatgcggtgttctatgcagcccagcctgtccgatccccactcagcgttccaacgcgcagcatcaacgcgtggtatcgcctggcaccagcgtcatgggaataagcacgttcggctcgaacggcttggggatgttcctgcgtgaagcgttagccgcagccacttcctcattggcaatagcctgcacgatatggtcggccgccgactgtgcgatcgccgagaaatcctgcgcgaccgcggtcagcttcatgccagccaaatcagtcaaatacgtaccatcgtaggcaacgatctgcagctcgtcaggaatggaaattccgcggctcaacgcttcgcgcacgcagaacgacgcaccaatgtcggaactgaccacggcatcgacgccgtcggtcgccaccttgtcgagcgcattgctgaccgcacgatgacagccggcaaaatccatcacttcgccagcttcaacatactcgtatttcacgcctgcggaggtcaattcctgttccaacgtgaggtaatagcgcaccgtcgggaacgtggtctttcccaaatcgaacgatccttcctcgacttctccgcgcgcagccaaatcgaagaattgatctcgcggaccgccaatcatcaccacatgtttggcaccattgcggatcagcatctgcgcaatcaatcgcccaccctgctcgtggtcggatccaatcgacgaaataccgtctccaagcacacggtcaaacgcgacgatcgggcgatgaatcgacgtccaataatcgccgggatgcgaagtgtgcgcacacatgacgatgccgtccatcatgtgccgacgcaacatgtcgacatactggatttcgccatccgtctcatctgcggtagagcacagcatagtgcgtaatccttgcgcggcgagcgcatgctgcagatgtgcggtaaacgttgcaaagaacgggtggcggatggtgggcacgatgacgccgaccagattcgtacgatcatgatacagattgcgggcaagctcgttcggcacataattgagcagttgcatggctttgcgcacacgttcgcgcatgtcatcagacacgtacccgttgccgttcaccaccagcgagacggtgctcagagacaccccggccttcttcgccacatcgcgcatgccgaccatgatcgcaccttccccgtcatcactgttctatcgttgtatgctcacgtgcttaccacgaaatattacattcatttacattctctcgaacctgttcgacagtccggtgtgtatatcgcttgacggggacacccctaactttatttccatcatgtgattttcatgatgcccccttgaaatcacattcatgggccacttttgcgctgcattcgatactgcatcgatggaagatacatcatgcacaacatcttgcaaaacatcacaattacgtacaacgaaagaaacggcgcaaagcttgcgatatccacgctcactttgcgccgtcttcttgtattgataatggcctacattgcgatcatcgcgatcagtcagtcggaacgtcaccagactgtgtgtggtcaaagaccggcttgttgtctttgtcaaaggtgtagacgccgatattcgcagaactcggatcattgttcttgttgaacggtccaatgccggtctggccctgatactggatatccttgccatccttcagcagggcgaggcaggccttgtaggaatcgcacttctcgccgccgtcagcaccggagacggccgccatgttggcttgaatggtcttgccgtcagcgctgccgcccttctgcgcggcgagggctgcgaggatgatgccgtcgtatgtttcagcgccataggtggtggtgtttttcagatccacaccggtggattcaagacgcttgacgaagtcgtcggacgggttgacgccaggaatggtgcctttcgagccttccagcaggcctgcgtcgagttcgctcgaatagtcggaggtgttgccatccacgaagtacagtttcttggtgtcaaccccggcggaagcgagcgctttgagcaacggcttggtctggtcgaaggcgatgacgagcgtcgcgtcggggttggacgccttgatggcggtggcgattgaggagaagttcgtctcggtcggatcgaaggtgtccttttcgccgtagacgatgtcgacgcccgccgcggaagcggttttgacgactgtgtcgcgcagaccggtgccgtattcgtcgttgaagaccgcgatggcaagcttctgcacgccatcctgggcgatcagattacccataaccgcaccctgcacagtatcaggagcgaccgtgcggaagaagtagtcggacagaccggagaagccggccgaagtggcacccatcgacagcatcggaatgttctgcgaagtaatggacttgtatgtgttcttcaccacggagctggaagcggggccaataatgaacgacggattcttgctcaacaccgactgagccgcggacgtgttctggtcggcatggtcggcgtcggacgtatcggcgtccacggtggtgaccttgctgtcaagtacgccaccggcgtcattgatgtctttgactgccagcttttcggcggccagttcaggcggtgccagataggccagggatcctgtttccggccacagaccgccaagcacgaacttggtggttttggcaccggaatcggatgtgtcggagctggagcttccggagccggagccagaaccacagccggcgagcgccatgaccgcggcggccactactgcggtggcggtgatggacagctttttcatgcccttcatgtttgtcttcttcatatgaatcaccatttcctctcttggctccgctgattgccgaacccttggtgacgattgccgagataggttgctcgaacatcttgaggtgcactataggctgtgaggaaaccgaacgtgtatgcgtgaagttaaccggagatgaagtatgaaaactgttggaaacacaaggatttgtgtcatttttcaggcatggcgaaaccgccggcgggggtattccgccccaccggcggaaacttgattcagagccagaaattccggctcgtagggggtcgcgtaacgtgtacggagaccgacatccgagttctaaggcactctaaagcacacgaaggcgcttcgagcggagaggatgacgggccttatacgctccgctctgcgatttaccggggctacctgccctcttcctggacctcctcttccagattgcccaagtacaaggagacaaccttcggatcattcatcaaatcacggcccttgccggagtaggcgttgcgaccttggtcgagcacatagccacggtcgcagatctgcaggcaacggcgggcgttctgttcgacaataaccacggagacgccggccttgttgacctggcgcacgcggatgaaggtttcgtcctgaagcattggcgacaggcccgcggaaggctcgtccagcaggaggactgacggcttcatcatcagggcccgggccatggccaccatctggcgttcgcctccggaaagctggccggcaagctggttcttgcgctgaccgagcttggggaagatggagcatacgtagtcgaaccgctcctcgaacagcttcggcgcctggaaagcgcccatatgcatgttttccgcgatggtcaggctggggaagacgttttcagtctgcggcacgaagccaacgcctcgggacacgagcttgtcggcacgcagattggtgatgtcctcgcccttgagcagaagcttgccggaatgaatatgcaccaggccgaacagcgacttcagcagcgtggacttgccggcaccattcgggccaataatgccgacgatctcaccctcatgaagcgtgagggacgcgccattgagaatattcacgccgggaaggtagccggccaccaaatccaccgcgtcaagcagtggctcaccttccggctcacccacatgaatctgcgcgcgggtcagcggcttgtctccgccaccttggatgtccgattcaccagaatcggacacatggggtaccgagaccgcaccagacactccagccgcacttgccacacttgcgttgtcgctcatttcaggcctccttcaaatcttccagcacggagtcgtcacccaagtcgatattcgcatgggctcccagatacgcgtcgatcacggccggatcgttcatcacgctcttcggctgaccttcggccacgatcttgccttcagccataacagtcacccaatcggcgatatgacgcaccatgttgatgtcatgctccacaaacagcaccgtggtgccctcttcacgcaacgccataatgtggtcgagcaatgactgcttcagcgcaggattcacacccgccatcggctcatccagcatgaccaactgcgggtcggacatcaacgcacgcgccatttccaataacttgcgctgaccaccagaaagcgcacccgcataatcatccttctttttgatcagcagaaaacgttccagcaatgcttccgccttctcaatattcgctttctcctgcttcttccacatgccggggaacagcgcgcggaacataccttcaccaggctgcacgggagcgccgagcagcatgttgtcaagcacggtcaaccggctcatcaccttggtcaactggaaggtgcggaccatgcccatgcgcgccaccttttcaggctgcacgtgggccatgtccttgccgtcgaactgccaagtgccggtgttcggcatatcgaaaccagtcatcagattgaagaacgtggttttgccggcgccgttcggtccgatcaacgcagtgatgccatgcctttcgatttcgaaatggctcacgtccacggcggtcatgccgccgaacttgcgggtcacgtcatcggcgatcagaatcggatcgggcttgtgcacacccggcttgttctccacaaatttcaaatcctcggtgactttgtcacggtaggccgtggaaatgagggtctcgccttccggcgctttggtggcccatttggtcaggtcatggaacggcactcccggctgcacgccagatggctgctgcgcgccggtggtcggggtattcgttgtatcaggcatggaaagccaactcctttcggtcgcccaacaggccttggggtctgaatatcaccagacacatcagcgccacgccgacgatcacccagccgagggcttcgatctgattggaggagatcagggtttcgggaacggtgttgcgcataacctccttgacgaaggtgagcagcacccacagcacgcaggagccgagcacaggaccgagaatcgtggccgcgccgcccagcagcagaatcgtccacacgtagaaggtgacggtacggccgagcgaatcgggctgtacggagcgcggcaggacgaagatgatgccggccatcgcaccgaacaatccgcccaaaatcagcgattccatcttgtatttcgtaaccggcttgccaagcgaacgaatcgcattctcatcctcacgaatgcccttaagcatacggccccacggcgagtggaaccatcgccagcacaggaacgcagcgatcgcaaccaaaatccaagccacgatacgcagccaccaggaattcgcgatgttgttgctgtacgtccacagcaggaacgtggtcgagccgtcgggcagtggggaaagcgcttcgaacttttcagtgaaatcctgcggcgagatgcccgcggaaccgccggtgaagttcgtcatggctgtggaacggccgacgatgcggatgatttccgcggccgccaacgtgaccatggccagatagtcgggcccaagcttcagcgtcggaatgccgagcagcagcgcgtagatgacggcgagcgcgagcgccgcacagaccgaggcgaacaggttgcagcccatcgactgcgtgatggcgaatccgtaggcgccgaggagcatgaagcccgcctggcccatgttcatcaggccggtcatgccgaagtgaatgttcaaaccgatggcggcgagaacgtatgccgccgtggtgggggcgatcagctcgcccgccgcgttggagatgattgtcatgaagtccatgaatcagcccaccctttgctgcttgccgaagatgccctgcgggcgcaccagcagaacgatgatgaggattgccagcgcgctggcgtaacgcatgtcgttggggatgacgagcgagctcatatccgccacgatgccgatgaccaacgagccgatgagagcgccgttggcggtgccgaggccgccaagcgtcaccgcggcgaacatcagcaggatcagggtcgcaccggtgttccaagagatgccgttgaggtatacgccgaggagcacgccggatagggcggccatggcgcacgagagaatccataccacgcggaccacctgatccacgttgatgccggacgctgcggccagtgccgcgttgtcggaaacggctcgcgtggcgcggccgagccgcgtcttgtagaggaacagtgtgacgcccacgatcacgcagatggcgatgagcgcggacagcagcgtcggcatgtccgtggtgatcgggccgatttggaagctgttcggcacggatttgacgatacccttaatgtcaccgccgaagaagaactggaacgtgtactgcaacgccatggacaggccgatggtcacgatcatctgttgcatggtgccgacgtggcggcggcgcagcggaccccatacgatctcgttttggatgaagccggtcagcgcgccgatgatcacggcgaagatggcggaagccacgagcggcatgtgcagcatctgcgtgcccacgaaggccatcaggccgccgagcgtgacctgttctccatgggagaaggactgcagtccggtagtgccatacacgaggttcatacccacggacatcaggcccagcatcagaccgaagataatgccggaatacagttgctgccagatacgtttgccgatattggagccaccttttttggctgacgatgctgcggcgtccgccgatccggctgcatccgccgtcccctgcttgctgtccgccgattcggccgcgccgttgccagcggtatcgtcggcctgatcgaagcggatgacgccgcgctgcttgtcgaagctggctttcttgatggtgaccgtcgcactgctcgacttcaggccatgctctttcgcaacggcatcgtcaatcgtgacggtgtagtcgccatcatcggcaacggaaaacgcccacttgccatcggctgcggttgtggtctccgccgtagccttgccggacaacttgacggtggcgccggcgatcggctgtttgccggcatcctgcagaatgccgttgacacaaccgttgtcggatgtcggattgcattcatccacggcttgagcggtgccggctgcggacgcaatggcgggagggagtacgaaaagcatcgagagaacggcaaaaatcgaacatagcattgcgattcccggtcgacgatgccgtgtgaaatacgttacggctgtcattggtttttcctctcttattgttttcacaacgtaggagaggaaacagcttgcgcggttgcgctcagatttctttcacgttactcagcgaccgtccgtgtaacgtgaaaattacgccggattggcaagcagcgcaatgccgaaaccggcggccacgcaaatgagaggcaccgcgacggttgctattccatagcccagagccagcgtaaaacgacgctggcgaatcaatgaaaccacttcgttgagcgccgtggagaatgttgagaaaccaccgagaaatccgacaacgaa

SEQ ID NO: 1166 - DNA, 22545 bp, Unknown
  R81_24m  MAG No. k141_11431
ataacgctttttttgcagcgtcgcatacgaaaagagaagagtcatggccacaatcaaaacaacaaacagaccgaaggtctccgacatcgcccaagcggcgggagtatcccccgctaccgtgtccaaggtcatcaacggccgtgatggagtctccgacgagacccgcgatagggtggaactgctcctcgaagaagccggattccgcaaaaaacttcccacaacaaaaaccatacggtcaatcgaactggtcgtcagcgaaatgaccaacaacggcaccgtggaaatggtcaaggagacagcttcatacgccagagattttggcctcggcatcaccgtaagctgcgccggaccggattccggagaatacgcaacaagaaacgaggccagcagctgcctccgtaacgccctcgaacgcaacccactaggcgtcatacttctcttatcgaatatctcatcggccgaggaatcgctgctgcagacgaggaacatcccatatgtgattgtcgatccggtcggccaggtctccgctgacgcattgggagtgggcattgataactggaccgggggaatgctcgccacgcaatatttcatatcattggggcatcgacgaatcgccgtcatcactggccctactaattcacagtcctcgcaggcgcgactgagcggatacatggcggcgctgcagaaaaacggcatcagcgcggatccgcatctcatcaaggttggcgactacgtgtctgacaaggcatacaaggcggcatgcgatctcctggaaatgagggagcaggaccgaccgaccgccatcttcgcgttcaacgatctcggcgcgatcaacgtctatcgcgccgcccgacagcacggcatcagtctgcccgaacaattatcgatcatcggtttcgacgatgtctatcctgcggcaagcatgtgtccatccctgacgaccatcaggcagccattcgacctcatcgccagacaatgcatcaacctgattctcgaagcgcgggaaggaaaggtggaacagaattacttcatttttcccacgcagcttgtcgaacgcgaaagctgcgtatcgccagcacgtccgtaactcagcaacggaacacagaatcagcttccacgaagcacccatgcatatgcaatccgtctctggcacaagcatttacttctgtttaccagatgaaaatacaatatcgtgcgattacggggggcgcagccctagcctcagctggaggtcaggaaggtttcgttgcctcgggtgaagtcgaggacggcaccggcgagttggacctcgtctgccagttcggggtcggcagccagaagctgctcggcacgggtgcgggcgtcggcgatcatgtcggcgtccttgaccacgcgcaggagcttcaggctggacttgccgccggattgggcgtcgccgagcacatcgccggcaccgcggaattccaagtcggcttgggcgatttcggcaccgtcgagcgagcggtgaatcacttcgagccgttgctcggccggggagccgggttccgcacgggaaataaggaacgcccacgagttggtgccgccacgccccacgcggccgcgcagctgatgcaactgagagaggccgtatcggtcggcatcaaagatcacgatgcagctggcctgtttcacatccacaccgacttcgatcaccgtggtggacaccagaatcggagtctcgccgccggcaaaatcggccatgacctgggttttgacgtcatccttgtcgcggccggtcagagtcgcaaaccgaatgccttggaattgcgggagtttctgcaaccggtcggcgatttcggccaccgcatgcaatggcgggcgagccacggtttcgccgttctcgtcgaaggtttcgtagggatcgtcgatgccgatggcgtcggccgccgcacgcgttgcacggccgcccgcagctgtgcgggcactggaaccagatgctgcggcgcgtccgcgggcagaaccggctgctgccgaaacgccggaaccgccttcgttcccctcatcatccgcatcaatgcgcgggcacacgatataggcccgctcccccgcgtcgactcgcgcgcgaatgtgcgcgaacatacggcccatggtggcggcgtcggcctcattgaccaccacggtgcgaatcggtttgcggccgccaggcaattcggtgagccaggaaatatcgagatcgccaaaccaagtcatggcggcagtgcgcgggatgggcgtggcggtcatcaccaatagatgcggcgtggtgccgtcatcggttttggcgttgagactttcgcgctgttccacaccgaaccggtgctgctcgtcgattaccaccaaggccaagtgcggggcttggaaggtcttggaaaacgccgcgtgcgtggccacgataatgcccggctcgccactggacgccgcagcaagtgctttacgtcgcgcagcaagcttcatgccgcccgtcaacaacgtgactggaatcgctggcttgagttgctccaccatccggccaatggtttcggcatgctgctcggccagcacctgagtcggggcaacaagcacggcctgatagccggcgtctacggcttggagcatggcagcgagcgccactacggttttgccggagcccacctcgccttgcagcagacgctgcattggccagtcatgagccaaatcggcggcaatatcatgaataacctgctgctgccctgcagtgagggagaacggcagggatgcgatgaactgatcgcgcagactgtcggttaccaacgggcaagagtgagccgcggatttatgggcgtgcgacctggctttaagcagcgaggtctgcgaaacgaaagcctcctcatagcgcagggtttcgatggcctccttgaaccgggtcgtggaggccggatcatgaatggccaggaacgcctcagcccgatgcatgaggttcttggccttgcgcaccgattcgggcagcacatctgggatggattgggagagcgcctcagcaccggattcggcggtcgtgccggaattctcttccccgttttggacggcgatggtgtcggtcgtgggagccacaatgccggctgacccagcgccagcgagttgcccgtcaggcgtggatgacgtgcgggcccccatcatccacagcaatcccagaatcgtctcatgaatatgttcggacgagatacgcgaactggcgtgatataccgggcggggccggcagacgcgggtaagcgcctcttgcacggtatcggcgtcgtatttcagcgcggccccggaagaggcagccgcggccggcggatacgcggactgcacactggcatacggatcggtacttcccgcaaacgcaccattgccggatgccgcaccccgagcgtaaccctcaagccccgctcctgctccggccgacccgggcgcgacagtgaggatttcggggtgcgtgaattgcagctgccccatgtattcgctgggcataccggagaccaccacagacgtgccggcgcgcagccgcatgctgacccaatccacatacgatttacgatacgaaaagaacgtaagccgggccgtgctgccgggtacgcgacgagaccgggcgaagtcggcgtcgtcaaccgtcgcctcgagtcggtagccgcggcgagcgttcatcggcaccacgcgcatgtctcgtatcacggcggcaaatgccatctgctggccgggtgcggcctcgcggatggcgcgaagcggcaccggttcggtgacgcggaagggatagtaggtcagggcgtcgccgacagtgacgattcccagcgatttgagcgcggacacgcgacgcttgttggtgaccagcgaagcgagagtggtgtccatagtgatgctcatattggcctattctattcgcacggcctctttaggccgcagaaacaacaaaacccgctgagccgaagctcaaacgggttttgctccacgttagtacgcgattcacgcggccacgcgctgaaccttgccggccttgaggcacttgacgcacacgcgcaggcgagtgttctcgccatcaatcgtggtgcgcacagactgcaggttcgggcggaagctacgcttggtacgacggtgcgaatgggaaacggtgaaaccggtctgcggtcccttgccgcacactgcgcaacgagctgccatgatggactcccttaaccttgatgtgtcaagtctttcacgcattcgaccgccggtttcacccgacatgccgaacacacaacttcacaaatatatagcccaataccgacaaccgcaactcttgcgtgtatcatgggcgaacttcggcggttcacgcgcggttcgagcgtaacttgcgagtgggccatcagcggttcgcgagcggttcggcattggttcgccagcggtccgcaagtagttcgccagcagttcgccagcggttcgccagcggcgaattacgctgcaaatcgtagcgtttacccgataaaacacgccggactgcctattccgcatccaacaaactctcatataatctcggtataagagacggcaagggacgaaggggtcctcgtgcaacttacgacgaaggaggctgtcatgttgaatctcaggcgaggtatcggcactcacgagcccagcgtgatttcactgggtcaagtctgggtggacattatgctcaatgtggacgaggtgccggcacagggcggattcgccgtggccgatcatccgaagccctccattggcggcagctatcgcgtgctgcaggcggccagccgcatgggcgtgccgaccgagcacgccggcattctgggcaacggcctgtgggcgcatttcatccgccagtcattccaggacaacggcattacgcatatcggccaggatcgtcttgatgaggattccggtttccgcgtggtgctgagctccggcgcgccgaagaagacgttcatcgcttcctatggcgccgaggctcatggcgacgcggacacgttcaacacgctagagccgcagcccaaagacgtggtgcacatcagcggcaacacactgatggaccatacggccaccggcgtggacggattcctactcaaggccggtaccgacccggctacacgcgactacacgctggtgatcaatcccaccaatacgttgcgtctggtcaacgaccacatgctcgaggatctggtgcttgcgcgcccggtctggtcctgcaaccgtcaggaggccatgacgctggccgagcgcctgggcgcgccgatcgacgacagcaaggtcaccatcggcggtggactcgacgacttcatgcaccagttgtgtgacggcttgggcactacactgcgcgcgccgctggtggtgcgtgtcggcgcccgcggcgcttggattcgtgagccaggtggcgagacgattcatatcgagggatacccgaccaaggccgtacacacccgttcggcgggcggttgccacaccggcgtgatgtgcgcgatgctggcaaagggccatagtctggccgaatcggtaaagatcgccaacgcggcggcatccatcgccatccagcgcagcctcaacggcgtgccgcaatgccccgattacgacgaggccatcgcgctgatcggcgaatagtttccggacgattgagtggatttcctcatctgggggaatccacgatcggctcccttcagtccgcttcgcggccagctcccctcagcgaggggagctatttttttgctctggctccccttagaaaggggcccggcattattcacccgccgttcaactttggcggttttctaccctagtccgcgcttctacgatagattgagttgaatactgtcgaggagtgcatatgactgatcccgcaaatgtccacgaaccggtgccgcaaagcgccaaactgaccgcccgcgagaagaagtggatcatctacgacgtcggcaactcggcattcgtgctgctgtccaccgccgtcatccccatttacgccaaatcgctgatgccggcggacggcaatatcgtgtccgcctggggctacgcgcaaaccattgcttccttggtcatcgcgctgctcatgccgttgctcggctccatcgccgacgtgcaaggcatgaaaatcaagttcttccttggcttcttcggcaccggcgtggtcacctgctgcgcaatggccctgcccctgacctggctgccgttcctggtcgtctacattctggcgaccatcggcctcaacggctcgctgacgttctatgattcgatgctcatcgacaccacctcgaacgagcgcatggacaaggtctcctcgcacggctacggctggggctacatcggctccaccgtgccgttcatcttctgcatcgcgctgattttcggcggcccgtcgctcttcggctggtccacggtggcttgcacgcgcgcctcattcatcatcaccgccatctggtgggtggcgttcaccatcccgctgcttaccagctaccgccaggtgcactaccgtgccacccgcgaccagctgggctcggccgtgcgcggcacgttcagcgaactggcgggcacgttcggcaaaatcgtgaagaacaagccgttgtggatgttcatgatcgcgttcttcttctacatcgacgccgtgaacacggtgatttcgatgagtacctcctacggtgccgagcttggcatcgactccacccagctggtggtggcactgctcgtcacgcagttcgtggccttcccctgcgcgattctctacggccgtctggccggccggctcggctgcaaagtgatgatcacggcggcggtcgtagcatacatgtgcatcgtgttcttcgccgcgttcttcatgaaatcggccgtggagttctggattctggcgattctggtcggcatgttccaaggcggtatccaggcgctctcccgctcgtactacggcaagatcatccccaaggaccacgccaacgagtactacggcttctacgatatcttcggcaagacagcctcaatcatcggcaccttcctggtggccaccaccacgtccctgaccggcaacgcctcgttcggcgtgctctccatcgctgtcctgctcgttgtggcgctcatcttcctgctcctgcagaaggacccgacgcgggagtgatttgccggccctcggcaactctgcgccgcgggcgacatctcgcaacccctgcaacgggccctaatagcaatggaccatcgccacttgatcacttacgctcgcgataatccttgatcagctgaatggcgacggccgcaacgccgcacagcacaccgccaatcggccacggcagccagaacatcgccccgtccgcggcgctcgacccgacggccgaccaatcgccgcgcaatgccgcagggttcaaaaacagcaggcacaagccagtcgccgtggctatcagcataatgatgccgcacaccgcgccggtcagtctggcatagaaatcctgttcgcccgcatgctccttgcggtcgtcctcggccgctttgttgtatgcgtcgatattgagcagactgtatctcatgccgcagtagacaaacccgaaaacaccgggcgcacagagcagcagaaaaattgcgttgggccagccatcggagacgccgagcatgtcatcggcatacaccgtcaccgcaatgccaatcagaatagccgagatgccaccgacgatgccgattaccagcagccgcaattctcggctgcggtcctccccggtgtagaaatcttctacgtatgggtgacgccgtttgaagtcaatacgcgacagacctcctggaatcagcatcgccagccccgcaatcacacccacacagacgcacagaaacgtcagaaaatcgttgagcggcgtcgctccgagaatggaattgctggaatcgaacaggttgccgatgccaaccccggcgacaatcgcagcaacaccgccggcaatcagcagcgcgaatcggcggcgatgttcatcgtagccagtgatatcctgcgcaagctccgcgataggagcgattatgcccgccgttttggaagaagcggctaaaggcgatgccgtctcagccgaggagtcaacattcgacgaaccggccgcagaagccgacgcggcaggccgactcacatcgccaagtaccagatcatcaagcgtgcagccgaacaggtcgcagatcataagcagcttgtccatctcgggataggccttttcggattcccatttcgaaatggcctgacgcgagacgccaagcaacatggccaatcgttcctgggtcaggttgcgttgcgcacgtaggtactgcaggttagcgcgaaaactcattggaatgtcccttcatacgtaatctttatcatgtcatgttcggccgatgggctcactatggcatgccgtccatgtcacccgccaccatctttgggttgcaatcgccggttattcgagcgcaaccacaagttgcatcggcggaattccgccattccgttgacctgagcagctttaacatcgcactccacgagaccgaagcttttccagccatgcgagggcagcttgtctcacctgccaccacgaatccgcttcgacccacgtacacatctgtgtacagcagcgctcgcaatcggttacctacgacccatatgatttgctgagcgaccgcaaaacacgcaatagccgagacaacaccgtcagcgttaaagcttaaggcgactacttgcccaatagtccggaaatctggctgatgatgtcagcgggcagtcctgcttgttcggcaatggatccgaggtccagattggcaccctgctcctgaattgcgccagcgacctgactgatctggtcggcggagatgttttcctccgccagcgcctgcagctcgtcaagtcggtcggcgttcaaatggtcgccaacgacctgttgatttcacccaactgatcggcattgaaatgctcaccgattaccgccggcaaatcaccaatcgaaccgagattgaaatccccgccaagcacattgcctagattgtctgcggcaaaatttttcaggctatcgaacagtcccacatgtgccgctgatactgcttgttcagcaactgctgcagagcatcgcacagaccctgcatcaatcgccgctcttcggcagacaagtcccgcgtgaaaccaatctctgcctttgcgctcatcagctggggagctcacggtcacactcatgcgtcgcagaccacgagcctcacgcgcctcctcattccacatctgtgttaacaacatgtgttaatcgcatgcatcgccaccatgattccccaatgatttcaagggttccccggtctcactattgtttcttccttaaaacggcctcaatcatcggcaccttcctggtagccaccaccacgtccctgaccggcaacgcctcgctcggcgtgctgcccatcgccgtcctgctcgtcgcggcgctcgttttcctgctgctccagaaggatccgacgcgcgcaaacgtgctgagacatcgccggtgaaccaagttctgcctttttaccgacgccagctcgcataagcaggaatcaaacgtcggcgctgggacacagaacgggaatccgccgacgttcagagtatctgatgccggtgccgggccatgttttggacgccaccgacacaagtaccactcttggcgacggtggtggggcatccgctgtcccaccaccgtcgccaatcgttctcagcggcgttgacaatccattatctgtccctccaacgccgccaaacgtccacagcgtcggcgacggtccggattttgacgcaccaccgatgcaaaaccattgcaggctccgtacggaacatcagccgcgaccaccgaacgagcaccagatgcggcatcagccgcgacaccagccgcacttatcgacgcgcccttaccgcgtcatcacgtccatcaatacaatgactcatcggcatatccggctgcagcccaataatcgtcggccgatagcgagcgattgaaaccggtggcatgatcgcttccgaggtcgccctcgccaccgaaatcgacatcgaaatcagtaccagcatcggaagtaccgccggacataccggcaacggacctgacttcggttttcagcaggtatttctccgcgaaattcagcgtggtgcacaccatcgcaaacccctttccatgcgcgttgccctggcggaccaagacgtccttgtgtaagtaagtatggcggctccccttccacaccgccatatccactatggaagcgcgccgcggcacacgacacaagccccgggacatatgaagaagttatggccggttcaaagcacccgtattacagcccaaacggcaccgcgcgcagcgggattgcacgacggccggacgccactcataatcggaaaccgctcacagccaaatgccacccgaggccggacgccatataaggaaccgtggcacggcagatatagaaaatgcccgccatcatagactgacgagcgtgatatcgggtgggcgatgtaggaatcgaacctacgaccccttcggtgtgaacgaagtgcgctagccgctgcgccaatcgcccgagcttgtgatgaaaaaaccggcaacattctgccggcgattcatcgagtgggcgatacaagattcgaacttgtgaccccttccgtgtcagggaagtgcgctaccactgcgccaaccgcccgggtcatcctcaggctgaatcaatcatcctgaaccagccatccgagagcggacaacgggactcgaacccgcggtctcaaccttggcaaggttgcgctttaccaactaagctatgtccgcatgtgttaccttcacgggcaacaggtgacaaagatacgccaatctcaggaaaaagccaagcccccgcgtgtcccaccggttttccaacgattatcgggtgccgccgtgcacataactcgcggtgaccgtatacagcagccaagcgatgggcatggccagcataaacagcgggtagaaccaagcgatgggcacattgcacggccatggccgtggaaatcaggaacgcatgacgataaccgatcagctggccgaagaggccaaggccttgatcggcgaccgtgccgaagtgaagttcctgaactacgccgacgtgccgttcttcaaccaggacgaggaattcccgaacccgacagccgccgtggccgccgccttcctggcgctcgttgcggagtaatcccgcccgaatcttggttacgttccgcctcaaggcggacggcggaccagctgcatcagcaatgtgccgaacccctctgatcgactccaatcagaggggtcgctgcgtttcaaggggctgatttggccttctccggaggtctactcccgtttcaaggggctggtggctgagtagacacgggccaaaaacggcgtaatgacgttagcccggagccgtttatacttgtggtttcccggatgaggagcccctcgaaacggagatagacctccggaacagcccaaatcagcccctcgaaacggagttagacggttgggatgtcggaaagaacactcatgccggcccaagaacccccactatgtcagatatcgctgcccagcacgcaatactgaccgtacagcacgacccgtccttcatgaaatcaggcacggtatgggcttcatccctcaacgcgcgataatggcggtatgacgcaacgacaactgatgcgggccacagtcgaaacgcccatcggcaggatgatgatggcctcggacggcgagggacttaccgaactctgtcttgaagactggtggtgggccaccgatcaccaagccgttctcgattcgaatcgcgaatccgatcgtgaacccgatgtgttccgtatgacccgcgtatggctgaccgcctatttcgccggcgagcgccccggcctagatcagacgccgccgttgcatcccgccggcacgccattccaacatgaagtgtggaatctggtggccgagattccctatggcatgacggtaagttacggcgaactcgccgccgaattggccgaacgacgcggtggcggccgcatggccgcgcaggcggtcggaggcgcagtgaagcgcaatccggttactatcatcgtgccctgtcaccgcgtagtcggctcgggccgcgcatttggcggctacggcggccgactcgacatcaaggccgaactgctcgaccacgaaggcgtggatctggcccgcttcaatctgccgaacctttgacggccccagcggtccgcctcgtcaaaaggattgagtggttacccctcccgctggcgggaagtggcacgtaacgccggagggtggtcggctggctggcatcgcaacccccgctacccgacaattttcgacaagctgacgggaatcctcccacgaattgttcgccgtcggtgcagtcttgctcgatcgcgccggccaaaaccgtacaatccctacaatggaatgtatatggttaattgctgcgcgcagccgcacggccgcacgcaatcgcaagaccacatggcccaaggggatatgcaatatcaacggaagcaggaggtgcgtatgaccggcattatcgattacgcgcacaccgaaacgcgctccttcgccgacttgccgttcaatgaaatcgacgccttgatcatctccacgctcatctatgaggatgtggccagtatctgtccgacgttgatgctggatgagacgcagtcaggctcgttcgccgcacgcattcgcgctttcgagcccaagcatccactgatctggctgaagggtatctggcatcccgagcttgaatcggtaagccttgacgaggccaaccgcgagctgcatcgttcgccggaaacgcatgccgacgacaagccgcacgaagcccaaatggtttcagtggtcaatccggacctgacccacgacctgttccaggccgcgggcgagaacccccgctacgccaacgttcgtctgggcgcggtggtcgagcacatcaatcagggtgagcaaacccaattcgccgccgccaccttccaactgcccgacggccacaagcgccgaaagccgacctacaaaggcacgttggttatttccttccgcggcaccgatgattcgctcatcggatggaaggaagatttcaatatggctttccagtatccggtgccggcgcaacgttcagccagcgcctatctggatacggtggcgcgactgtgggagggtccgattattctggtcggccattccaagggaggcaatctggcgatttacgcggccatgaacgccgaccccaaggtgcgcaagcgcattcagcatgtctattcactggacggccccggtttcccgccggagattgtgaccagccccgcctaccgcaccatccagccgaaggtgacgaaaatcgtgccaagttcgtcgattgtgggcatgattttcgagaccccggagccttgccgcgtggtctcttccgattcggatggcattatgcagcattccgccttcacctggctattggatggcgaccagttcatcaccgagccggatttgagttccagctcgcagttgtttaacgaggagctgaaccattggatcgccacgcttacgcccgaacagcgcgagcgtgcggtggacgcgctgttcaccgtgctgcacgccaacggcgccaccagcttcagcgaggtgatgagcaacttccccgcttcgattccggcgatgcttggcgcgtatgtagggctgacccccgcagaccggcgtcatttggttgaggccctggcgatactgttcaaggcgtccacggccaaacgcaggccgacgcccgccccggcttccgcgccgagttctgcgaccgccaaaggaacagccgaaaccccagcaggaactgcgacaggaacagatagcgcggccccggccagcgccgataccgacaccgacactgacaccgcagcttcgccctcagcggaggacgcaactgaaatcgccgattagctcatagacatgtccacaaataatagttatactgcccaataagttattagacagcgtgaccatatcacgctggtgcatcaggaggaagagatgccacgtccacgccatgattccgaggtgctgcccgccaaagaacgcctagagaacgctttctgggaattgctcgccgaccgcgactaccgcaagatcaccgtcaccgatgtggtgcgtgaggctggcgtgaaccgtaattcgttctattatcacttctccagcctgcccgaattggccgattcagccatcctacatcaggtcgaatcgattccgatcaaccgcacccccgacccaaatggcaatcccgaggaacaatggcgagaccgcgtcaccgccacgctctccgacccggagcagcggcagcgcctcgaccgcctggccctgttggccggcccgcacagcacgcttgaactgaccgaatcgctgcgcgacttctgccgtctgcaaatgctcagcacattgcaacgcgaccccaagaaccttgacctgaaaaccgatctcatggtcgagttcaccgtgggcggcatgctcgccgtgctgcaacgttggcccgaattgagcgacgccatcgaaatcaaagacctgcttaaagaagatgtggccgtgctggccatgggcatatacctggccatgagccaaaaggacatgcttaattactggaatcgcatcttcgtgcacaatgcgcaggattcggccgcccccggcatgccggccgccgccacgcatgccgcgccatcccccatctcaccgtcgaacggccccgcaggattccccgggtacaccgcttgaccaaaaaccagtgagtctggattgtttccgtcgaatgaacccccgcgtgaggtttctcacaaggcgcaatcagcctctcatgctggcgtttccagccctcacacaggaagatggaagcatgagcgaaacatcgaacaaaacccgtctggaacatgactgcatcggccagatggaggtgccggcgaacgtctactggggcattcacacccagcgcgctatcggcaacttcccggtctccggcatcaccgatagccaacatcccgagctgattcgcgcctatgccacggtcaagcgcgcctgcgccatcgccaatgaggaattaggcctgatcgacccggccaaggccgaggccattcgcgccgcctgcctagaaatcgaggccggcaaactggccgatcagttcccggtcgatgtgatgcagggcggtgccggcacctcgtcgaacatgaacatgaacgaggtgatcgccaaccgtgcgctggaaatcgccggccaccagcgtggcgattacacatacatccatccgaacgacgacgtcaacgagtcgcagtccacgaacgacacctacccggccgcctgcaaactcgcgcttatcgacgcgatcgggccgctcgccgagtccaccaagaaactcgccaaggccttccacgatctggccgacaaacatatcaacgatgtgacgattggccgcacgcagctgcaggacgccgtaccaatgacctatggtcaggaattccatgcgtttgccacgctgttgaagtctgatttggctgcattcgatcgcgtggtgccgctgctggcccagctcaacctcggtgccaccgccatcggtaccggcatctgcgcggatctgcgattccgcaagtccgccatcaagcatctggcgcagatcaccggcttgccggtcaccgccgcgcccgatccggtggccgccatgacggatatgggcgcgtacgtggccacgtcggccgccatcaagagccttgccgtgcacctgaagaaggccgccgacgatttgcgactgctcaattccgggccgcgctgcggtttcaacgatctcaacgtgccggctcgccaggccggatcatcgatcatgccggccaaagtgaacccggtgatccccgaatgcgtcaaccagtgctgcttcacgatcttcggcatggacgtgactgtgaactgggctgtggccgagggccagttgcagctgaacgccttcgacccggtgatggtgcatgagctgctgaccggcatggcgttgctgacgcgggccatggagacgttccgcgtcaattgcgtggagggcatcgaaatcaatgctgacctggggcgttcatatgcccagtcctcaccgtcgatttccgccgcgctcaaccattacatcggctacgagcacgcggccgacatcgccgccgaagccgtgcacaccggccgtaccgtgcgcgaggtggccggcgaacgcaccgacctgcccgccgagcagctggacgagattctcgatccgattcgactggcccgtggcctcggccagacctgccgcgagcatcgggactaggcgtcacggcgacgtcatcaccacgacgatgctgcaccgcggtgccgcggtggtgccggtggtgccgacggcacgccaccggtatcgcaccatcggcaccaccgcaacggccaaaacccgacgtgggcccgcatgtttacgacttcaccagaaatggtcgatacagtagggcatatgaccgaatatgcacaagacatcgcacgctggtttcaggtgaacgccggcaaactcatctggctggccgtcgtgctggccgtcgtgttcgcggccgaccgcgtgatcagccgcgtgctgcgcagggttctggatagttcgcagattcccagcgcctcgattttcgtgaatctcacgcgcgtgaccatctgggtcaccggtacggcgatggtgctgcaaccggtgttcggcatcaatccgaccaccctggtcaccgccctcggcgtcggaggcgtggcgatctcgctgggtctgaaggatacgatcgccaacatcatcggcggcttcggcctgatgctgggccgcgtaatccaacccggcgatctggtgaccattcaaggcgtcacaggtaccgtgcatgacatcacctggcgacagaccgtggtgcgcacccgctccggggacatgatggtcatccccaattcagtactcaataccgccgccctgaccaagctcacgccggtcagcgaaggcatggccacgcttgaattcacggccaaggcctccggtgacccgtccgctatcagtcaggatattctcgaccgcgtaaccaaagccaccgccgacgtggcactggagggccagccaccgctggtcaagttcaccggcttctccccttacggcatgaccggccaagtgcttgtgttcgcgcgcgagggtgtgctgccctccaccatcaaagatatggccgcgcgcgccatcgccggttcgggcactaaataccttgttgaagatggcggctcgtcagacaatctgtgatatctcccggctcgcctctctgggtccggctatgacagtcatgcgaacagcatccaaccggtaagcatcacagtcagcagtaggtacgcaataacgccgggattggcataggcggtgcgtattttaagccccgccggcaactcctctggcgcaagatagaactcccagttcttgcgcttggtgataagcagcacgataccggcaatgcagaggcccaacatcactgtgccgtacaacatcatgatgcccatgccgcccatgttgccggtttcagccatacgcatgatttcggcctcgctgattgtgccgtcgaggatgcggggatcgatctgttgtatcaccaatggggcgagcactgccccgttcaggttgatcagcatgtgcatagccactgaataccgcaggcgggaggtgcgtgtgtatacatatccgaacatcagtcctaggccaaaggcgtagaagaactggaacacgttcatatggaatagcgcgaacgccaatgcggagaacatgattgcggtcttttctccgtaccggcgcaggcgggagataatctccttgcgaaaaatccattcttcgcaaaccggtgccaacaggcctatgaacaatgcgttcacccgccagtcgctgccaagaatcacgtcgttgatgcgattggtggcctgaccatcagtggctccggcagacaatatattgccgatcatattgcccaagaacattaccggaatgcacatgacgaaaatccgaatgaactcccccgccttcatggggtactgccgggtgcgaataaccggtacgcgagtgaaggccaacatactcagcggcatggccaccacatacagcggcccggaggaggcgagcagcacagcccaagcgggcacatcggcgccaagcagcgttcgtagtgcttcagtggccagaatattcagcccgatccagaacaccatcataatggcgagcgccgagccgattgtcgaaaaccggcgatgggccgtgaaccaccaatcgcgtggggtttgttgcggctgctgcgccgacggcattggttcgctcatacttatcccccatagtcactggccgcaaacggaccgatcacacgtgcaatactcttcaagaatacggcacggcgtttcgattgcattgggaatggggaaaatcatcaatgggcaaggaatgatctacgtcaatcaatccccatgccgagagagtcctctactctgcgggattgttgtgggacggcacgcgattttgcccgattttttcgcggcggcccacaccactccacatatgactgatgacgccgcacgaagaaatggcgtcattgcaacgattcctcaatacaatctgtgggacggcacgaatgtacatcgtttgacgttcatgccatcccacaccggcgtgggacggcacgcgataatcgcccaaaaatcgccgccgtcccacacatatcattgccgataagccattcgacgatcgtacagtcacaaaacagaacagaaccgcacgatcatcgcaacgccattcagcaggcgagcgcggcgaccggacgcggggcgacaatcacgtcatcgcccaccgccagaccggccggcagctcgctggcgggcagctgcacggtggccttgagctgttcacctttgttccagcgctggtattcgccggaggtgatgaccgtgtccacacgaaccaaagagccaaggaagtgaatgacctccacgcgggcgcgttcgccgacgtgcgaatcgctgctgccagccaaggccagcatcaggttctccgggcgcacgagcacggccacggaatcgcccttggcggagccggcgagcagcggcacgcgctggccgaagaccacggcctcgtcgccattggatgcgccgagcaggcggttggtgagtccaatgaacgtggccacgtactcggtggcagggcgctggtacaggtcctgcggggcggcgatctgctcgatcttgcccttgttcatcacgccgatgcggtcggccacggccagcgcctcttcctgatcgtgggtcacgaagacggttgtggtgccggtggtgagttggatgcggcgaatctggtcacgcagctggacgcgcactttggcgtcgagcgcggacaacggctcgtcgagcaggagcacgcgcggcttgacggccagagcgcgggccagggccacgcgctgctgctggccgccggacatctgctgcgtgtacttcttggcctgatcggcaagccccacgagctccagctgttccatggcgatcttgcggcgttcggccttgcccatgccgcgcacttcgaggccgaattccacgttctccagggcggtcatgtgcgggaacagcgagtacgcctggaacaccatggccatctcgcgcttgttcaccggcacaccggtgacgtcctgtccgccgaccatgatgcgtccgccttggatgtcttcgagaccggcaagcgatcgcagcgcggtggacttgccgcaaccggatccaccgagcagcacgaccatttcgccgggcttgatgtccaggttgaagtcgtcgagcgcgtgaacggtggagccgggatagatcttgacgacgttctgcatctgaatggaaccaccgccgcgcttggcggtgtctttgagcagggccttggcggccttggtcacgtccttgccgcgcacgccctcgagggtagcggtgggatcgttcttgaaggcgtcctcggcagtggaggacacggctgccgggatggccggggacgccggggcggtgcccactgcggtaccggtttcctgacgggtgggagttgaatcgttgttcatcgggtcacttaccttcccttgacttacgcattgcgtcggagatcaggtcgagcgcaacgaggagcaccacgccgaagagcagagccagcagcgacatggcggtggaaatttgggcattggattggccgagctggtagagcgcgacctgcaggttcatacggccgagcagcgaggctacggtgtattcaccgagtaccacggcgatggagatgaaggatgccgagaggatcgactgccacaggttcgggatgatcaccttgaagaacactttgggccaggaggcgccgagcgatcgggaggcttcgaccaacgtcttgacgtcgatggagttgaggcccacggcgatcgcgcggaaggcgaacggcatcacgagaatcacataggcgaagcacagccagatcgggttggtgctcaacacgtcggcggaaagccaacggtagatcggcccaagacccaccaccagcacgatggccggaatggtcagcggcagcgtggccacccattcgattgcacgctccaaggctttggagcgaatatgcacgatgaccatggtgggcaccagcaggatgagcatgatcacgacggcgacggcgctcaacgacagcgagatgccgacgccctgccatagcacgctcagatcggcgcccaacgattcgccgttgccggtgaaaatcgccgtccacggcgcggccgaccagcgaccggacaacgggtgacgcagggtgaagatgaacatggccagcagcggcacgaacaggaacgccagggtgacgaacaggatcacgaatttgatgatgctctgtttgcgcacgcgggcggcacgcagctgcggcggcttggttgtggaagtttcggtcattgccaacgtccggccctcttttccacggcgtggctcagcagcatgacgatggccacgacgatgatcattgcgaatgccagcacctgcgcgaagccctgctggttggggtccatctcattgcgcatggcaccttggatcatcaacggcaccagaatcgagcgctgcgagaacagggctgcggcggtcgcgtatgcggagaacgcggaggcgaacaacagcaggaacgccgagatgaagcggggtgcgaggatcgggcaggccacgcgcgtccagtattggacggtgttgccgccgagcgactcgcaggcttcgcgccactgtggacgaatggaatcgaccgcaggcaggaagatgatgatcatcagcggaatctggaagtagcagtagacggtcaccagccccggcaacgaactgagccagttcgggttcacggtgtagccggtcagtgtcttgatgagcatggtgccgacgccgttgatgccgatggtggcgatgaatgcgaatgcgagcatcacgccgccgaactgggcgagcacggaggagatggcggagaccatgcgacgcagcaggccgttcggcttggcgccgatgaccagtgcataggaggcgagcacctaccactgcgccgatcagagaggatgctaaggacaccagaatcgaagtgccgaatgcggcgatggtgttggcctcgaacatcttattgaagttcgcaagcgtgaaaccgccgctgcgatcccggaacgcgccgatgatcacgatcacggtgggtgccagcaggaagcaggcggtgtaggcgaagaacgggagcgtggtggtgagcgtgccaagctcctgacggtgcttcgccagtgcggacgaagcgggggtcgatgcggcggacggacccgcggccttggaggcggcgggtccgttcggtgcgatgggtgcgattgcggcggtcatcgtggactctcagttgccgatcgtcttgtcccagttgttttgaagccactcggtgatgcgggtggagtcatcgttgctgtaggtgaccggctggccttcgatggtgatggcgtccttcagggtggcctggtcgacggtgccgtcggccttcatggagtcgagcagcaccgggttggcgccgcccttgaaccacaggttctgggtttcggcggtgtacaggtattcctcccacaggcgtgcggcggcggggtgcggcgcgtccttgttgatggcctggttgtagtagctgacgacctgggccttcgggaaggtcttgtacttccagttcacgcccttggacttgagttccttcttgtaggaggcctggttgtaggtccagtcgaagaccacgccggtctggccggagtcgatggtgccgttggtcacgtccacggtggtcaggttgccggcttcctgcagcttcttgaagaagtcaagaccaggctgcaggttattgatgtcgccgcctgcgagctggttgaccatcaggtagccgttgaaggcggcaccggcttcggcgggcttgccgttcaaggacaccgtgccggcgaacttggaatcgagcaaatcgtccagagagttgatctcaccgtacttatcagcattccagcccacggacatgatgccggtgtagtcggcgtagtaggtgccgtcggcatccttggcggtgtccggaatcttgtcccag

SEQ ID NO: 1167 - DNA, 11028 bp, Unknown
  R81_24m  MAG No. k141_11494
cacgccgatcaagtgcaggatggcgaacgtcgcatactccacaatggtctgcgtggcggaaacacccatatacttgcccaacacggcgagtccattttgcttcggggttgccgtgcccacggtattttccgcagtgttcgtcgtggccgaggcattcgtgacgtccgcgccctgattgtgcttcacatccgctccattgttcgccatgcccatatacctcccggatgtacctgtgacgttcgacctcgcgatgataccgctgaccgcgtcgggaatcgtcgtggcggtcagacgagaaaaccgcaggccgcagcaacgaccggcacacccagcgacagcaccagataggccgttgccgtggggtagcggcgtttgtggaagagcgtcaccatttcgttgatcgcggtcgagaacgtggagaatccgccgaggaaaccggtggccagcaccagccgccacggttcatcaagtgtcccgcccagtgccagcgccgcaaccagaccggtcaggaatccggcgatgagattgatggtgaatgtggacagcgggaatgcgtgttgccaatacgttttgatggtcgcgtcaagcagatagcggcaggaggcgcctacgccgccgcacaggcagaccaagattggtaggaatacggtcatcacgccttacctcccttgctggtcgtagcggcattcgtatcagcggacgcttcggcggatgcgttcgaggagccggccagatgcgttcctgcccacacgccggcagacgcacaaaccagacccagcgcgaacgtcaccagtagataggcaatgccggccgccacctgaccgtcgcgaatcgcggtgaagccttccaatgccaacgtcgacatcgtagacaaaccgccgcatacgcccatgccgagcccacggctggtgagctccttggcacgcgtgtcgaaccgggaagagccggccaaataggcggtcagacccgcatagcagaagcaggccagcatgttggccacaaacgtgccggtatggaagctgccggctgcgggaatctgcgcgaacgcatagcgaatcgcggtgccgatggcaccgccgcagaagacgaccaacacaatatcaagatgaatatcggggagcttgcacgccgggggagtggtcgtgtgcgtaatcggccgggcacctgcggatggggattgcgaacccatagtagcctttcctgaaaccgctgaatcccgctgaagacacaacgatctcatgcaatgtcaaatcgtgtgtaggaactatcagcagtgtgcggttcgaaacaagttcaggcgggtcccatcgccggttctccagattactcatggcgacgaatcgaacagtgagcgtatctcggatattggcctatcgcagtgaattgctcggttgttgccatacctcatgggtatggcgaaacatggtttatggcttattggttaatgcaaggcgattattgtctaatagaacacgaggatagcgggccttaagcgctcgatgccggaaaacaaggagttatgaacgtatgtctgaaaccatgaaagctgcgattttcgtggagcctggcaagatgaccgtggaagaagtgccgaaggcgacgcttgaacaggatgacgacatcgtgatccgcgtggtgcgcacgtgcgtgtgcggctctgatttgtggttcttccgtgggctgagcggacaggccgcgcacagccaggtgggtcacgagtccatcggtgtggtcgaagaggttggcgcggcggtcgaatccgtcaagcccggcgatttcgtggtcgtgccattcccatacagctgcggcaagtgcccggtatgcaaggccggcttcgaatccgtgtgcccgcacggcggctacttctccgcctgtcaggccgaatacctgcgtgtgcccgaggcggacggcaccgtggtcaaggtgcccggttcgccggaagactacgatgacgcgacgctcgcttcgctgctgaccgtttccgatgtgatgtccaccggttatcacgcggcggtttctgccgaggtcaagcccggtgacgccgccgtggtcatgggcgatggcgcagttggcctgtgcggtgtgattgccgccaagatgcgcggtgccacgcgcgttattgccatgagccgtcacgaggatcgcgcggcgctcgcccgcgaattcggtgcgactgatatcgtgcccgagcgtggccaagaggctattgacaaggtgctggagatgaccggtggctatggtgcggacgcagttctcgaatgcgtgggctccaagcagtccttcgacacggcgattggcctgattcgccgcggtggcgtgattggtcgtgtgggcctgccgcacgacgtggagatcagcgccgaaggcacgttctacggcaacatcggcatcaagggcggcccggctcccgtgcgccactatgacctcgatgacggtctgctggatgcggtgctcaagggcgaaatcaaccccggtcgcgtgttcaccgccgagtacgacctcgaccatatccaggacgcctacgaggcgatggaccagcgcaaggtcatcaaggcgctgatccggttctagggtcaggtgcgcagagaacggttctcactaagaaccgtgtgagccattcgcacaaaaccgcacaatcgaacaggccgccggtgtgatgggggagagattgggggtgaaccggttcggtgcatgtttccataccgttgttttcgtgtagaatcggctacctctatacctctgttttcgtgtagaatagcatatgcctataccgttgttttcgtgtaatgaggtgattgctcatgttgaagcgcaagatgctggataagctgatcgcatggaaacaaaaagcgggtgggcgtgaggctcttctcatcgaaggcgctcgccgtgtgggcaaaagcaccattgtcgaggaattcggccgcactcagtacaagtcatatattctcatcgatttcacacgtttgccgcgcgacgttcgcgacatcttcgaaaaccagcgtgatgactttgacacatttttcatgctgttgtctgcgtattaccgcaagcgactgtacgagcgtgaatcgttgattattttcgacgaggtgcagcggtatccggcggcgagggagctcatcaaatatctggttgcggatggccggtatgactatgtggaaactggttcgctgatctccatcaagaggaatgtggcgaatatcgtcattccctccgaggaacggaaaatggatatggggccgctcgattttgaggagttctgctgggccatgggggaggagctgcttgctgaaacgattcgcaaatcgttcgagcgtctggtcccgttgcccgatgcgctgcacaaacgagcgatgaggctgtggcgcgaatatctgctggtgggcggtatgccgcaggcggttgccgattatgtcgagcagcgcgattttggcgaggtggatttgatcaagcgtggcatcctgcagctgtacagtgatgatatcggcaagttcgccaatggcgatgccggccgcgtgcggggcattttcgctcagattccagggcagctgtccaagcatgagaaacgattcactctggcatcggtcgataagggggctcgatctcgtgaatacgattcggcgttcttctggttggaagacgcccgcttggtgaacctgtgccgtaattcgactgaccctttggtggggctgggattgtacgaagataacgattcattcaaatgctatatggcggataccggtttgctggtgtcgcaggcgtttgccgatcgagagacaacgccggatgatgtgtaccgggatattctgttcgataagctttcgctcaacgaagggatgctggtggagaatgcggtggctcagcaattccgggcgaatgggcgcaaactgtatttcttctcgcgctcggatagggcggatgccacgaaaaccatggaaatagacttcctcatcgttcgggaatacgataatgccgcgatgaagcctcgcatcagcccgattgaagtgaaatccacgaaacgatacggcgtatcttcgctcgacaaattccgcaaaaggtatgcccaacgattgggcaaggaatacgttctgcatccccgccaactcgaagtggatggagaacgcatcaagctgccgttgtatatggcccactgtctgtgatttgtgctgattgatgcatgtttgggctgcaaggttcaggcagtcgaagagtgtccgttccgcataggacatccgtgaatatggctggactcacactggctcgactgcagggaaaggagttggcatgggatattccatcggtcaggtgtcgcgaaagactgggctgtccgaacatacattgcgctactatgacggccaaggtcttttgcccggtatcgcttgaactggtttcggacggagatgcttcgatgacggcgatcttgaattgcttgatctcattgaatgtctgaaatccacgggcatgagtctcgcagagatcaaggattttgttgatatgactaagcaaggtgatgccacgctcgaatcacgacttgctgtttttcgcaatcagcgacatgtggtgaaacgtcaaatcgtcgaattgcgacgccggtacatcaaacttgacgtggtcattacatccggtgcctcttgcacctcgtcgatgaaaatcaatgtaccgccgggagtgagcgttgaaggtgagaacaaggtaagtcggttgatgaactcctgcgcgtcattcgccgatgcgagcgcgcgggcctcctgcttgttctcgtacaggttgatttcaaggtaatgagcgtattcgtgtttggcgaactcgcgtaccgcgtagctcttgccgatttggcaggcaccggtcagcagcagtgctttgccggtgccgatcagcttccattccaacagatcgtccgagatcttgcgctcaagcatggcagttcctttccgaatcccttatgggagtagcattttctgccttgtatgtgcagaatgccgcatttcaaaatggggttttggcgcaaaataccgcatttcaaagtagggtttggtgcaagatgccgtgcaaatggtgaatcgggcgtgtttgtaggggcggctggatgactgtgcggctggactgttgtgcggccgcatgcttatgcggccacaagtcgtgcgggctgttcgcaaactatgcgcggtcggccggcattcgcctgcgcttgaggtgttcgataagcagctcacactttttgacatcctcggcggtcgaggccggtaggtcgtcggaggaggtgtcgatgatgcgctgcaggtagccgtgtagggtttgtagctcggtttcattgagacagtccagcatggaggaggtctggtcgggcgctttgcccagcagatcggcggccttgcggccctggttggtgaggctgaccatcatgacgcggctgtcccgcctggatggacggcggctgatgtgaccgctggcctccagtttcttcaacagttcggccatggcctggcggctcatgccgaacatcgcggccaagtccttctggctggtctggtcggattccctgagcgtggccaagacgcggccttggccgcggcgcgggtcgaaagcatgttcgccgcgcggcgatttggcgccgggggagacgagccgtctgtgtatcgcgcgatacgccatgatgcggccaatgctgatgaaactgctgagaacatcgttcttgatatcgccgtcggcggtgttgtggcttgtgccgttctccgccgattgactcgtggccattacgttgtcgaccgcgtcgtttccggttacggcggcgttgttgctggtactgctcatgttcggaatccttacgtcagtgctgcatgttgtcgccggtggattcgccgcgatagcgcatcatcatcgagcgctgcatctcctgcgcgttcggcggggtccaggtcagcgcgttcgcgccggccacgatggtttcggccatggactcgtcggtcgaaccgccgctggcgagcagcgggatggaggggtgacgctgcctgatctgctggaccacgtcaggtgtcctgcggccggccgccacgttgatgatggaggcgccggcctcgattttctcgtccaattcgtcatcgcaggtcaggaccgtggcgatgaccgggatgttcgtgatgcgcgccacgtcgtacaccgtggagggtggcgccggcgcgttgagcactacgcccgccgcaccctgcatctcggccatcatggcgagttggatgacgcgcgggccggtggtggtgccaccgcccacgccgacgaacagcggggcctgggccacggtgagtagggcctgggtgatgactggttcgccggtgaacggatatacggcgagaatggcgtcggcattggtgttgcggatgatggccgcgtccgtggtgaacgcgaacgagtggagttggcggccttggacggtgatgccggaagtgcagctgatgatgtcgggaacacgggccgcggaggagctgatgcggttttcgatggggttcggtccgtctacttgacgggattccgggtcgtattcggtgaggtcgttgctcatgtcatgtgtgatgttcatgccggtctcctttaataaggaagcgagcgaagcgtcgctggtcgtgtgtctttttcatcctcttcagtaattatgtcaagtacctgacagatatgagtatacgactccatcaaagattgtcaagtaccttacgtattgctgttgtgtcacatttttcgacaatgccaacatgcgtatgttgtttgatgcggatctgagtgtggaacggctgattcccgcactgtcgatcgagtccggaactaagatcactcccgaggatacgctcgtcattttcgatgaggtacaggaggtgccgagggcgatgacttcgctgaagatgttcaatgaagtcgccccggagtatgacgtcttggccactggatcggcgctgggcatcgccatgcatcctgggttttcattcccggttggcaaggtcagtagactcaagctgtatcctatgtcttttgttgaattcctgtatgcgtgcaaacagtatgccttggccgaaatgcttgagcccaaggattttccgctaattaacgtaatgcatgacagggtcatgacttggctgcggtatttcatgtatacaggaggcatgccggagatcgttgaagcgttcgccagtactctgccgaatcctgacttcacggcggttcgtaaattgcagaatagtctggtctccgattatcgtgacgatttctccaaacatgttgatatgcgtgatagtcccgccgtcaccacgcttcgtctcaatcaggtatgggattcaattccttcccagttggcgaaagagaacaagaagttcgtatacggcgtggtgcgagctggtggacgtggcaaggattttgagagtgccatacagtggcttgtcgatgcgtcgttggcgttgcgcgtgaatcgggtgagtgcacctcttgaaccattggcggcatatgcagacggctctgcgtttaaactgtacagcctcgatgtggggctgctaggagcgttgagcggtctgaatgttcgtgtgttgctggaaggtgacgcactgttttcgagagttcaaaggttcgatcgccgaacaatttgtatgccagcaattgaccatgatgaacggccattcaccctattgctggtcggccgagaactccagtggtgagttggattttctgttcgagaggaatggcaaagcggtgcccgtggaagtgaaggaggggactcatcgacaggccaaatcgcttgtaatcatgcagaagaggcacggttatccgcttgcttatcgtttctctgctgaccggtatcgggatgtggggccgatccgagatgtgccgttgtacatggctggcatcgtttagggcgttatggcccgttgcgctgaacgatggaatgcgaccacaacggatcctgtacggaagtagtcggtctcgtacctgtggctggcgttgcgcgcatccgccatcgcgcaagcgggaacgatcgcattcccggtcacgaggattccgctggttccgcctccggggatcggccggttggatgaggttacgccgtcttgcgagccgtcgaacgatcagggccaaaggtaaagaaattcggtattcttgcaaggctttttgggttatcccgcaggcatgggtagactggcatgcggtaggagagatactcgctgaaaggtgcatgccagctcatgggaacgggtgaccagccggaaaagaccaacaactaaaccagcgattgctgtcggctggccggtaatagccgtaactgcagcggacgttccccgctgcaggtgacacgcatcgccggagggcagctgcaagtccaggtaccggtccgcggccaccccagtcagccgcgctgacgacccccggcgtcatacgcgatgtgcacgtcgtgcactgctacgtgccgtccgccgggctacccgtccagcgaaagcgtaaccgggcagccagccagtatcgatacatgtcataacgtaaggaagtagcccatgccatcacacgcacgcacggtccccaggacaacccatcgcgttcgcaacgcgctgctcgtcgtgctgctgttgctggtcatgtgcgccgcggcggccggcttcagcggattcaaactgtacaagtcggcgatgagcgccaaagcgcacctcaacaatgtcgtcaacgcggccaaggtcatcaaggacggttccaccgacgacatggtcaaggcgctgtccgacgtgagctacatccagaaggaggcggccgccgccaagcaggatgtcagcggcggtctgtggacgctggcggagaagatgcccgtggtcggcggtgacgtgaagacggcgcgcaccgccatcggtaccatcgatgacttcgcgcagaccacgctgccccagctgggcaaggtcgtcaccacactgaccggtgccagcctctccagtggcgatgggcagctcaacatggagccgatcatcgccgcggcgcagcagcttgccacggtcgaccagtccgtgcaatcgcaggccaggacgatccaggatcttcccgacgccaaactcggcgtggtgaacaacgcgctgcagaacggcaagacgcagatggccgccctggcgcaggtgaccgaaaacctgagcggcatgctcaacatgctgccgaacttcctcggtgcgaacggcgcccgcaactacgtgctgctggcccagacgaattccgagatccgcggaaccggcggcctgatcggttcggccggttccttcagcgcggacaacggcaagatcgcggtgggggagttccacgcggatgccgagttcccctccaacgccgcgttggatgacgtcaaccaggacggtgacggcacgctgtacagcggactgtacttcggtcaagtcatccataatctttcgtccacgccggacttcccgcgcgtcgcgtccatggcccagaagttctggcaggcggctccgtttggcggatcgtccgacggcgtgatgtcgctcgaccccgtcgcgctgcaggcgatgatcggcgccaccggcgacgtgaccctgtctgacggacgcgtgctcaacgggtcgaacaccgccgaattcctgctcaacggcgcctacaaggaactgacgccctccgctcaggaccagtacttcagcgagaccgccgcccaggcggtcgcccacctgttcagcgacatgaacacgcagaagctcatgaccgtcgccaagacgatgctccggatggccgagcagcggcacctgtacttctggtcgttccacgaggaggatcaggcggtgctgcgcagcgccggcgtcaccggcgagatcaccaacgacgcgaagaacccggtgaccggcgtctacttcaacgagatgcaggcctcgaagatggactggtacatccagcgcaagtcgacggtgaagaggaccggcgacaacacctaccacgttacgtattcgttcaccaacaccctgcagccgggcgaggccggatccctgccggaatacatcacggcgaacgccaagggaggcgtggcggtgaaccgcgtggtcatctacacgccggccggaggcgaggtcagcaacgtgtcggcgtcgaacggcagttccttcgcacaggtgcaggccaaggaccatatgacctacatggacgacatctccctggcgcctcaggacacggtgaccatcgaatacgacgtgaccaccgcggccggctcggccaacctcaaactggatcagacgccgaccatcggcgaccccgcgatcacgtacgagtattgatcggtattgatctgtgggtgtgatcttgggattgtgtgcccttatgaaagcgcgccgccgactcctctcggaaccggtgacgtgcttccggacgacgatgtccattacgatcacggcagatcgatagccgacaatatcgtcacgctggttcagctagttcgaattgcaggtggcggacggtgcccaagacgaaagattctcgtccggcgttcggccgccgtcgttggccgtgatgatactggagaccatgaagctcaggcggcggcagccaagggcgaagtcgagaaagaggtgacggcgtgacacttgaacagaggtcagatagcgcggcggcggagcagtgccgagcatgaccaacaatcaacggccgcaggcgattgaggtgcgcggggcgcgcgtgcataacctgaagaacatcgacatcgacattccgctgggtgaactggtgggcgtggccggcgtctccggttcaggcaagagctcgctggcgctcggcgtgctgtatgcggaaggttcgcggcgctacttggaggcgctgtccacgtacacgcgacgccgtctgacccaggccagtcgcacccaagtggacgaagtgctgcatgtgccggccgcgctggccctgcaccagcggcccaccgtgcctggcatccgttcgacgttcggcacgatgaccgaactgctcaacagtctgcggctcctgttctcccgcgtcgcctcgcacgtgtgcccgcattgcggggcgcgc

SEQ ID NO: 1168 - DNA, 7493 bp, Unknown
  R81_24m  MAG No. k141_12573
caagatccttcagggcatccagcgtggcggccacctgctgggtggagtaacgcatggcgatgtcatcgacaatcttggacagacggcccttggccacctgctcgttgacgaacgggtagtcggtcggcagagtctcgttgaacaggatgcggccgtaggaggtggcgaacagcacggtgccgtcgtggaagcgctcttccttgacgacctcgtcctcaccttcgcgcgggtcgagcaccttgacctcgccgggctcccagttcttcggcagtacgaagctctcgggcaggcggatgagcaccttggcctgcatgtcgatctcgtggcggtcgagggccatttcggcctcttccagcgaggagaacacgcggccctggcccttggcgccttccagcacggtggacaggtagtacagaccgaggatcatgtcctgggacggcatggtcacggtgtgaccgtcagccggcttcaggatgttgtcggaagccatcatcagcgagcgggcctcggcctgggcctcggcggacaggggcaggtggactgccatctggtcaccatcgaagtcggcgttgaaggcggcgcaggccagcggcggcaggtggatggccttgccttccaccaggatcggctcgaatgcctgaatacccagacggtgcagcgtaggtgcacggttgagcagcacggggtgctcggagatgacctcctcgagcacgccccacacttcggcgtcgccgcggtccacgagacgcttggcggacttcatgttctgcgcgtagttcaggtccacgaggcgcttgatgacgaacggcttgaacagctcgagggccatcggcttcggcagaccgcactggtgcatgcgcagggacgggccgaccacgatcacggaacggccggagtagtcgactcgcttaccgagcaggttctgacggaaacgaccctgcttacccttgagcatgtcggacagggacttcagcggacggttggaggcaccggtgaccgggcgaccacgacggccgttgtcgaacagggagtctacggcttcctggagcatgcgcttctcgttgttgagcatgatttcaggggcgccgagctcgatcagtcgcttcagacggttgttacggttgatcacacggcgatacaggtcgttgaggtcggaggtggcaaagcggccaccgtcgagctggaccatcgggcgcaggtccggcgggatgaccgggatcacgtcaagcaccatggcctccggcttgttgccggtggtcaggaaggcgttgacgaccttgagacgcttcagggccttggtcttacgctgttcggaagcgtccttgatctcctcgcgcagttccttggagatggtctccaggtcaagggactgcaggcgcttcttgatggcttcggcgcccatgcagccgtcgaagtaatcgccgtagcggtcctgcatctcgcgccacaggtccacgtcgtcgaccatgtcgccgggcttgagcttcttgaacttgtcgaagacggcgtccacacgggcgatctggtcgttgtagcgggtgcggatggcggccatatcgcgctcggcaccgttacgcagcttggtgcgggccgggcccttggcctcgccggcctcctcaagggcggcgagatcctcttcgaccttcttggcgcgggcttcgatgtcggagtcacggcgctgctcaaggcgcttgatctcggaatcgaactcgtcctgcaggccgggcagatcgttgtggcgctcgtcctcgttcacctcggtgaccatgtaggaggcgaagtagatcacgcgctccagatccttcggggtgacgttcagcaggtagccgaggcgggaaggcacacctttgaagaaccagatgtgcgtcaccggggcggcgagctcgatgtggcccatgcgctcacggcgcacgcggctgcgggtcacttcgacaccgcatcgctcgcagacgatgcccttgaaacgcacgcgcttgtacttgccgcaggcgcactcccagtcacgggtcgggccgaagatctgttcgccgaacagaccgtccttctcaggcttcagcgtacggtagttgatggtttcaggcttcttgacctcaccgtggctccaaccacggatgtcatcggcggtggcaaggccgatgcgaatcttgtcaaatgcgttgacgtccagcacttgttaatccgtttctgttcttgagaccttcccaagctccccttgtcaggggagctgtcagccaaggctgactgaggggtagtgcaaaccggaaaggtctctgtacgttatttatttcacgttggcggagctacacgcggcgtattgaccgcatgcagcccgagggatcactggtattcgggctcttcggccttctggtcttccttggcggccgcgtcggggcgggcgccaatattgaagccgaggtcgtcagcggagctggccggatcgtcgtcctcgtccttcatgtcgatggccacgccttcggcgttgagcacttcgacgttcagggacagggactgcatttccttcaggagcaccttgaacgactcagggatacctgccggcggcaggttatcgcccttgacgatggcaccgtagacgcgcacgcggccgtcgacgtcatcggacttggtggtcatcatctcgtgcagcgtgtaggcggcaccgtaggcctcaagggcccacacctccatctcgccgaagcgctggccaccgaactgggccttaccaccgagcggctgctgggtgatcatggagtacgggccggtggagcgggcgtgaatcttgtcgtcgaccaggtggtgcagcttcagcatgtacatgtagccaacggaaatcggcttggtgtacggctcaccggtacgaccatcgaacagggtggccttgccgtcggggccgaccagacggtcgccgtcgcggttcggcagcgtggtggacagcagacccttcaggacctcaggcttgacaccgtcgaacaccggggtggcgaccggggtgttcggctcggccttctcggcaccggacggaatcagcttcttccactcggcttccagattcggatccaaagagatgtcccaaccggagtgggcgatccagccgaggtgcagttcgagcacctgaccgaggttcattcgggaaggcacacccagcgggttcaacatgatgtcgaccggagtaccgtcggcaaggaacggcatatcctcttccggcaggatgcgggagatgcagcccttgttgccgtggcggccggagagcttgtcgcccaccgtgatcttgcggtgctgggcgatgtagacgcggatcatctggttgacgccgttgggcagctcgtcgccgtcctcctcggcatcctcgcgggtgatctccttgacgccgatgacggtaccggtctcgccgtggggcacacgcagggaggtgtcgcgcacctcgcgggacttctcgccgaagatggcgcgcagcaggcgctcctccggggtcagctcggtctcgcccttcggggtgaccttaccgaccaggatgtcgccggcctcgacctcggcgccgatgcggatgatgccgcgctcgtcgaggttggccacagcgtcctcgccgacgttcggcaagtcgcgggtgatctcttcggcgcccagcttggtttcgcgggcgtcgatctcgtactcctcgatgtggatggaggagagggtgtcgtcctgcacgaggcgctgggagatgatcacagcatcctcgtagttgtagccgttccacggcatgaaggcgatgagcaggttcttgcccagggccaggtcgcccttctggatggcaggaccatcggccagcaccgagccggcctccacacgctcgccatcatggatgatcgggcgctggttgtagcaggtggtctggttggaacgctggaacttggccagcttgtaggagctggtggtgccgtcgtcgttcatcacgcgaatcaggtcggcggacacgtaggtgaccacaccgtccttctcggacttgatgacgtcgccggaatcgttggcggcgcgccattcggagccggtgcccaccagtgggcgctcggattcgatcagcggcactgcctgacgctgcatgttggtacccatcagtgcacggtggccctcatcatgctccaggaacggaatcagggaggcaccgagggagaccatctgacgcggggagacgtccatgtaatccacggagctcaccggcacatcgactgcctcttcctcgccgactcgggcaagggcggacttggagacgaagttgccgttctcgtcaagctcctggttggcctgggcgatgacgtggtcgagatcacggtcagcggtcatgtactcgacctcgtcggtcacgtggccgttgacgaccttgcggtacggggtctcgatgaagccgaacgggttgacgcggccgaaggtcgccagggagccgatcagaccgatgttcgggccttcaggagactcgatcgggcacatacggccgaagtgggacgggtgcacgtcgcgcacttccatggaggcgcggtcgcgggacagaccgccggggcccagtgcggaaagacgacgcttgttcgtcacaccggacagtgggttgttctgatccatgaactgggagagctgggaagtgccgaagaactccttgatggtggcgttcaccgggcggatgttgatcagggactgcggggtgatggcctcggcgtcctgagtggtcatgcgctcgcgcaccacgcgctccatacggctcagaccggtacgcagctggttctggatcagctcgccgacttggcggatacgacggttgccgaagtgatcgatatcgtcgacgtccacgcgcaggtcaacgtcttcgccattgcgcttgcccgggaaggtcgccgcaccgtcgtgcagggccaccagatacttgatcgtggcgatgatgtcttcctggtggagggaacggtcgttgaaatcggcctcgacacccagcttgcggttgatcttgtagcggccgacgcgggccagatcgtagcgcttggtgttgaagtagaaggagtccagcaggttcttgccggcctcgggggtcggggtgtcggccggacgaatcttgcggtagaggtcgacgagggcctcgtcctgggtctcgagggtctccttctccagggcgtcgagcaccagcgggtagtccttgaaggcctgggcgatctcggacttggtcatgccgatggccatgaggaacacgatggcggactgcttgcgcttgcggtccacgcgcacctgcggctggtccttcttgtcgatctcgaactcgagccatgcaccgcggctcgggatgatcttcgcgccgaagacttccttatcggaggtgcggtcctgctggcggtcgaagtagacgcccggggaacgcacgagctgggagacgatgactcgctcggtgccgccgatgatgaaggtaccgtgcggggtctgcagcgggaagtcgcccatgaacacggtctgggacttgatctcgccggtgtcgccgttctcgaattcggcgttcacgtacagcggagcggagtaggtgtaatccttctccttgcactcctgcacggtgtggcgcggctcctcgaagtacgggtccgagaaggtcagggacatggtctgtgcaaagttctcgatcggggagatctcgttgaagacctcgtcgagaccggaggtgtgggccacggtgttggtgccgttagcctcatcctcttcgacacgcttcttccagcggtcggaaccgatcagccaatcgaagctgtcggtctgtacgcccagcaggtagggcacatcgatgggttccttgatggaaccgaagttcacgcgatccgacgccttgtgcagatcaatgtcatgctggtcggcgcgtgcgatgatggtggtggtgttcgtcgtagactcagtagccaatggacgttccttatcgctcgctaatatgtggtaattcccctgggagcgccggcatggccaccatatgcctatgcggacgcttcattgtcgacggcatgcccgcaatatgacacacctcatgcaaagtcaaaagaatactgatatgcgaggacatttttagctcccgctgacgagggagctgtcgagcggagcgagactgagggagagacccagcgtccaaacaccaaccgcaggtcctaccccaccgtaaacgtcaccggatcgctcttcaccttcggatgatccttcaaactcagctgcgccacgtacgttcccgcattgaccttggcccaacccgactcatccgtgcattcggtgagcgtggcgttcgcatcggtattccacgtgaccttctgaacgtccttatcacccttggacatcagcagcagacgtgaatccgccggacacacatcggacttgtaaatcgtttcctgaccggaagtaatggtgagcacacggccggaatcggccccgtccaccaaacagttgcctgacccctcgtgcacgatggtcgcggtgaaatcaagcgatcctcctaccggcacggattgggaggccgcggaaagctgcaatgtcacatcactggccgagcaatccttgacgttgctgactttcttcggagccggcgtggcgtcgcgggaaatcgcatacacctcgtcatggtgaatcatcgtgttcacggcaccgataccccggccaaggctgtacacgcagaatacaatcagcgcgattatcagcagcaacaccgtgccggccacgatacgccgacgacgatagatggcctgctgctttttgctgatcctgcgcttgcgcggcttgccggaacggtcgtttcgggcgggcccgccggatggcccattggccccggtgccggctccgcgtgccgttctcgcgcctgatgtgttcctctgcactgccataacccttccagtctacggtcaccacacccatacacgcttggggagcccgccattttcacaatgtcagctgggtaatcgcaggccgccgtccagaatctcgatcaggccgtcatcgtcaaggctggcgatgcaggcggcaagctgaatctggtccttccaaagcttgtcggcatcttccctgggcaacgtgactccagcgggaagctcgcgcagcgcggcgagcaccagaccgcgcacctgtcgatccgtgccttggaatcgttggcgtgggcgggtgcgacgctcccccagtccggggcggccggctttgagaaatgcacaatcatccgcaatcgggcaggtgtcgcataacggcgatttggccgtgcagatcactgcccccagttccattaccgactggttccatgtgaccgatggaggttcgctgcgctgcaggaaagtgtgttcgccggatcggtatgcatggtccgtgcaatcggcaccgtccccacgaaccctgtcttggggcaacatgcggttggcgagcgcgcgttcggccgggctcgccgctcccccgcgagattcggtgccgaggaatacgcggctcagcacgcggcgaatattcgtatcgatcaccgcaatgcgctcaccgaa

SEQ ID NO: 1169 - DNA, 3670 bp, Unknown
  R81_24m  MAG No. k141_12632
tgaggtgtgccgcggtcagctgagctggccggcgaagctgagcaagaatggtgcggctgaatgggccgccggcttactggcgttcgactggctgtctcgtcctgatttcgtggcctatgactggaccggtggcgcttcgcctcaggtccgtctggctcgttcgatgggcgccacgactgtctcctggaccgtgcgcagcagcgacgagctcgctcagtgcgaccagtacttcgaccgccatattttcgaggcgttcgttcctgacgcgcagtgacctattggcgattttattagcgagcggccggctgtattcatgcagtcggccgctcgctgtcgtgtggttttttccctgcgatgcggctcaaaatccgcacggtgtggttttcgacaaggtgtcaagaaccataaaaccgcagaataacgccattttggcaaaccacaccgtgcgcgagtttccataccgtgcgtgagttgccacacggtgcgcgagttgccacacggtggaaagttggccaaccctgtgcacggggttgtggggaataatcacttgtgatacggctcgccggcgttgattttgtacgcgcggtagatctgctcgagcaggattacgcgcataagctggtgcgggaacgtcattttggagaagctaagtttgaagttggctcggcgcagaatcgcatcatccagtccgatggatccgccaatgaccaactggatatgactgacgccgtgcaatccccagtcttcgatcttcgctgcaagttcctcgctggagagctgcttgccgtcgatggccagggcgatgaggaacgcgtcgtcgcgcagatgtttggcgatgcgctcgccttccttggctttgatctgccgctctacgccctcggacgcgtgctccggcgtcttttcgtctgcgacttcgatgatgttgagtttgcaataacgcgaaagtcgcttggaatattcgtcgatggcgtcgcgaagataccgttccttcacacgcccgggcgcaataatgtcgatttgcatagtcgtttctccggaaacgtacgctgccaagtcgctaccgtacgtttcgtgcgggattatctgccttcgtctcagcaaacgtacgctgaagggccgtcagcgtacgtttgctgagaaaggggaggaaaaactctccggaaacgtacgctcacagagattcagcgtacgtttccggagaaggggggtacgctccatcagtcgatgatgccgtagaggcgatcgccggcgtcgcccagccccggcacgatgatcggacacggttcggcgagcttcttgccggtcatcggcgcgagcggggtctcgatcggcgcggccacgacgctcaggtcgcgggtggcttcataggcttcaagcatcataagctcggagacgagctcgcggaaaatggaagagggggtgttcttgtcgcgcagcacggtgagcttgtgctcaaccagcgggtgattcagtacatgcaattccatagctcccagcctacccgcagctttgccggaaaacaccttggccacaggcagtagtcgctgaaccatgactacattgttggctcgtgctgttcaattagcggccatatgacattcatggttcttaaccattgcggccatgtcgcattcctaacgttggtcaccgaaagcgttcccatcagcgctcatgcatttgggtgccggcgttttcgtcgatcgatgccaagaggaagggcatcaatacagaccgatattgatgaggagggacaatgtccgtattcactcagtgcgagcgtgcgcttgccgggatcgccgccgttgccaccatcgccgccagcttcgcggctgtggtgccggccgccatggccgacgaccagccgacctacccgtctgacatcgctaaggccgatccgcaggtactgctcaaggagttcaacaactactggactccggtggccaacccgaacaatgacgagaccactgcatcccacggcagcgtcactgatgccggcgttgcagtgcttggcaagagcgatgacctgaccgtggctatcaacaacaaggctgacgccgataacaccaatggtgtgaaggtggacgaccactacacccagcagcagcgtgccgtcattgatggtgcccagaacaatcgcgaaacctactgggatgccttcggtccgattatcggcgaatggttctatgaaggctacgaagcagatgccaatggcaatgtgccgctggccaagaccagcaagctgctcaacgacatggtcggctacatcccggtgactggcgccaagcatggtttcaattacccgcgtccgtcgcttaacaccgctgaaggcgactctatcgaccgcagcgccaacggtgaaaacgacctgaagggactggctcctgcgctcgctctgaagcgcgtggccggcttccacgatgatttccgcaatgtcgaccgtgccaatggctatggcggtctggtgcagtccgagtccttcccgtccggccacacgatggcgttctacacgtccggcctgaccctggctgccctgatgcctgagctcgccccgcagattgcagcccgtgccgccgagggtggcaacaaccgcatcgtgcttggtgtgcactacccgatggacatcatgggcggccgtatcgtcggtgaggcttccgccgccggccgtctgaacgacgacgtcttcttcgagcaggtcgtcaagcccgcccagcaggaactgcgcgactacctgaccaagcgcggccaagaagccggatacggcaacacccttgacgagattatcgccaacacgaaggccaccaccaccaacggctacaagaacctcaacaccgatcaggtcgccactgagcccgtcaccgatgtcaagtccgccgtggacgtgtacaccgagcgcctcacctacggcttcgacccggtcggccccaccgatcaggccgcccgcgtgcctgctggcgccgaggccctgctgcgtaccgtgttcccgaccctgagcgccgaccagcgccgcgaagtgctggcccgcactgaaatccagtccggctacccgctcgactccacttccgacggctggcagcgcctgaacctcgccgctgccttcagctctaaggtcacccttgacgccaacggcaacgtggtgagcgtcgagcccggtcagaaggctgaagtcgtcaagcaggaggccccgaacaacaacggtggcaacaacaacggcaacgaaaacaacaacggttccaacaatggttccaacaccggcaacgaccagaacaacgccggctccaacaaccagaaccagaacaacggcaacaagaagccgagcacgtccaagaacgcgtccaaggccaacggcaagctggccaactctggcgctgacgtgagcgtcttcgccggcatcaccgtgctgttcctcgccgcaggtgccgccctcgccaccgcccgcaaaatgctccgccactaagaatgattgctgactcatgtcagcactaattcccatctcagtgttggcttccctctccgaggaggagccaacactgcgtttgggctaaggcgtctgcgtagcttcccgctggagattccagaactatgatatgacccatattgctccctctctgaggggagctgccgaacgaggtgaggctgaggggagcaatgccaagtgggaggtgtctcgcca

SEQ ID NO: 1170 - DNA, 49640 bp, Unknown
  R81_24m  MAG No. k141_12733
aaagatgacgttttcgtagatcttccggaatcgccagtcatctgcgatccggatatggcaccggtccggctcgatcgagcccggacgaccatggagaaaacgaacgatcgaatccgaacgcgggtaaagagcctgcgcgacaccattgataaagccaaatttaagaaaacagatcagtatgcataagttttacatgccttcagcctcgtcaaccggcagcgggccccagaatccagtcacagccaggcagagcgtacaacatactgcgtagtacatggcgcgaatcccaatgaccaccatcgattgatgacggccacgaatactcgtactcagccttactgctttggctcatttctgttcacttcacgctggagtaccgagacacgttgagcggaaataccggtaattcacgtacggttaccgaccattggcctgaacggtactcagcatccgcagtcacttggggtatggtcatgacggagagccatcatgaccgatctctcattattctgggatgaatccggcgaggctggaactgaatctaaatattaaaacgcatgatgcacacgttgcggaattagtccaccagaacttcggcatgctcggcaggttcagcgggttcgatgtgacgggcacgcatggcatcgagggcggcggccaggtcggccgggtactgggaccggaccgtggtccagacgcgggtgcgaggatggcggaattcgagcttcatggcgtgcagccactgccggtcaagtcccaaagcttcagacagcaccggattggcaccatacatggggtcgccgcacagaggatgcccaatcgaggagaaatgcacgcgaatctgatgggtacgtccggtctccagattcacggataccagtgtggcctcatggccgaaacgctccaacacatcccaatgcgtaacggccggtttgccggccggagtcacgcagaagcggaaatcggacactttggcgcgcccgatcggtgcctcaatggtcgctttgttctctttaagaccgccctgcacgagcgcatgataggttttctttacctcatgctcggcgaactgccgacgcatctcggtgtacgcaaggtcggacttgcacaccaacatcaagccggaagtgcctacatcaaggcgagaaacaatgccttcacgcccggccgcgccataggaagcgatatgcacgccacgatcacgcaacgatcccaataccgtgggaccggtccagccaaccgaggcatgcgccgccacgcctacaggcttatcgactacgacgacatcatcatcttcgtagacaacagccatatcagttgcgataggctcaggcccggcctgttcctccgccaaatcaaattcgacggtctcccccgcctgcaacgtgctggaccgcgcaacttcacgccctaaaacgcgcgcctgtccggagtcaaccagatcggcggctttagatcgtgaaatacccagcattttggccacggctacgtcgaaacgcttacccaccaatgcatcgggagcagggaccattcgactcattacttggcgtccgcctccggctcagactgtagggattcgtcggattgctcgataagatccttgtgggagaacggctcccccataagaatcagaatcaccaggaccacaccggcgactaccagatagatatccgccacattgccaacggaccagccatagttaaggaaatccaccactttgccgttgaggaagccgtcagcgtacataacacggtcaatcaggttgcccagagcgcctgcaaacgcgaaagaaagcgccaccgaccatttcatggagatagtgcgcaccccagccacagcaagggccacgcaagccacaacggccaacagactgattacccaagtagcgcctgaccccatgcccaaggacgcgcccggattacgcaccaaggtgaaggacagcagtccgggaatcacgcgaatggtctgaccgttggataacgcggccatcgcccaagccttggtgagctgatcgacaatcagcgcagccgcggccacacatgcaaagacggccacgcgagtgcgcagccgtccctgttggttcgtcatacgacctgtacctgcctacgctcagttggtcttggacgaggtctggtcgacgtagttgttcgactcggaaacctgcgatgccagctggccgaggtactcggtgaggcgggcgcggtattcagtctcgaactgcttgaggctctggatgttgccctcgacgaccttggactgagcctgaaggttgtcgcgcacctgctcggcatacgtatcggctgcagagcgggtgttcttgtcgtacgcatcagctgcggaacgagtgttcttgtcatactcggcggcacgctgctgcacttccttctcgtagttgtcagcgtcatcgtgctgagacttggagtagttgtccgcatcctgacgagtcttgacggagtatgcgtcggcctcagaacgggtgttctgggagtaggtctcggcatccgcgtgaatctggtcacggtaagcgtcggcctcggagcgggtacgatccgaataggtgtcggcgtcggaacgagtacgagtggagtagtcgtcggcctcggagcgggtacgctcggagtagttgttggccttggtgaccaaatcgttgtacttgttctggctggcctcggtgatttccttggccttgttcttgcccttctccacgtactgatcgtgcagctgcatagccagagtcagcatggcggtggcgcgctcgggctcggtgcccggcatggaagcgacgccagcgatcttctgcagagaaccggtctcagtgctcggctcgaccttggaaacctgggcacgaagctggttttcacgctgcttggcttcttcgagctgacgagacagttcagcgatctgagcggactgctgctgagcggcggaaccctcctgctgagcagcggcgagctgacgggacagctcctcgttggccgcgcggaactgatcacgttcctgctgaatggcggcgatctgctggccgacggcttcctggttaccggaggcctgagcggcctgggcggtgagctgatcgatttgagcgttcagctgatcgacctgacccttgagctgctcattctgggaggacagcgcgcggttggattcctcggcttcgctgagcttggcagaggcaagctgtgccgcctgatcattgccagcctgagcggcctgctgggcctgagccacagcgttcttcaaaccagcattctccgactggagttgctgcacctgaccggtaagatcggagatcttcgcattaaggttggtcacgtcagggcccagagactgagtggcctgaccgccggctaccgcctgacgtccaagagcctcgacggtttccgtgacctgatcaaggaagtcatcgacctcgtcgacatcataaccttccttgaatcgaacagtctggaaggtatgctccctaatatccttcggcgtcaacagagccataaatcttgcacctcgctttggggcattgcccgcacttacgttggtctcaagtcagaatgctatcacgaccccatcgtttcagaacattcaacgtgggtttttatgccagatatatgcctccggcgggtcaaaaacggcctcagaacactatcagaacaacactttctagtaccaccaacgcaaaatacagcacgatgaagctgacatcaagataaatcgagccgagcggcaatggacgaatatagcgacgtagccagcgcagagggggttcggtaatggaatacacaatgttgatcagctgggccaccacaccacgtggataccagtttcgtgcgagaacggagacccagtccagaatcatgcgcacgaacagaaccgtgatatacgcgttgatgagccatgcaagaatgcggccgatcagagagaacactaaggaaagcatgctgacagactaacaaccgcgcatgaaaagtttgctcggagcgcaataagaatcggccgactccttgctgggagtcggccgaataccgatataacgtcgaatgcaaaaactactgaaccggtcagtcagcgaacaaatcgtgtgccgaggttggttttgtcggctcttcgaccttgatgttcacctgcgccgggctcaacaggaacacgcgcggagtgacacgctcgagggaaccacgcacgccgaacaccacgccggcggagaagtccacaatgcgatatgccacggcttcggccacaccggtgagattcagtacgaccggaacaccgtcacgcaatgcgcgaccgaccagctgagcatcctcatatgacttcggatggatggtggtgattctgttcacacggccaccggggaacggcttggtagtcgacgatgcggcaggcgcggtggttgacgccagcggcgtgaccgtatggtcggaatcaaatgcggacttcgaagccggcttctgctcctcgtcctcctcgatgtagtcgtcctcatcgtccacaacgtcactcatgcccagataggacatcgcgtttttcatgaacccagccatggatcaatcctttcagcgcaggaagtcagggatgtcgagatcgccagccggatcgttcacggcgatattcggatgagcggaagtcggatcatcaaaaggcaacgatgcggagtcaccgatagccggtgtgaatgccggttgggcagtggcagcgggctgtgcagccggtgccggtgctggagctggctgtgccacgggagtcgcaggatcggcggcggttggcacaaccggcgtcaccgtgctctgagtgtcgtcatcttgagcggcgacggggtcaaaaccagcagcaataacagtgacacgcacttcatcgccataagcatcgtccagagcaagaccccaaataatctgggcttcagggtgaatcgccttgcgcaccagttcggtggcagcagaggcctcctgcaacttcaggtcggtcggaccggcgatgttgatcagcgcaccgtgtgcgccttcgatgctttcctcaagcagcggagagctgatggcgatttcggcggcctgcgtggcacgatcctctccccgtgcggaaccgataccaaacagcgcagtaccagcaccacgaagaatggagttcacatcgttgaagtcgacgtgaatataggagttcatcgaaatcaggtcagtgatgccctgaacaccggcaagcagtgcggtatcagcggtcttgaaggcctcaatgatgccgatggaacggtcggaaagctcgagcagacgatcgttcggaatgacgatcagcgcgtcgacttccttgcgcaggttgtcgatgccgtattcggcggaagcggaacgctgagggccttcgaagctgaacggacgagtaacaaccgcgatggtgagagcaccctgttgatgagccgcacgagcgacgatcgggctggcgccagtaccggtgccaccgccctcgccgcaggtgacgaacaccatgtcggcacccctaagcgcctcttcgatatccgactggtggtcctgggccgccttggctccacgctccgggtcggcaccagcaccgagaccacgactggacttatcggaaagggaaatcttgacatccgcatcagagcgcagaagatccttcgcatcggtatttaccgccacaaattcaacattctgtaatccctcggcaatcatgcgattgacggcattaccgccggcaccgccgacgccaacaaccttgatgttggtcttgtcgttgaactcattctgcgcgatctcgctcacgtttggctcctgtcacttcacggttacacccaagagtagcgcaaacaggctactcttggagggaaattcacgcgcagaatggcgcgtgttgcgtgtattttcagtattttctcagtaactggcgtccattgggtcgtcaccgaagagcgcctcacgctcttcgtgggtggtggtacgcgattccaaccacccatacggcaagtgcaccttcttggcgaaacgcacgcggccgcgcggtttgtcgaccacgcgtggcgggtattcgatagtcgggtcgagcttgccgatctcgcggtccacatcggccaggctctcgcattccataaaggccttgcgggtggacccgcccaccgggaatcctttcagataccaggcgatgtgcttgcgcagatcgtggacggccatcatctcatcgccctcataaaactcggtaagcagctcggcatgacggtgaatcacccggcagacctcgcccagattcgggttgagccgttcgggattgccctcgaaggcgtttttgatgttggcgaacagccacggccggccctgacatccgcggccgatggccacgccgtcgcagccggtctcgcgcaccatttcgagcgcgtcctcggcaccccagatatcgccattgccgaataccggaatgttgaggtgttccttgagctcgccgatgcgggaccagtcggaatgaccgccatagtattcggcggtggtgcgggcatgcagggttacggccttgcagccctcctcctgcgcgatgtgtccggcttcgaggaaggtctcatggttatggtcgatgccgacgcggatcttcgaggtgacggggatgcccgccggctcgcatacggcgaccacgcgctggatgagctcggtgaagatgtcggttttccatggcagggccgagcctcccccgcgacgggtgaccttgggtaccgggcaaccgaagttcaggtccacatggtcggccatgttgccgtcgaccacgattttcgccgcctgttcggtgatggacggattcacgccatacaactgcagcgaacgaattttttcgcttttggcgaaatggcagagacgcagggctttcgggttgcgcgccacgagggcccgcgcggtgaccatctcggccacgtaaagaccatcgggaccgtattcctcgcagatcacgcggaacggccagttggtcacgcccgccatcggcgaaagcaccaccggggtcggcacggtaatgttgccgagctgcacgggggcgatgtataccggagtctcgggccgtgccggcgcgtccgtacgcgggtcgagattgttggtctcgtgagtagcggtgatggtggtttcggtttcagattctgccatgtggttcctgttctgaaatagttttggctcccctctttgaggggagctgccgccgtaggcgactgaggggagtcgcctcagcaagagcccccccctcagtccacttcgtagacagctcccctcatagaggggagcctctatacagacccgtctttagtacagaccgccggcttcctgaacgccggactcaggccaagcctcgccgcccatttccacgggcttcaggggcacgcgggtgcgcttctcgccgatgcgggcggccacgtaatcggccaccttgtcaagagcgacgcgctcctgggccatggtgtcacgctcacggatggtcacggcgtggtcctcgagggtgtcgaagtccacggtgatgcacagcggggtgccgatctcgtcctgacgacggtaacgacgaccgatggcaccggactcgtcgtagtcgatcatccattcgttgaagcgcaggtcgtcggccaggttctgggccacggtctgcagttcaggcttcttgctcagcggcagcacggcggccttgaccggggccagacgcgggtcgagacgcagcacggtgcgcttgtcgacgccgcccttggtgttcggggcctcgtccacatcgtaggcgtccacgaggaagcacatcagggaacgggtcagaccggcggccggttcgatgacgtacggcacgtacttctcgccggtggcctggttgaagtagctcaggtcttcgccggagtgcttggagtgcgcgctcaaatcgtaatcggtacggttggcgatgccttcgagctcgccccagtcggaaccttggaagccgaacttgtattcgatgtccacggtgcgcttggagtagtgggagagcttctccttcgggtgctcgtagtggcgcaggttctccggcttgacgccgaggtcgatgtaccagcgggtgcgggcgtcgatccagtactggtgccattcctcatcggtgccgggcttgacgaagaactccatctccatctgctcgaactcacgggtgcggaagatgaagttgcccggggtgatctcgttacggaaggacttacccatgttggcgatgccgaacggcggcttggaacgggaggaggtcatcacgttcttgaagtcgacgaagatgccctgtgcagtctccggacgcaggtagtgcaggctgttctcgtcctcgaccgggccgaggtgggtgcgcagcatcatgttgaagtcgcgcggttcggtccactgtccacgggtgccgcagttcgggcagacgatgtccttcatgccgttttccggcatcttgtcgccgtgcttctcggcgtaggattcctcgagcttgtcggcgcggttgcgcttgtggcagttgaggcactcgacgagcggatcgttgaacacgctcacgtggccggacgccacccacacttcgggcggcagaatgatggaggtgtcgacaccgacgacatcaggacgggtgacgaccatggagcgccaccattcacgcttgatattgtccttgagagcgacgccgagggggccgtaatcccaagcggaacgggtgccgccgtaaatttcgccggcggggaacacgaagccgcgacgcttcgcaagggatacgacttcatcgagtttggactgagccacaatgcaccttctggtttgaacggtttggggtctaataacaaccgcttcaggatagccgtatacggtgacaggtcaggcggcattgtccggtatatgttccgcgtctcacgagcggccgttcgcagcgattcctatatcgcaaacacctccatattgttcctgttgttttgcccttccccaatttgtaccactgacatcgcgttagcgtcacaaattcgggagatgttgctcggcggaggcgtccacatatcacgaatggacgggacgcgccagacctgacgacacgtatcgaacaaatccgtcacgataatgtccatgttggcgcatagcgtcggcactgtagtgcagggggactcgcatgtggttcgcgagttgagaaaggcctgagcctgacccttagaacctgttggttaagaccatcgtagggagcagtaaatgagcaatagtgcatcatcgtttgccgatgtgtccagcggttgtaccgccgggactccggttccagccgattcacccatccgcgacaatatcgccgatgccgttcgccgcgtacgcgagacgactccattggcccagtcattcaccaattttgtgaccatcaatttggttgccaacgcgcaactggcggccggcggcactgtggccatgagtttcctgccggacgacgtgatcgaaaccgcgaaaatcgcgggcgcgaactacatcaacgtgggcacgctgctgccgttctataaggatgcgctgcccgaaatcgcccagcgactcaactacttggacaagccgtgggtgctcgacccggtggccgccggcatcggccacacccgcaccgccattcttcagaccttcaaggccgctcccccgaccatgattcgcgcgaacgcctccgaggtaatcgcgctggcgaacatgtgggggctcaataccgaaaccgtgggggacgcttccgagcaccgccccgccggagtggaatccgtcgacgacgtggagtccgcaaccggtgcggcggtggcgctggcacagtatctgaccgaacagcacgccaagcattcctcccatgacgcttccacccgctgtgcagtggctgtgtccggcatcgccgatctggtgaccgacggcgaaaccgtgtaccgactgccgggcggcagcgcgatgatgaccaagatcatcggtgcaggctgctcgctgggcggcgtggctgccacatatctggcggtttccgatccgttgaccgccgctctgtccgcgtctctgctgtacaaccgcgcgggagagatagccgatacgacttcgcacgggccgggctcgttccaggtcgcgttccttgacgcgctgtggaatgttaccgccgaacaggtggcggaatccgagattttggtgcagtagtttcagttccctctgatgagggagctcataacagtttttcccaataagacttccacaagaaacaacaaaggtaggaataataatgagtaatgaatacccatacgcctccatgcgagacaacttcgacttgtccgcgtacttcgtggtggggccggaggactgcaaaggccgtccgctgaccgacgtggtggatcaggctctgcgcggcggcgcaaccttcatccaactgcgcgccaaggaggccgatgcctctgagctgaccgacatggcccgcgacatcgcgcagatcatcgaggacaatgagaagtccgattccgtggcctttgtgatcgacgaccgtgccgacgtggtgtggcaggcccgccgcaagggcatcaaggtggacggtgtgcatatcggccagaccgacatggagccgcgagaagcccgcgccctgctcggcgacgaggccatcgtgggtctgtcggctgagaccgaaagcctcgttcagctcatcaacgagctgcccgacggctgcatcgactacattggcgccggccctctgcacgtctccaccaccaagcccgaggcttccgtgggcggcaacgacggctccggcaagacactggacgccgcccagatcaacaccatctgcgttgccagcgaattcccggtggtcgtgggcggcggcgtgaccgcagccgatatggccatgctcgccggcaccaaggccgccggctggttcgcggtctccgccatcgcgggtgccgagaacccggaagaggccgcgcgcaccatggtcgaaggctggaaggccgtccgcggcgacaagaagcacggctacgcgccgcgcgtcgtagcccacacccccgctgctgatactcaggctgctcaggaaggggccgcaaagcctggctccgaggccactgagaagaagttcaccaacgccaaggacgccaaggatgcccagaagctcgccaagcagcagcgcgtggacatcgccgcccgtggttccaagcagcgcgacaaggcgcacatccgcaagaccaagtccgtaccgttcacctatcagtatggttcctacgacctggaagtgccgtacaccgaaatcaagctgagcgacacgcccggcgtgggcccgaacccgccgttccacgactacaacaccgaaggccccaagtgcgacccgaaggaaggtttgaagcccctgcgtctcgactggatccgcgaccgcggcgacatcgaagactacgagggccgccgccgcaaccttgaggatgatggtaagcgcgccatcaagcgcggccgcgccaccaaggaatggcgtggacgcaagcatgagccgatgcgcgccaaggaccacccgatcacccagatgtggtacgcccgccacggcatcatcaccccggagatgcagtacgtggccacccgcgagaactgcgatgtggagctcgtgcgctccgagctggccgccggccgcgcggtgatgccctgcaacatcaaccaccccgaggccgagccgatgattatcggatccgccttcctgaccaagctcaacgccaacatgggcaactcggccgtcacctcctccatcgacgaggaagtggagaagctgacgtgggccaccaagtggggcgccgataccgtgatggacctgtccaccggtaacgacatccacaccacccgtgagtggattcttcgcaactcccccgtgccgatcggcaccgtgccgatgtaccaggccctcgaaaaggtcgaggatgatgcctccaagctgagctgggagctgttccgcgacaccgtgatcgaacagtgcgagcagggtgtggattacatgaccatccacgccggtgtgctgctgcgttacgtgccgctgaccgccaaccgcgtgaccggcatcgtctcccgcggtggctccatcatggccgactggtgcctgcgccaccaccaggagagcttcctgtacacgcacttcgacgagctgtgcgacatcttcgccaagtacgacgtggcgttctctctgggcgatggtctgcgccccggctccctggccgacgcgaacgacgccgcgcagctttccgagctcatgactctgggcgagctgaccgagcgcgcctgggccaaggacgtgcaggtgatgatcgagggcccgggccacgtgccgttcgacaccgtgcgtatgaacatcgagctggagaaggccgtgtgcaagggcgccccgttctacaccctcggaccgctgaccaccgataccgctccgggttacgaccacatcacctccgccatcggcgccaccgagatcggtcgttacggcaccgctatgctgtgctacgtgaccccgaaggaacacctcggcctgccgaacaaggatgatgtgaagcagggcgtgatcgcctacaagatcgcctgccacgccgcagacatcgccaagcaccatccgcatgcgatggatcgcgacaacgcgatttccaaggctcgcttcgagttccgttggctcgaccagttcaatctgtcctacgatccggacaccgccatcgccttccacgatgataccctgcccgccgagccggccaagatggcgcacttctgctcgatgtgcggcccgaagttctgctcgatggccatctcccagaacatccgcaaggcattcggtggcgaggccgctcagcagcaaatcgtgaaggaggctgctgctggcatcgactccgaggcactggctaaggccaaggccaatgtcgataacgacgtggtgtccgccaacgtgctcagccccgaagaaatcctcgccggcatggatgcgatgagcgaaaagtacaccgcccaaggcggcaagctctactccaccgcccaggagtaaacctctctggctcccctctctgaggggagccaattattatgcccggtggtgtcttaattcgggacgacgctcgactcgctcgaaggcggtgacgaggtcggcagcccggatcgcgccgcggcggtccttggcggccaccagagcggcctcggtccagatggcgcacacttcggcgccactccagccttcggtccgctgtgcgatatccaccaacggcagttcgccctcgattgacaacgaacgggcctgcacctgcagaatgcccaaacggtcgcgctcagacggcatcgggaaaggaatctgccagtcgaaacggcccggacgcaacaaagcgggatccacgtcctcaatacgattggtcgcagcgaccaccacaacattgcccttggactcgaaaccatccatcaacgtcagcaactgcgccaccaagcgcttgccgacgccattggtatcgttctcgcgcgaggacgcaatcgaatcgatctcatcaaagaagatgatggcgcgcttgtccgcctgcgcggcggcgaaaatcatgcgcagcgtttcctcactatcgcccacatacttgctcacgatggtcgggccggacaccagatagaactgcgcgtccgccacattggcgatgatgcgggccagatgcgttttgccggtgcccggagcaccggtgaagatcacgcccttgatgggcttggcaccgatcgcacgcatctgcgcactgttgcccagctgcgtttcgataagctccttggcgcgcgtgatcacctgctcataaccgccgaacgaatcgaaggtaagcgacggatcgctgcccggcgtgatgcggtactgcttgatgtcgtcatcgtgatcggattcgcctgggcggatggccgtgggccacagcactcgttcgatgccgaacaggtcggtgaactgcacggtgttgccgggcatgatcgaattcgggtaatcgccttcaagcagttcgaggccgtcggaagtctccaggaccacgccttcgttgagcgcacggcgcacgatgcccacacggggcttcaacggccacacatcatgcggcactttacgatagaaatccgtgccgacgagcaacacgtcgcccacatcgaacacctcctgacgcggaaatgtgagctgtgtggtgtgcccattaggcattacgccaaaatatgcggtgcgttcatcgtcaaaaccggtgatgcgcaccaagacgccgtcacggcgcagtacatcgttatcagccatgtcccctcccgaacatttcatgaatcaatcgcaatcagcaaaccctcccatctcaccacaggagcggcaaaacatcaaggaaaaccgctccgaaaaacatcatgggccccacttagaatgaacactatggcacagattgcaacatctacacttcccgctgttctcgcgatctccggctccgactcgtccggcggtgccggcatgcaggccgatctgaagaccatgctggcttgcggcgtgttcggcatgagcgccatcaccgcgctcaccgcacagaacaccaccggcgtgcgttccattcaggacaccaaaccggacattctcgccgaccagatcaacatggtgtttgaggatattccgccggtcgcggtgaaaatcggcatggtgtctgccactgacatcatcgacgtcattgctgaacgactcaccttccatcacgccacgaacatcgtgctcgacccggttatggtggccacttccggtgccaagctcatcagtgacgatgccattgcggccttgaccggcaagctgttcccgatggctacggtcgtgactccgaacattcccgaggccgaagtgctgaccgatacgctgattcgcgatcaggaggatatggaggccgccgcccaccgcatcgtggagcgttacggctgtgccgcgctggtcaagggtggtcatggcaccgaggatgccaacgatgtgcttgccgagacggatggaaccgtgacctggtttgatggcgcgcgtatcaataatccgaacacgcacggcaccggatgcacgctgagctccgccatcgcctcgtatctggcgcttggcgacacgttgcccaaggccatcaagcatgcgaagaagtacctgaccggtgcgctgaagacccagctgaatctcggccacggctccggcccgatggatcatttctggaagtatcgctgacataagtgtggttgttaagctccccttgccaggggagcttaacactactgaaaaaggagaatcatggttcttgaccgtaatgccgttactcaggaagtgccgatcgacccggaaaccggcaaaccgtacctcaacaccgtggcagccatccaggtgtcggccaatggcgtgggctccgaggtttcaccatacgtggctcaggccgtcgaagtgattcgcgaatccgccctgccgcaggaaaccaacgccctgttcaccaacgtggaaggcaatctggacgacgtgctcaaggtggccggtgaggccgccaagaagctcgccgagcagggctaccgcacttctctggtgctgcacatggatatccgtcccggtttcaccggccagctgaccgaaaagcccaagctggtggacgagatcctcgccgacaagcaggcgaaatagcaaagcatcgcttccaccagcaagggcatgctttgttattacacgtttcatggggcggtaactcacccatagggcggtaaatatctcatggggcggtaaaaccctcatggggcggtaggcgaaaacggctctattctgcggaaaggcaaaatccgctaaccgccccatgggccaaataccgccccatgagtgttttaccgccccatgggaatcacggttctgccttctttcaacggggtaagagcgtaagtggggcatatataggagcgttacaaactctgttatcgttcataatgtgaccgcaacgcggcgtgccacaagatcgaacctatagttaagccccatgtagtgagctatctcacaacgattggctcgctacgtggaattcaagacttggactgcaaacgtcgttcatcccacacaatgggagggcgaacggaacacgcagtccaatcaagagttcgctcgccgcaacatcattgagcagttgcacgcgggcaggtttgcaagaagagggctcaaatatgactgctgctgaacagcagatttccggcaatcccgcggctatggaaagcgcacaagcacgtaccaccgtgacggatcaagccaaggttcaggatattatctcgcgcgtggatcgcgcacatgaaaccccgatgttccatcgcatcgtggcgctggtcgccgctggcatgctgatggacagcatcgacgtatatattggcagcgccgttgcctccagcgcgttggccacacactggtccaccgttgcgcaaaattccacctttatgtccgcaggcttcctgggtctgctggtcggttcgctgctggccggcttcgtcggtgacctgaagggccgccgcgtggcttaccaaatcaacctgctgctgtttggcggcttcaccttcctcggcgcattcgccccgaacatggccgtgctgtccctgtgccgtctgggtgccggcctgggcctcggcgctgaaatcgtcaccggcttcgccatggtcaacgagttcgcaccgatgaaccgccgtggccactggtgcgcgattgtctcgctcgtggccaactgcggtgtgccgatcgctatgctgctgtgtgcatggatcatcccccgctggtcctggcgtccgctgttcgtggccatcggtctgggggccgccatcatctggtggctgcgccgcgacatccccgaatccccgcgttggctcgccgtgcacggccgttacgatgaggccgacgccatcgtcaagcagcttgaggccaacggctccgaactgatcgacgcagccgccaaggccgacaccagcgacacccgcaacgccggcggccgttcgctcggcatctgcctgcttgtagctgtggttgctgtggccgccacgaacgtgtgctcctacgccttcacttcttgggttccgacgattctggtcaagcgtggtattaacctgtccagctcgctgctcacctccacggcgatgatgctcggtgccccggtcggctgcctgattggctctctgcttatcgaccgcatcggccgcaagcgcacgattgtgccggccttcctgttcactggcgtgttcggtttaatgtatgccttccagacctctaccgtgagcgcaattatcgttggcttcctgctcatgatgtgcctgtacgtgcttatggcttccgtggtggctgtgtacgctccggaactgttcgccaccaaggttcgcttccgttgcgtcggcttcgcgaacgccgtggccaagctgctcaatgtgttgatgcctatggtggtgggttggatgcttacctcgcttggtgccacgtccatctttgtggccatcagcgcaattgctattgcatcgatgctgattgtcggcttctttggcgcggagactgcgcagaagtcggttgggtgatcggtttcctcacagtggaataactgctgataatgtccattcggcgtcttgcgtggtgatatgcagggcgccgttttgttgttctagtaattgtcggtaacggttgagaccggtaccggtggataggtccgcactgccatccgcatccgaatccgatgacgtgcgggccgtgtcgatgcaggcgatgcggacggtgtccagtccgatgccaatcgtcattacatagcccgcttccgggtcggcatgtttggcgatgttgccgtacagttcctccagcagcccggcgatcaggccactccgaccggctgcgccatgagcaccggaaataatcgtctgaccttcaaagccaagctctgataatcggcggtcaccattgctcgcaacatcacgaatttgctcggctagcgggcaatcagcgtctgtgatgccacatgcaatgccagaagcggcatcaacggtcgaatcatgcggagtcactgcactgtgcgccgcttctcccctgccttcaataacatcaatgacctgatgcgtgcgatccaatgcgcccatagccacgctacgcagttcgcataattcttcttcagaaggggtcttgccatcggcaatatccttgtcgaatcgcaaaatcaggtatgccaaatcattggatacgtaatcgtgaatgtcctgagctgtgcgttcctgctgacggcggtgagccaactccgctcgagccaagctgcgttcgtgattccatcgcgccgccatgccaccaagcatgaagccaataaacaacacggccactggcatcacaccatagagggcaatcgcaccaagaatcacttgcccagtgcgatgctcggcagaagaaccgctcgattcataggcgcttccggtgaagtcgcttcccgactgccctgcgctgtcagacccactggatgaagagccaccatcagcagcgccaccatcagcaacactaccgtctagggcactactactcgccgcgccatccgcagaaccgctcatcgtgtctgagccgccatcaagccaaggaatggccacgccaccacgcgacaacatccacaccacaacggcaatgccggcaaccgccagcgccaatcgcttatcggcgtatccggcaatacccaccgccaataacacggcgagcattgcacccgacggcatccagatcggactcatgcacaacactatccaagccaccgctaccgccacgcatccggtgaccggacgaaacgccatccaccccacaatggcaacgaatatgaactccgcaaggcagtccgccgccgagacactgtcagcagccaagcccgccatggtttccatcgtgcatatcaaggcaacaaccagtatggcaatcaacagccatgcattgcgaacaccgctatccagctcggccaatcggtgtcgtaacgctttcatagcagttcctttcctaccatccatgccgttgcacataccgcccatgccaactcttaaatctcatgccgtttcacgcagattgatatggcatgagcgcgactgcgagcgccgagtttggcgagtgcgcggcgttcaaaagtcgccacagtggccacgctgatgcccaatcgctcggcgatttccttggtggtcgacccatccgcatacatacgcagggtgtcgcgttctttgccggaaagcgcgccacggtgcgcgtatgacgtatcttcgagcaccgcgtaggcggttgcggcatccatgaaggacagcgaattaccgctcccctcatctcccagtaccagctcattggtcgacaatccttgggctgcattgcgaatagcgagcgcaatgccgttcaaatcggttttaccaaccaaggcctgcgccccgcagcgagccgcctcgtcgtgaaatgacgcgagcgcgtatgaggtgacacccaccagcccaacctcgggtgttttggtacgaatcgcacgacagacttcggtaccgggcacgtcgcccatagacatatccgtaaccagcacgtcaggccgcttggtggggctcaggcatcggctgatggccacggcacccaaatcgcaggtccatatcacggcaaaatcgctggacatgcgctcgattagcgcgccgaacactttcagcgcatacgggtcattgtccacaatgccgatgcgtatgttgcggttgcgcgcttctcccattacattcaccccttcagtgtgcccgacgccgaactgctccgtcctgacatgtcatggtcactatgacaactatcattccacatttcctgcgcgatttacgatggaatcatcatcaatccttgacaaggcggtaaaggaggactgcaatgaaccgtgcacaagcactcagcaagctcaacaggagcgatatgcgcaatgccgccgccgagcgcgggacgcaacgaatattcgcgtggaaccgcgcgcattggattggcatggttgtactgatagcggtgttgttgctgctgcagtggagctcatcaatgtatctcatgcccgacgaggtccttgacagggctgccaaaaacctgttcgtatggttccccggtatggttctgcactggccattggtgttgggaatcaccaacctgatactcggttcgatacgatccggcagtctgtctttcccattggcgagcgcaatcatcggaccgctggcattcggctgtaccaatcttcgcttacggccggggttcccataccgttcctgggctcagtggtggaagctaatgcacgctgaaagcggccatcagctattggttcattcgttgatcggctcggccatgctgttgatctgttatacggccgttgcgttcatctgctatgcaatcggacgctacggtctgcgcgaattgtttgtggatccgaatccgcagacggcgagcggacgactgctcacatggattcgtcaggatgcgattcgcttcggctgctggctggcgacggcaatcatgtacggcttgctattggcgctgaccttacggggcggcatggctgcgatggccgccgcgttgctaatcaattttgtgattccgcccgccttgctggtcatcaacggcatctacgcgctacgcccggcctcactgacgtatccgtggaaaagcctgctgttcccgttggcgtgcacactggtacctgcgccgatgctcatggcgctcatcacggtgtatgaagacacgtgcccgataggaagtacctgcacgctgatcggcgaccgatacctctcctggggctcgatggatcaggtcttgcatttcgtcatcgtgttcgccgtggcgagcttcctcggattcggcgtggtgtgggccgtgcggtggattgtggctcgtcgcacaaaataagagagaccaaaatatactggaatcaggggcttcgtgcaatgatgcacgagccgatccaagcaaaggggctgaccatgagcgagaaactgatggaacagtaccggttgcgcaaacaacgcaaacgccgtaacgcttgtatcgccgccatcgtgacagtagtgcttgtccttgccgtcgccggcggcgtatggtggacggccggcgatggcagcgcactggttcgcaatatgttcaagccgaaggccacgcctgccacacagccggtagtcgacagcaccgcagccttcgcctaccgcaccgcaccggaattcctggcgatgggagccggcgaccgagacaccggtaatgtgaactactcccctgcttcgatgtggatggcgttggccatcgccgcgcagggcgccaatggcacgacccgctcgcaactgaatgagctgctgggctccggttcgctggccgacagcgactaccaatcgctgctgagttcgatcaacgggcaatattcgggggcgaaatccgagatgagcgccgcgaactcgctgtggatcgataacgactactctcttgccagcgattaccaatccaccgtcaagaaaatgttcgaggccgaagtcaccacgctaccgttcgacgatcaggccgccgccaagatgtccgattggattgccaagcatacgaatggttcgctcaagccgaagatcacgctgcgtgaccgtgaagtcctgtccatcatcaacaccgtctatgcggatggccgctggaaggatccgttcgaagagcagtccaccggcgacggcaccttccacggcgaagccggagatgctcaggtgccgatgatgcgccggaccttcagccaaatgacttacagccatgatgagtacaacacttggcagcgggtggagattccattcgacaacagcggcaatctggccatcgtgctgccggccaaagggcatttcgacgagctggccggcaatgccgagaaactcggatgggcgttcggcacgtgttcgtcggcatcccctggcgaggacgcaatgggttgcaccgcggacagtttgcccggatggggcgtctccgtcaactcggccacggtgaacgtctcgctgccacgattcaccgtcgacagcatgttcgactcggaagccaccatcaaggcattcgaaaaactgggggtgaccgatgcgttcagtgcaggcgacgccgacttcaccaagatggtcgacaccgatttgcacggcgagaatctgtatatcggttcgattctgcaaggcacgcgcatcgaggtgaacgaggccggtgccaaggccatgtccttcaccaaagccggcgcagacttcactagcgcgccggtggacaacatcgagttcacggtggatcgcccattcctgtattcgtacgtcaccccggacggcataccattattcatcggtgcggtgcgcaacctcggcggagtcggtggagaacactgatactttcccgacagtccgtcaattagggtgtatcgtttgacgcatggctacgatgaaggaaatcgcgaacaaggcgggggtttccgtctctacggtgtcgctggtgctcaacggacgcgacgaggggcgcgtaaagtccgaaattgcggacaatgtgcgcgccatcgccaccaagctcggctaccggtcgaatccgctggccagttcgctgcgtacaggcaagacgcacatcctcggtttcatcagtgaggaggtggccaccaccccgtacgccggcggtatgattctgggcgcgcagaccgccgcaagccagttcggctatatgctcatcaccgtgagcaccgacggtgagaacagcgagagcgaggaaatcgccgcactcaagcgatacggcaccgacggtttcctgtacgccaagatgtcgaaccgcatcacccatgcgccttcttcgctggccaagacgccactggtgttggtggatgccaccgactcgcttggcaaaatcccgagcgtcgaaccgaacgagttccgaatcggctacgacgccaccaccagattggttaaggccggatgcgcacgtatcgcctatgtgggttgctcggaaccgatgattgcgcaggatggtcgtttggaaggctatcaggcggcgctcagggacgcctgcctcgactatgacgatcgtctggtcgtcaatgtgctcaataacgggccggcactgaccgcagtcagcgatttgttcgacgccgagcatccggacggattcttctgcttcaacgatgcccgcgcctggtatgtgtacgaatgcgccgcacgccgaggactcacggtcggcaaggacatctccgtgatcggcgtggacaaccatcgcgtgttcgccgaaacgctggaaccgatgctcaccactgtggaactgccgcatttcgagatgggctactgggccgtggccaagctggtgtcaattatcgaaggacgctcgatggacgacgtctcacggccagcgaccaccgctcccctgccgccgatcgacgcgccgattccggcgaagatccactgcacgctgatcgaaaaggcctcggtgaagtaaccgaggcccacgcgatttctcaaggcctccgttcagcacggaggcctttttgcgtctcgaacgggtacgacacgccgatgacgtcacgacatccgccggactgatacgatgcccgcatcgtcacagcgacgcacggcgaccgggaggtgcatggtgagaacatacgagaacgcgcaggagctcaaagaggagatcagtgcggcgttccgcaaatacattgcggagttcgacgatattccggaagccctgaaagacaagcgcatcgacgaggtcgagaggaccccggcggaaaacctcgcctatcaggtcggttggaccaccctgctgctgcagtgggaggatcgcgagcggaggggccttccggtgcgaacaccgtcggatgagttcaagtggaaccagctcggaaagctgtaccggtggttcaacgacacctacgcccacctttcgctgcgggagctggagggcatgttgaccgacaacgtcgacgccatatatatgatgatcgatgcgatgagcgaggacgagctgttcaagccgcatatgaggcaatgggccgacgacgccaccaaaacggcggtatgggaagtgtacaggttcattcatgtgaacaccgtcgccccgttcggatcgttcaggacgaagatccgcaagtggaagcggatggccctataggttcggcgcggcccgcaacccctttgtccagttcgtctacgccccgatgatcaacgccggaggcgtcacccgctgggctggtgcactgattggctccatcgtcctgtccgccggcttcatggcagcctgctccctgtccgaggctgtcaccgaacgctactcccgtaagttcaacttcgaatacggccagtcccgcgcctggggctccttcagctacgccatcgtggccctgtgcgccggcttcctgttcaacatcagcccgatgatcaacttctggatcggcaccgcctgcggcgtcggcatgctgctcatctacctgttctgggttccggccgagcagaaggaagagctcaagaaggaagccgatccgaacgccgagaagaccaacccctccttcaaggagatggtcggcgtgctcaagatgccgaccctgtgggtgctcatcgtcttcatgctcctgaccaacaccttctacaccgacaagcagctgcgtcagatggaagctgccaaggcctgaaaggacacaccatgactgacttcactcccgaaacccctgttctcacccccatccgcgaccacgctgctgaactggcaaaagccgaagccggcgtggccgagatggccgccaagcgcaacaaccgctggtacccgaagtatcacatcgcctccaacggcggttggatcaacgatccgaacggcctgtgcttctataagggctgctggcacgtgttctaccagctgcacccgtacggcacccagtggggtccgatgcactggggacacgtctcctccaccgacatgctcaactggaagcgtgagccaatcatgttcgccccgacccttgaagaggagaaggacggcgtattctccggttccgcagtaatcggcgacgatggcaagctcaagttctactacaccggccaccgttgggccaacggccacgacaacaccggcggcgactggcaggtgcagatgaccgcgctgccggacaatgacgagctgaccagcgccaccaagcgcggcatgatcatcgactgcccgaccgacaaggtcgaccatcactaccgcgacccgaaggtctggaagaccggcgacacctggtacatgaccttcggtgtctcctctgcggacaagcgcggccagatgtggctgttctcctccaaggacatggtccgctgggaatacgagcgcgtgctcttccagcacccggatccggatgtgttcatgctcgaatgccccgacttcttccccatcaaagacaaggacggcaacgagaagtgggtcattggcttctccgccatggggtccaagcccagcggcttcatgaaccgcaacgtcaacaacgccggctacataatcggcacgtgggagccgggcggcgaattcaagccggaaaccgagttccgcctgtgggattgcggccacaactactacgccccacagtccttcaacgtggacggccgtcagatcgtctatggctggatgagcccgttcgtgcagccgattcccatggaggatgacggctggtgtggtcagctcaccctgccgcgcgagatcacccttgacgatgacggcgacgtggtcaccgcgccggtcgccgaaatggaaggcctgcgcgaggataccctcgaccatggttcgatcacactcgatatggatggcgagcaggtcatcgccgatgacgccgaggccgtggaaatcgaaatgaccatcgacttggccgcctccactgccgagcgtgcgggcctgaagattcatgccactaaggacggtgcctacacctacgtggcttatgacgaccagatcggccgcgtggtggtggatcgccaggccatggccaacggcgatcacggctaccgcgccgccccactgaccgacgccgaactggcctccggcaagctggacctgcgcgtgttcgtggatcgcggctccgtggaggtctacgtcaacggtggccaccaggtgctgagctcctactcctacgcctccgaaggcccgcgcgccatcaagctcgccgccgagtccggtagtctcaaggtggattccctgaagctccaccacatgaagtccatcggactggagtagctctctcacctccctcacagagggaggttttttgtgtgcccctgtcgttcgccttcgcctatactgatggacggcatataacacaatccatcacacgaccggcaggcgcgcaggctcctcaccttactgttccacgccccggccgcaagcgccaccagcaaaccggactggcgcggaaagcaaggtgacatcccatgtccatcgccaagcgcctcaagcgccgcatgcccaccgtcatcgccgtcatcgtattgctggcagtctgggaaacgtgggtggatctaggacatgtctcccccacgatgatctccgcgccaagcgagattttcgccgccaccatcgaaacgtggaacacgctcggcccggccgcggcgatcaccggctatgagggcgtggtcggcttcctgttcgccgtgttcttcggcattatgatcggcatcgcactgtactgctcgcacacgttcaacgcggcgttctatccgctgcttgccgccgcacaaaccatgccgctgatttccatcgccccgttgttcctgatttggttcggctttgagatttccggcaaaatcgtaatcgtggcggtattcggcctcttccccatcgccgtgcagaccgtgcgcggactagaagcggtgccccagttctattccgacgtcgcattgacctgcggcgcgaccccggtctggacgctctggcacgtgaagctgcgcgttgccgcacgtcagatctatggcggtatccgcgtatctgccgcatacatcttcgccacggcatccaccgctgaatatcttggcgcgcgcaagggcctcggcatctggctgcaggctgcctacaattcgttccgcacgccgctgatcttctccgccaccatcgtcattatcctgatgacatgcgtactgatgctggcggtgaacgccagcgagcgcatcctgctcggcccggccggcgatgacgaagaccccgacgcggaccagtagttctttttaccgtcaaagacacaagccggcggccagaaccgactgaacggggcggcttctcatgaggtctccagccctgtctctataatggaacagctttaccagcgtgtggcaaaccggctttcttgagctttcatagggaatgtcgggggcgctggtcgaacggaaatcaaggccctccatatcgttttctgccgacttccgttcgaagcaatcccagagaacgatagagagacaacgaattagggaaccatcattatgaagaaaagccttgtatccaaggccgctgccctcgtgggcgcccttgctatgactttcggtttcgccgcatgtggtcagaccaacaccgccgactcctccaactccaacacctccgacctcaagaaggtcactttcatgctttcctgggcgcccgataccaaccacatcggcgtgtacgtggccaagaacaagggctacttcaaggacgccggtcttgacgtggatatcgtggccgtggcccaggccggtgccgaacaggccgtgaacaacggtgtggccgacttcgccctgtccaacttgaccaatgtgggcatctacacgctgaagggcgctcacatcaagcaggtgctgcaggtgcagcagaagccgagcgccatttggtgcgcactggcgtccaacaccgccatcaagtcccctaaggatttggatggcaagaccttcgccaccttcggctccaacgagtccgacgccgtggtgcgccgcatgatccagaccgacggcggcaagggcgagttcgacaaggtgaccgtcggcacctccaccttccagaccatggaatccggcaaggccgatttcggcggcttctacgccacgtgggaaggcgtgcaggccgacatgtacggcccgaagctcaactgcttcaccgagcctgactacggcgtgcccggcaacgccgacgccatcggcatcatcaccaatgacaagaccatcaagaacaatcccgacctggtcaagaagttcactcaggccactcagaagggttacgagtacgcgtacgccaacccggatgacgccgcgcagattctcgtggacgaagcccctgacgccaacctcaagcccgaattcgtcaagaagagcatgcaggttatcgtcgacggccagtactggggcgatccggccaagatcaaggacggctctttcgtgctcggcaccaacgacttcaagggcactcaggaatacttcgacttcctggctgaagaagacgcctacactgacagtcatgacaaggtgattcatgaggccccgcaggccaaggaccttggcaccgacgaattcctcggcaagtaatttccgatattccgagtttgaatctacgcaaaaatgcgtccttcccatgaggaaaggacgcatttttgcgtatcggccgataaggttattcatagcgaatcatgctaacaaggaggcgattccatggcccaacgtcctgaccgcattattgccagcatggataccggtgttgatgatgcgttggcgttggcgtatttgttggggtcggcggatgagtgcgagctgagcggtgtgatcgccagttatggcaatgtggatgcgaacacggcttatgccaatacttgcgcggtgcttgatttgtttggccgggcggatattccggtgtttttgggctccgagcatccttcttgggctgatgcgtttattcccgatgcagggtgtgcccagtttcatgggaaggatggactggggaatacttggctggcaggggccggggctctggctgatggagctggtgtgcctggtgatgatatgtctggggatgacatgtctgaggatgtgcccgatggggttgtttctgttggcgggtatttggtaggggacgctcatgctcatccggcgtcggggtcttgttctcgtgtgggtcgctctcggcctgtggaccgtccccagtcggctacatcgacagctctcgccagctggggcaaaaggaggcgctccgttgatgctgcggatgggattgagtatctgattgagcaggttcgtgagtttggccgagacgttaccgtgctggctaccgggccgttgacggatgtggatgcggctattactcgggcaccggatattgcaccgaaactcaggctggtgatgatgggcggtacgcttacccaacccggcaattgttgggatgcggtggccgagacgaatatcatccaagaccctgaggccgcgaatcgtgtatttcattccggcgcagacatcacaatggtgggacttgatgtgactcaccagtgtttgctaccgcgatcggcggccgaccagtggcgtgcgacggggaccaagcgcgggcggttcttggctgatctcgcggacttttccatcaaggcaaatttggaagccgaccccgcactgttctctggcggcatgccgttgcatgatccgttggcggcggcggttgcacttgattcttcactggtcgattgttttgatcttgcgttgcgcgcggagaccaataccggtgatttcaatggagtacgaggccggaccaccggagacccggttgggctggtgaatcattccatgccgcatgtgcatgtggcacttggtgcggattcgggacgttttttggatgagtttgcagagaggatggctgaggtgtgccggtaactcccctcagtccgctacacggacagctcgaccgcaattacggacaagctgccgctcgcattcttctggctcgactctcgtctcgccttcgcctacaaacagcccatcgggctgtttgttttacggctcagccccctcaattttgaggggcttaacaaggactatttcacacccccagcaatcaaggaccggcttcgccggactcatcattacctggtcatgtcctatcggcctcggccaggcggcgtgaacgaacagtccataggactgttctttatttcacgccgccaaatcggcgatcgcggtggatgtaatggtcgatggagcgccatagcacgtcacggccgcagtccgggaagagttcgggcacgaagtcgagctcggcgtaggcggcctcccacggcaggaagttggaggtgcgctgttcgccggaagtacggatcaccaagtcgcaatcgggaacgtccggattgtacagatggtcggcaatcatcttttcagtcacacggtcgccggaaatcttgccatcacgcacttcgcgagcgatggcggcgcaggcgtcggcgatttcagcacggccaccatagttgatgcagaacaccacatcgatgaccttgttgttcttggtacgctcctcggcggcctcaagctcgtcgatcaccgacttccacagcttggggtgacggccggaccaacgcacgcgcacaccccactcgtccatctgttccacgcggcggtggatgatttcacgcgagaagcccatgaggaagcgcacttcctggggcgaacgcttccagttttcagtggagaacgtgtacaggctcaaataccgcacaccggcttcgatggcaccggcgatagtgtcgaacaccaccggttcggcggcctgatgaccattggtgcggaccatgccgcgctgcttggcccaacgaccattaccgtccataatcacaccgatatggcggggtaccttgttcttggggaagtcgggaatacgggcagggtcgctgaacggagctgcgggaatgtccaacgacgtgtaatcaacgttctcaaaagccatactcatgaatctatcaagcgcagcgaacgaatcgggcgttcgaggtaatactccccccaatcttcaaccaactcctgcacaacccgctccacaggcgcggcatcaagcaccgaccaatcgccacgaatcagtgcatcgaactggtttaacacgaacggcgcgatacggcgcgcatcggtagtgtggtcggcttcgcacatcacgccgccggacgcgatggacaggtacgccggctccgccttgccgcataccacgcaagtacccaatcgtggcgtccaaccggccaaggccaaggcgcgcatcacataggagtcgcctatggcttgcggggcgtgggattgtttggcgagcgcgttcaacgcgccgatgagcagccgatattggttcgtcagctgctcgtgttcggtgctggcgagtttatcgatggtctcgacgatgacgttggcggcctcatacgccgcataatccgccgcgatcggagcaccgtaagcggcgaccgcttcagcctgggagaccacgtcaagcgagcggccttcagcgataagcacatcgactcgcatgaacggctcgagcctggcaccaaagcgtgatttggtgcgacgcacgcctttggcgaccgcccgaatcttgccatgcccacgcgtcaggatggtgatgatacgatcggcttcgcccagtttggaggtgcgcaacaccacaccttcgtctcggtacagcgacatctcatctcctttccccgcgacgcccggcagactctactcaatgaagtagtcagtaaataaacaggccccagaaggcgaacaccaacagtatgtacagcatggtgaaggccaccagccagaacaggactcggcccagacgggtggaggcgagtaccgggtcggcaccggtgacgatgtctcgaacggattcacgacgagggggtatctgaatcagtccgcgggcggaagcgacctctatcagatgcataaagacgcgggaccaagcccatagcaccagcacggacaccacttggatgaccggccagctccaatacatgacgcccggcgtctcggtaggagcgctgccccatgcaagtttgaccacacccataatcacctgtccaagtccggcaaagaagatgagcagtgtggcaagagtggtgagggtcaaagtcagcagcgcgttgccgaaaccatgtgcgaaaccgagtatcacaggccgttccggtatcagcatgcccgcacgtttggcctcgcgtttctcgcgccgccatcgggcatccgccgcgattttgcggcccagcgccgccagtgccagcacgatggatgcgagcagcagcagtaccaccgtgacgtgcaggatcacaccatatatggtgccgacgcgtcttgccttcaaagcgcccggcagaccgattgattggtacagattggtgccggccaccttttcgctggtctgcgtgagtccggcggaagtaccgacggcccaatcgatgagatcgtccacataggcgtccgcaaacggggtgcccgcttcggactcatcccccagacgcagcacatggttggcgaccggatagctgcgcacggtcacgttccagttatcggctttgtgggcgttgtagagaatcgcacgcacgccgtcgacctgcgccgtcatcacgtcttttgaaccgtaagccacataggtgggtacggcgtaagcggcgggtttgagcgtggcgaggtcggaattgttcagtccgaacaggccggtgtccgcgctgaacacgcgttggacgatggatcgatagccctcgttcgcgccgacaagagtgaagtcctgggtgacgaaaaatcccagtgattggcgtgggctgaacaccatcgggctcagaagaatctggaaggcgacgtccggatcgtcctcgagcagatatgaggagatccatgtcgattcggaggtggcatagatgccgaccttggcggcgtctacatcgctttgggctcgtaggtattcgatgacctgatcatatgccttggctgaggccggataatcgcggttgatgtcggtggtgctccagacgggtttgtcgagcactgcggtcacaaagccggccgaagccatatcggaggccacgtcgccaaaggagttgtcacaggtgccgtatccggcaccgtgcatgaacaccacgccggggcgcttgcctgatgcgttctgaggttcccgaatcaataccttgatggcttggacgccgtccgcattggccttgccccgatcaccaggctccttggtcagattgccgtcgctggtcatgttcagcgtgatgtatcgctcggtgacctcatacgtgcctttcgccggcagcgtttctccggacgggttatcgaaggtgacttcggtatcgtcggtgagcgtggccatcgactggccggtgggttcgatgttccaaggcaccgtggtcaggttggaaatggagaccagcacgccgatcaggataatgaagatgggcaggctgaccatcagccggtgggtgctggtccacggcttggatcgaacagtcaggcgatgctcttcttcttgcgacacgtgcgctattgtaatctgaccgcgatatttacgccgagggcctattcggccgaatcagtgaccgggatgctggattgggaccacgaccgggccggtggaattgacgggcacttggccgtcggcctccatttgggcggcgatatcgttcgctatggtgagcagcgtgtcgacgatctggtcttcgggcacggtcttgatgaccttgcccttgatgaagatctggcccttgccattgccggaggccacgccgaggtcggcttcgcgtgcctcgcccggaccgttgacgatgcagcccatgacggctacacggatcggcgcggtcacgtccttcaggccttcggtgacggcggatgcgagctggatcacatccacttgggcgcggccgcagctcgggcaggagatgatgtcgaacttgcgggggcgcaatcccatgtattccaggagtttgcaccccaccttgacctcttcgaccggcggcgcggaaagggacacgcgaatcgtgtcgccaatgccctcggccaagagcgcaccgaacgccaggcaggatttgatggtgccttgccaggcggggccggcctcggtaacgccgaggtgcaacggccaatcgcccttggatgcgagcagtcggtacgtttcgaccatggtgatgacgtcatggtgtttgacggagatcttgaaatcgtggaagccgacgtcctcgaacatgtgcgcttccttcaaggcggaggccaccagcgcttccggagtcgggccaccgtatttggcgtagagttccttgtccagcgagccggcgttcacgccgatacgcagcgagatgcccgcgtcggtggcggccttgcagatgtccgggccgacttcatcgaacttacggatgttgccggggttcacacgcacggccgcgcagccggcgtcgatggcttggaacacgtatttggactggaagtggatatcggcgatgaccggaatcggcgatttgcggcagatttccggcagtgcgtcggcatcgtcctgactcggcacggccacgcgcacgatgtcgcagccggcggcggtcagttcggcgatctgctgcagcgtggcgggtacgttggccgtgagcgtgttggtcatcgactgcacggagatgggcgctcccccgcccaccggcaccgggcccaccatgatgcggcgggacttgcggcgcgggtgcaagggcgattcgctggtcaggtcgaccggatcaccggttttgcggaacggcttttcgatgggattttccgtattcaaggtattcatcattgcttgtttatcaggttgtcggcgcgtcggcgggcttcaagctcaagctggttcatttcctccacgtccgtgaacagcgggttaccacgaagctcggcgtccatctggtccagcacggctttgaccgtgtccacgatgccgaggtacggcagccgatgatcaagaaacgcatgcacggcctgttcattggccgcattgagcaccgccgtatgcttctcggaggcggccaggcagtggcgggccagttgcacggcggggaacgcctcatcgtccaacggctcaaaggtccaagttgcggcttgcgtccagtcgcacgcggcggccacattggtcatgcggtccggcgcggacaggcccagcgcgataggcagacgcatgtccggcggcgaagcctggcaaatcgtggcgccgtccacaaattcgaccatggaatggacgatggactgcgggtgcacggtcacgtcgatgcgttcaggcggcacgttgaacaagcgggacgcttcgatgacttcgaggcccttgttcatcagtgtggaggagttgatggtgacaaccggccccatgttccacgtcggatgatgcagcgcctgctcgggagtgatgttctccatgtcggcacgtttccagccgcggaatgggccgccggaggcggtgaccacaagcttggcgacttcggcgtgggttccggagcgcagggattgccagatggcggaatgttcggaatcgaccgggttgatctggttctcgcgtacttgggcgctgaacagcagatgaccgcccgcgactacggactccttgttggccaatgccagctgggaaccggccttgagcgccgcgatcgacggttcgaggccgatggagccggtgatgccgttcaatacgacattcgcaccggatccggccatggcgatgaccgaatccggaccgccggtcacgcggacaccttgtgcgccggcctgtgcgagagccgcttgcagtgctggaaccttggtctcatcaaacaccgcgacttcgggcacatggaactgtgcggcctgttgcgccagcagctcgatatgtgctccgcccgccgccagaccggtgacggtaaatcgttcagggtgacgcgagatgacgtcaagtccttgggtgccgatggatccggtggatccgagaatgatgacggtggagttggaggctatgctcactgttccttcttcgtatcgtcattgttcagtgtggggaacgacaggtcggggatatccgaatcgaagttaccgccaagcgggaacagcagcgggaacgaatcgttggaatcgtgcttatcctgtgacggctgagctgcttccgtgtcgtgggaggcggcaacgtattcagatgattccgcagccggacgggagatcgtgctgtctgcaggctgactatcggatacgcgaaccggaatggagttcgtgttacgatccggcttgctggtgggagcaaaggagaccggcatggcagcggacgcagcctcgtcggcagtgctattcacaggttgcgctgccggggcggagggcgccggggatgaaaccgaacccggtacctcattcaatttcagcgcattcggtgtatcaaggctgggcatcttgggagcgaaggacggcgcatccaccgccggaagttcctgagaaaccgcagccatgtgggcgagagcggccagagaggaatcgttctgcaccatatccacgggctgttccgcgaacaccgacggggtcgatgacggagctgcggattcgtatgacgactgtgccggagcaaacgagggggcgctgccagcggtcgcaccggaaaccggcgcggacggggcactggcgggaggctcagccgcaacagctgcggtaggagccacggaaggcgtctcggagacgggcttcgccgcagactcgttggacgtatgcaccgggtatgctgcgggagcaaaggaaaccggctgttccgcattggtgttattggtgcttgtggaagcatcgaacgatgcaggagccggcgcataggcgatcggtgccgccgcggccggcgctgcgggagcaaccggagccggagcagtgaacaagctctgctcggcctgatgcagggcatcgaatgattcgtcatgagcagcggcagacggcgcaaaacgttcgtcagttgccgggcgctgcgttccggaagcgaacaatggcgagacgccgttcgcttgaacggtcacgttcgtggcggtctgggcaggagccgtgggctcgccggacacgaaatcggccacacgtgcataggattccaagcgactcagcaactgcacgcaggcgttcaggaagtaatcgacctgtcgctcgtcatagcctttcttgcccttgcgctgggtgaagatcacattgttgaccgtattcgcattgagatcggccaaagaccgtacatcgtcttcggtcacgccgtcaacgcccaatgcggccgccgccttgtccacaatctggtcgaccagacgatccacctgcttcttatcgtacgaaggctgcttgggtgctccggacttgaagcgttcgcgctcgttacgctccgcatggttctggacttcgtgatacagcttctcggtcttcgccttccacgtcacacgcccatgctgtgctatctcccatgtggtctgcttatcgaccacggcacgttccagacgtccaagcgcggcgtcaacctgtgcgatcacatagccgttcttgcgcaaatcaaaggacgcgttctgaatgtcatgctgggtgagattcatgccctcgctgtcatacagagcatgggcgcgctccaagaaagcgtccacctgagcggggtcatacccccacttgcgcttgcccgcacgtgcgatgcccgacttgccgtccccttcacgaagttcctgcgccatcggctattcgacctcctgctggatataaacactctgccacaactttacgtgactattgagacgcatctgaccaagaagaccgaaattcacgattctgtagcagtactgccggtttccttctgcacgcatctcactgagatttcagaacctttgccgaagactgtcagggaatatcgtcacagcccatatccgtggaatgaggggattgcatgaagcgatgaaaaatgaaagtgggcaatgagggactcgaacccccgacatccaccgtgtaaaggtggcgctctaaccaactgagctaattgcccgcaaatgacaacaatagcgtatggccggcactgcgcgacacgtggtgtcgtatacgcgtgccgtagcgctcaaccgcaatgacattcagtcacgcccatcagcactacgcagcacgcgacgccggtcaacacgcttaaagtcaagcgtattgattgaggcttatcagcggcccttgccgaatgcgcgcaggcggatgccgttccagtccgagctgacggtcagcggggtggcggcgttcataccggcggtctgtgcggcggactgcacggtggaggagctggcggcacccgggcggccgggcttgggagtcagtatccacagcgggccgtcattgcccagtaccgcgtaggcgtcaacgatcgtatcggacaattcgtcctcatcatcgccgtcgcgccaccatacgatgacgccgtccacagcggagtcgtagtcctcgtccacgagatcctcgcccgtgagctcttcaatctgggcacgaatggaatcgtccacatcgtcgtcccagagccactcctggacgatatcgccgggctcgaaaccaaattcttcagcgttctgtgatgccgtttgattcacaggggacacattagcaagtcttcgcgaacaaatgcgttaacgcggccgaaaatcgccgcattgtgggcagacccatgcgagtcgtctcaccagaaacaacgactggccgcgcgtgtcatgcctcgcaatgaggcaaatcgtcggcctgccccttgccgatggccaccaacgcctgatacgcctcatccagcgtggcgaccttgacgtcgcgcagaccatccggcacgcggccggccacatccgaacaattcgacgcgggggccaggaaccatgtggcgccatcgcgcttggcaccaagcatcttcagcgctatgccgccgattctgccgactttgccgtccttgtctatggtgccggtgccggcgatggtcttgccgccgctctcgttggcgggggtgagtttgtcgatgagaccgagcgtgtacatcatgcctgcggacggtccgccgatgctgtccacgtgcatcgtcaccttggcgtgttgcaatgcactggcgtcaatgcccagttcgtccgcatgggctttggcatgcgccagaccgacggcactggccgaatcctgggaaccggccatgtcctgttcgactttcttctgatactggtccgcactctggcccaccggtaccgtgacctcacgcggcatgacctccatctgcggattggcccagccccagacggcctgcgcgttgacgatcgggtacccgggcacgccggacgcgttcaccgtggtcagcagcagcttgccggaatccttatacgtcgtcacgccggtaccggtgatgtcgataaccgcaccatcctcgaccttgcccagcacgtcctgggttggtccgggcatctcgatgacgtacgggctgggcagcagcagaatcaccacaccaagcaacacggcgaatgcaccgacgaaatggcgtttcggacgagcggccgcataggcccgagcacggctgattccacgagataggcgcgaatcgtgcttcacttcgaacgatggcatgtgctcatcccccgcttccgaatccgcagtcgggctctcctgctcttggacgaggtctggttcctgattcctgtggcgtgcaaacataccctacagtgtaagcggagggccgaaatcagccgaaaacgaacataaaccgaaaatattgctcggccacgagcgaacaggcccgggcagaccctacacttggggtaacacaccgcggcaaagaaggatacgcatggacgacaacgcgattcacgagtggctgatcaaatgcttcggccccattcagggtgagatggcctggcagcagatcagccagttgcctgaggagatccgtgaacagctgatgagtcaggaccccagccgactgcccaatccatccgaagtccagcagatgatggccgcgttcagcgccggcggactcaacacgatgggcgatatgcagcgcactgtcgaggaagggccgatcaacgtcaagctcgccaagtcgattgccttgcagcaggccaacacctccggttccgcgtccagcgtgtccgccgtggatggcgaggcggctcgccgcgcgatgagtgaggcgaacctgtggctggataccgcctgcgagttcaatcccgcgcccggcgatccggatgtgctgacccgcgccggctgggtggagggcaccatcgaccagtgggcgaagttcgcagctcctgtggccgagtcgatgaacgacgctttggcttcggtgatttcggagcgtcttggcggcgcgttcggcgatggcgagattgccggcatgttcgccggaccggtgccgattccgattcccgacggcatgaaagacccagcccaactgatgaagctgctgggaaacacgtcctttgccatgcagctggggcatgcggccggcaatctgagccatgaagtgcatggcagtttcgatcagggcatcgcattgctgaagaatccggctggtggactgattgcccagaacgccaccgaatacgcgaggatgctgaacggtgaggcttctgcggccaaggccgacacggccggcacctcggtggacgcgaccaatccgttctccgcctccaccgacgcttccgccaatcccattggcttcacttcggccggcaacagcgatactccggcaactgacggtaccgcccaagtctccggctccgacgcctctgccgacgccgccgcgttcgaggctgcgctctccggattcgagaccaccgagaaaatccccgaatccgaagtgctttccttcctggccctgcaggaaatggctcacgcccgcctgtatgcctcggtaccgtggctgatgccgcgtttcgaggcgctcatcggcaagtacgcacgcggtatctccatcgatctggatgcgatggaggaacagctgcgtgacgccacgtcgatggatccggagtcgatctccggcgcggtgaacctcaccaaggtcggcatccccgacacccccgaacagcgcgaggcgctctcttcgctggaatcgttgctggcgatggtcgagggctgggtggactgcgtagtgtggcgcgccggcatggcccacctgccgcatatcgaacagttgcgggagatgctacgccgagaacgggcgatgggcggcccggccgaacgcacgttcgagagtctgctcggcctgcagcttcgccccaagcgcatgcgcgaggccaccgggatatgggagatgatcaccgccgccgaaggccctgaaggccgtgacgccaagtggtcgcatcccgatctgctgccttcgctgcctagcgacaagcccgcagttggcgcgtctccgtcgtccgacgctccttcaggctcctcttccgatgccaacggttccgcttcccaccctgccgcagatggcaagaccggcgatatcgattgggatgccgaactgtccaagctactcggcgaagatggcgaagacagtgaaaacggcaactcggaggatactcaggcatagtcaaccggccttcagccaattcccgctcctgaatgttcaggagcattcagtatgcatgaacgacgcccgtcacaaaaatcgtgatgggcgtctgtgctgcgctccataaccatccttggtccgcgcatacgacagatgcagcgaatcctcagctcgggtgatgcccacatacataagccggcgttcctcttccagcgcatcccccgtttccggcgaaccgtacggcaagagcccttccgaacagccgatcaggaacacgtgcttgaattccagacccttggatgcgtggatcgtggaaatcgtaaccccgggatcgtcgtttgcggcaagtccggtggcgtccaaacccatcgcctccaatagtgcgcgtttggacgcggcatcgtcggcgagcgcggatgattgccatcccgaatccttgcggacgcggtatttcagtctcgcagcgcgcaaggcggcaccgaataccggctgttgggcgttgatgcgggtgaggatcgcgcaatcggacggcttggccccgttggcaaccaaccgggcgatgcgtgccgccacgccctgtgcctctttcatatcgctctcataagcggttcgggtaacgcgcgtgccggattcgcgggcggaaaccagttttaggtaatcctcacggttcggcgcggccgcaagcacccggttggcgaggttcacgacttccggcatcgaacgatagtcggtgttgagattgacatcggcggcgagcggcccgaattcatcggcgaaacgcagcagatcccagctggaggcaccggcaaacgagtagatggtctgggccggatcgcccacgacgcatacgttgcggttcatcgcgctcttgccgtcaggtcctcccccgcccagccacagggtcagcagcctgtgttgcaggggcgagacgtcctgatactcgtcgacggtgagccagccgatggtggaacgaatttgggcggcggcttcgggaaaatcatccatgatatggcatacgagcagcagaatatcgtcaaaatcgatttcgccacgcgaggtcttttcctgctcgtaggcgctgtagacgtcggcgaaccgagcggtgtcgagtccggcgggcggttgcctatgggcgatggcacaggtccgtgcataatcttccaccgccaccaacgagattttggcccaattgatttcggcgagcacatcgcgaacggtcagcggatcggcatcggtacgtgcggtggcgcggatgatcgcgcgggagacgacgtcacgctgatcttcgatcacatgcgggaatggagcctcgcatatgtctgaccagacgctgttgagctgatgcaatgccgctgagtggaaggtcgcggccgtgactccggcagttcccgcacccgaaccggaacgtccagtacctccccctacgccgagctggcccaaccgtgcgcgcatttccgccgccgcttttaccgaaaaggtgacggcaagcacccgctccggcttccatgccccggtggcgcaggcataggcgatccgccgcgtgaccgtgcgtgttttaccggcacctgcgccggcgatgatgcgcaccggcccttgcaacgtagtcgcggcggtacgctgccgctcatcgagcccctcaagaatcccctgcgcctgttccatgcgtccattgtggcacgattcgcgctcacggcacgactcacgcctatggctgaatcgggctcacgacaaaacatcgccagaatcatgcgttttgcgtgtcattctgcggtgcgaatcgccacggatgtattagtgtggaagggtgatgaaacgtagcgattatatgttggcggcactcgcctcagccgtcctgccgaatctgggggtggccggcgtacgcgagaacgtgcaggccagcgcaaccgacgaggccaaaggcatcgatcagaccgtgatccaagatgcttcgggcaagttgtacgacgtatacgccactgacagcaaggaagggcgtacacgtctgatccgccgtgtgaaagcggcgcagacactggcagccgcgcgcgagcttggtggcctcggcttcgatatggaccgtgtggtcgcattcgtcccgggagacgtttcccaacccggccagacggccaccgcacaggccgtggggcagcaggcccaggcggagtccacaccgctgaccccgcgcaagcccggtcccacaggcgagacgaccgtgatgatcgccgtccaccgtgatggtcaggcacgtcctctcgacctgttgacattggatgactgcgcggccgtcggcaccgccatcggagccattcatcgcctgccttcgacttttctggccaatgccaaatatccggtagttaccaccggtcagattcgttcgcagctgaccgtctggattcgccgcttacgctccgccggccatgttccccaagaaatcaccgacagctgggcgcgcatcatggacaccgagggattgtggtcgttctccacctgcacggttcacggcggattctccgacggcgacttcctgttctccggttccaccatcaccacggtgaccaactggcaggatatgcaggtcaacgatccggcacgagaccttgcctggattttcggcaagctcgacgaatcccatcgcaacgccgtgctttccgcatacggccgcatgatgggctctcgacttgacgatctcatcatgctcagggccaacctgtggttgcagatggaacaggtgggcgaattcattcaggcgttgaaccgtgcggacaacaatcgcatcatgcagttcaaggcacaggtcgaacgactcgcacaccagttgggcgtgatcaagcacactccggcatcggccccagccgcagggtcggccgccgccgcgtcgacgaagcccggttcgccttccacaatcaccgtcggcacattgttgcaggacgaccgccatcaggcacccgcacacccgcagcagtccgacaccggtaccgcggcggccgaggtctcggacgacacgcccgaccccgatcgcaccggttccgctgacatcgtggccgctggcgacgtggatcttaccccggaagtcgaacccgatgctgaccggaccgccaatcacccgcaagcgagtgtctccggcaccgcaaccggtacaggatcgaccaaaccgcagccctcacatggcgcttcccattcttcggtgacgatcacgctgaaggagctcctcagtatgaacgggcatagcggcacgacgtcaaccgacgcttcccctgcgtctcaatccgccgccccgaccgacgatgcggtgaatgacgatactccggacagtctcgttcagcacggagcctcgagtgcccaaaccacggtgattccgctgctggagcgggaagaacgcgctctgcgcgatgcccgtgccgggttggacgggtatgacagcgaaggcaatccgctggccgaatcatccgcatcatccaaataatgtcgtgtgcggtgttccgcgccacgccgagcgcgtaacaccgcacatgacgacgcagacacgcggcacaatagagtacagaacctcggccggcgacggccacttaccatgatgttcgtcacaaagacggcagaacaaggagccttatatggatatcgaactgggcattcagaacgtggcacgaccggtgaacttcagcaccgacgaatcagccgacaatgtgagccaggccatcgcgcaggccgtggccgacaacgcgacgatcgatctgaccgatgacaagggccgtcgcatcatcgtgcccgccaaggcactcggttacgcgatcatcggctccgaaaccaagcacgccgtcggcttcggcacgctgtgaccatgaatcgcgcataagcgtccttgagcattttctcgaggacgcttttctattgccgaatcaccgatatagcggaagcacgccgcgatgaacgatctcttcgacagtggcctcgtcggtgaggttctcccccagtttgttcggtttgcctttgccatgccagtcagatccaccggtgaccagcagctggtgccggcggcagatggtgagcagccgttctcgttgctccggtgaattgccacggtgccatacctccagcccgtccaatccctcgctgatcaatgcctcgatctggtcatcggacaacagtctgcggttacggctcacgtcaccggcatgggcgatcagaatcacaccgcccgctcccttgacggcggccaccacttcatgagaggtcggcgaaggcgtgggaatatagtatttggatgaggcgctgaccgcatccgcaaacgcttccgaacgagtccgatatacgccggcactcaccaaagcatcagcgatgtgaggccggccaatggtggttttgccaccctccttgacttgggcgagcacggattgccaggtaatcggataatcacgagacaacaattcgaccatgcgctgcgtgcgttgcaaccgtgcggctcgagtatcggcgaacaagtccgtgatgtgctgattcatgggatcatactggtagccgagcatgtgtacggagacgttctcatccgtggcggtgatttcggtgccgcggagcaacggcaaaccgaccctatgggctgcggcttcggcctccggccagccggcggtggtgtcatgatcggaaatggccacgcccttgagtcccaatgccttggatcgttcggccaatgtgaccggcgtttccgtgccatccgagaagacggtatggcaatggatgtcccacccgacggcgggcggctccaaaggcatcacatatccagtcataccttccatcgtaacctcatctcagcattcccgcgcaaggcgcagacaggtcgtcaccttctgccaacggccaagaccagacattcggcactcagctgacaaccgcagaggctaatctggagcgcagcgctatcgaaaggggcatgatgactcgtaacaccgcaaccgacacatcatccagcaccacgaacacgacgccgtttggtttggcggaggcgcgaccgttgattggatggcgccacagtgccacttggacatatctcatcatgctgatcgcctcggcagtggcattgggggcctcgctcattctgtccgccgagactttgcagttggctcggcatccggagtccgcgctcggctgcgatctgaactcggtggtgtcctgttcggcggtggcccagtcctggcaggcggaaatcgtgaagttcggcgggctgagctatccgaacgcgttcttcggcatcgccgccgaatcggtgttcattaccatcgcggtgattggtttggcgcgtgtgaaggtgccgcgttggttcgcgacctgcacgtggctgggcggactggccgctttggcctactcgtactggctgagcacgcagtcgctgttcgtgattcacgcgctgtgcccgtggtgcctgaccctgatgttctccaccaccatccagttcatggcgttgagccatgcgaccgtggccgtgcagggattgccgtcacgtaaggccgtggcggctgatgatggcgacggtgaggccgatgtcgcggcggtgccggccggactcaataagtattaccgcctcaacatcgacctcatggtcgatatactgtggatcgtggcgatcgtggtactcatcatcgtcaccgaaggcgcggccctgttcgctgcctgattcctttacaacaaatcgatatcggcgaccagcgtggctgctccggtcagtttcacgtcgctgtcggtgacgtccacgcgcagggtgccgccacgtacggtgatgtcccagtggctgatgccggtcttggcccgcagcacaacgcctgtggcgcataggccggtgccgcaggacagggtttcgccgcagccacgttcgttgacgcgcatcgtggcttcacccacgccggtgttctgatcgatgtcgtcgacccgtacgaattccacattctggtcggattcgatgaccggagccaccactggtttggtgaccaaatccagtgattcaaccactggcagggacgcgaaggcatcctcgatcaccgcgaccacgtgcgggttgcccatatccacgaacgtgccgcgcgccgagccctcagcgccggggatggtgacctcgtaggcgtcggtttcgccgatcttccactcccccatttcgacctggaacacgttggctccgtacggtctcatattgccgcgtggcgtcagaatcttgacgccggcacgggtgccgaggcggaacggctcggtggagtcggccacgccctcgcgctgagcgaacaaggtgatggcgcgcgtaccgttgccgcacatctccgccaacgatccatccgcattgcgatagtccatgaaccatttcgcgcccccggccagtacgtccgaaagctgatcatcgcttaaatcagacacgaaatcaggcttggtcaggcgaatcaggccgtcaccgccaatgccgaagtgacggtcgcacaggaatcggacctcatcggcggtaggctcgaattcgccggacttgtcgaggtacaccacgaaatcattgccggttgcgtgtgtcttggttactcgttgcggaagactcatggctttcagagtactctagggagcgaaacaacaccgcaaaacaatcggctttgtgatcggtcgcggcaacatacggttgcaggcatggctatagggaggattcaggcatgagctcttcggctccaatcggcgtattcgattcgggtcttggcggtatttccgtggctcgccaaatcgccaaggatatgccggccgagcatgtgctgtattttggcgattcagccaacgccccgtacggcgtcaagacgcctgagcaggtgagggccctgagcttcgatattgtcgaacggttcgtgcgtcaaggcatcaaggccgtggtcatcgcatgcaacaccgccacttccgccgcggtgaacgatctgcgcgaacactacgatattccgatcatcggcatggagccggccctgaaagtggcgtgcgaccgtggcgatgtgccttccgacccgcatcatattccccagagggtgattgtggcggccactcccctgaccttgcgtgagcggaagttcgccaaactgatggatcgattcgattccaacaacacgattttcaaggagccttgccccgacttggtggagatcgtggaatccgggcggctcggcgaccatgacctggtgatgcgcacgctgcatggctacttcgaccagtacgacatggagcacatcgactcggtggtgctgggctgcacgcatttcgtgttctaccgcgactacttccgcgagctgctgcccgaacgggctgctgtcatcgacggcaatgagggcaccgtgcgccatctgggcgtggtgctggagtccctgggcaaactggcacccgaagacgcgaccggcggcgtggaactcgccaattccgatctgtccgaacgtgttacacggctttcacgcgacctgctgaatgcgtgatcggatgcatgatgatgaataggaggctgatatggcactgaagacggcaatgattgatgtcggcggcgggttccgcgcgattttcggctgcggcgttatggaccgcatgctggaggacggcatcgacgtggacatgtgctacggcgtttccgccggcgcggccaatatgacctcattcatcgcccgccagcacggccgcaaccacaccttctacaccagatacgcgttccgtaaggagtacgcgagcgcggaaagcttcttcaggaaccacaattttgccaacctcgactacatctacggcacgctgagcaatcacgatggcgagaatccgttggatttcgcggcgttcgaggccaatccgaccgggttcaccgtggtggcctgcaatgccgaagacggctcgaccaagtatttcgacaagtcgcgcgtccgcttcgatgatttcgacatcatcaaggcctcgtccgccgtgccggtggcctgcgagccgtatgtggtggatggcgtgccgtatttcgatggcggcatcgccgatccgatcccggtacagaaggcgctggatgacggctatgatcgcgtgatcctgattctgtcccgcttgcgtgacgaagtgcgcaagcagcagaaggatctggctccggcccgcatcctcgaacgctcccaccccgccgcggccgagaggctgcgtatgcgctacaagacctacaacgacgaactcgaactcgccaagcattatgaggcggaaggcaaagtgctgatcctcgcacccgaagacctgtatggtctcaacaccctgaagaagaacttcgagggcctgga

SEQ ID NO: 1171 - DNA, 6101 bp, Unknown
  R81_24m  MAG No. k141_12750
atcggggtgatgatggcggcggtaccgcaagcgaacacctcggtgacttcaccggacttgatgtcctcgagcagctggtcgagggcgatcatggtctcgaccacgtcgtggcccttgtcctgcagcagctgaatcagggagcgacgggtcacacccggcagaatgttaccggtcagggacggggtctccacgtggccatccttgtgcacggccatcatgttcatgccaccgagctcttcaaggtaggtcttggtggcggcgtccacaaagcacacctgctcgcagccattctcaacacccttgtactcgccgagcagggaggcggcgtagttgccgccgcacttggcgaaaccagtgccgccagggccggtgcggaaccacttgtcttcaacccagatgctcaccggcttgacgccgcccgggaagtacgggccggacggagaggcgatcacgcagtagtcgacctcctgcggggcgcgcacgccgaggaacggctcggaagcgaacatgaacggacgcatgtacagcgtgtactcgcggcgggacggcacccagttggcgtcgcgcttgaccagcgcggccacggaaccgaggaagtcgtcaatcggcagctcaggcaggtacagacgcttggcggagttctggaaacgctcggcgttcgcatccgggcggaacagccaggtggagccgtcggcatgacggtaagccttgaggccctcgaagcactcctgtgcgtagtgcagcacggaagcacccgggtccatcttgagcggtgcgtacggttcgacgcggcggtcggaccagccttcgcccttggtccaagtcatgtgggtcatgttgtcggagaacacctggccgaaagccggcttgtcgatgagggactggcgcttctcatcggatgcggggttgtcgttcggcagtacggtgaacggttcggtgagcttgtcgagtgctgccggatcgtggtgcgtgttttcagtcatcactagctacttcttcttgactttggcggcccgaaagccaccatatggggtgtgtgctgtgcgcttgtggcgcgaactctgttgcatacttttgcacacccatgtgttactcgtgtggcagagttcacatggtgaaaaacgaagaagcccacaccgttctcaacggctgcgggcttccacgtttcagttatgttctgaattgttcgctatcgaagcgaccgactcacttggcgtcggcggccggagcagcggcggcgtcagccggggcggcagcagcttccggagcggtggtggactcggtggcatcctccggcacctcgacggtgacgacggactcttccggatcctcgacgtccagctcgacgccctcaggcaggacgacatccttggcgaacaccttggtgccgtcggtcaggccttcgacgctgaccacgatcttctcgggcaggttggtgacgtcggcgcggaccttgagctcctgaatgtcgacgaacgccacggcagcacccttcggggtgccttccacgaacaccggcacctcgacgtcgatcttctcgccggccttgacctcgaggaagtcgatgtgctcgatgatgcgcttgaccgggttcttctgcacgtccttgacgacggccatcttggtgttgccgtcgaaggcgatggtgaacagggcgttggtgtgacgcagggccagggtggtctcgcgcatcggcaaggtcacgaaggcgggctcttcgccgccggcgtagatggtggccggaatcttgttggcaacgcgcagacgacgagcaacgcccttgccgaactcggaacgggcctcgccctcaagcttaatggtggtagccataatggatactccttgtatcttcgtttcgtactgtctcgctcagacgccacgacgcgccgaaagacaccctacaaggagtgaaatacgccgagtcgataacggaatctgtgtcatgtgtcagcatgcacacttccctcgccaaagcaacaattgtcaagtatacgccaaccccggactttgcgtaatgatgcttcgatgacactgcatataggccgtcccagctacgtcaacgtacggtttccgcgaaataatccctaactttgtgaagaacgtacgcttacccgttctcatcatacggttttcacgaaatcgttcgccatttcgtgaaaaacgtacgctcagcgacactcagtgtacggtctttcacgaagttggggatgatttcgataataacgtacgatggtgagtaccatatcgggaggttgatatgactcgttcggacgacgtcatcaatgaggatggccatgacgtcatcgccgcacacactcgcgttgtcaggggcatggctgcggcacttgccgcgatagccgccacaggagccggcgtcacagccgcggccgccaacgtcatgttcatgttcgcgctggacaccaaggccaaacgttcgatgttcaacatgccgcacgaggagacgccgaaaggcatcgaattcgacatgtccgagcagcttgaggccggccggtggttcgaggaggccaagcaatcggtcacgctgcgcagccatgatggattgaaactccacggctggctgttggacccggattgttccgacctacagccgcatctatacgcgatctgctgccatggctataccggagagcccgcggaaatggccaaatgggcgcatcgctatgcgcaactcggttttacggtcctgctacccgcgcagcgcgcccatgaattgagcgaagggcgttacgtgggtatgggattgctggaaagcgacgatctgttgggctgggtttcgctgatcaccgcagctgatccggatgcacgcattctgctgcatggcaattcgatgggcgccgccacggtgatgatggcggccggcgatgcgcgactcccccgcaacgtcgtcgccgcgatttccgattgcggatacagttccgtggtctcgcagtttacggataatgccgaggcgatgttccgtttgccgcactcgttggccgtgctgctggtcaaagtggccagtcatgtgtctaaacgcaaggctggataccggtttgaggacgcctcctgtgtgaaggcattacggcacgcgactattccgatgatgttcattcacggcggagcggatacttttgtcaacccgaagtatctggacatcaattacaacgcctgcgccagcatcgaccgcgagaagctgctgattcccggcgccgaccacacgatgagcgccagcaccgatccggaccgctattggcgtcgcgttaacagctttgttaagcgggtgtttgggctgtagtagatatagaagcttggctcccctctgtgaggggagccaagaatggttacgcgagcagttccttgacggcggcgatgacggactgcagactcttcttcgcgtcaccgaacagcatctgggtgttgtcctcgaagtagagttcgttctggataccggcgtagcccatgccgcggccacgcttcatgaccacgacgttctgggacttgtcgacgtcgagaatcggcataccggaaaccggggtgccaggacggcgagcagccgggttggtcacatcgttggcgccgacgaccagagccacgttggcctgcgggaactgcgggttgatctcatcgagatccacgagctcctcgtagggcacgttggcctcggccagcagcacgttcatgtgaccaggcatacggcctgcgaccgggtgaatggcgtaggagacttccacgccatggcccttgagcagttcgccaaggtcagcgagctcgcgctgggcctgagcctgagccagaccgaagccgggcacgaagatgaccttctgcgcgtagacgagctgaacggccagatcgtccggcgtggtctccttcatggtgccttccagaccgtcgccagcagcggcggcgtcagcaccaccgccgaagccaccggccaagacggagagcagcggacggttcatggcctgagccatgaggatggacagggtcacacctgcggaaccgacgagtgcgccggccacgatcagggcaacgttgtcaatcgccagaccggacatagccacagccgtaccggtgcaggcgttgagcacagagatgacgacgggcatatcggcgccgccgattggaatcacgaagaccaagccgtagcacagggcgaacacggtggtcagaatcgaccacagcagacgctgttcgggctggacgcacagcatgaccagcgaggcgacagacagcacggcgaacagaatgttccatacgcccttgcccggcaggttcagcttcttgacccacttgatgccctgcagcttgccggcggcgatgagcgagccggtgaaggtcacagaaccaatgagaataccgagaccagcggtgatgagcaccacgatgtccggggtgccttccttggtcaggatgtcgttcagggccacgagtgcggcagcgccaccacccacggtgttgaacacggaaaccagctgcggcatgtcggtcatcttcaccttcttggcggagacgacaccggccacggcaccgatcaggatgccgacgaccagcaccaccacggcgacaatgttcacgaagcccttggcgaaaagcacgatgaacgccatgagcacggccacgaccatgccgaacgcggagatttggttaccctttcgggcggtcttcggcgagttcatgaaatgcagaccgaccacgaacaggacggcggagaacaggtagacgaaccatgcgacgatgtcgatggctccaacggttgcggaggtcattacttcgattcccccttcttctcgttcttgctggacttgaacatctcaagcatgcggtcggtgaccacgtagccaccaacgacgttcatggtgcccagcacggcggccaggaagatgaacacgtaggccagtgggctattggcttcggctgccacgatcacaacgccgacgatgacgatgccgtggatggagttcgcgccggacataagcggcgtgtgcagggtggcgggcaccttgccgatgacctcgataccgatgagcagcgcgaggacgaacagggtaatggaaacgacgagagtaggcatggtattccttcttccttacttctcggacttctcggcatcggcagcagctgccggggcggcggcacgaccggcaaccaccagcgcgtcgtcaagttcttcggtgagatcctggccgagcttgccgtcacgcacgaagtgcacgaggatgtcggccacattgcgcgaaagcaggttggatgcggtggtggcgacgccggaggccaggtagggagcgccgatcagcttgacgccgccctcggtgatctgctcgccgacggcggagccctcgacgttgccgccgaggtcggatgctgcgcagtccacgatcacggcaccacgcttgagacccttgacgccggctgcggtgagcagcaccgggggcttacggcccgggaccttggcggtggtgatgatgatgtcaaagccggcggccttctcatcgacggcagcctgttgctgagcctgctcttcggcgctcaacgcgcgggcataaccgccctcgccctggcccttggagaagtcaagtcccagatcaaggaacttcgcgccgagggactcgacctcgccctgggaggcgggacgcacgtcgtacgcggtgacgaccgcgcctagacgcttcagcgtaccaatggcctgcaggccggcgatgccggcaccgagcaccagcgccttggccgggcgaatcgtgccggcggcggtggtcatcatcggcaggaaggagccgtaagcatcggcggcggtgatggctgccttgtagcccatcacggagttctgagaggtcatctcatccatggactgggcgctggaaagcttacggggtagcttttcgatggcgatgcccaccagaccggccttctcgagcgcggccacgtaatcggcatcggtgaaggagccgagcatgccaatgacccactggccggccttgagcttggccacggtctcggcggacggtcggtccacaaaaccgagcgcgtcggcttcggcgagcacctcgtcacggctggtcaccttcgcaccggccttttcgtaatcctcatcggtgtattcggcg

SEQ ID NO: 1172 - DNA, 14596 bp, Unknown
  R81_24m  MAG No. k141_13173
ccaattcggaagtggcattgacggattcgagggtttgcggcttgacgctggtatccgtgggggagcaggcgcgaatgtagttgctggccttctggctccaagccgagtacacgcagcccttggacgataccggtcgtgccggattcgccttgcccccgttggctatgaaattcgccttggcattggacttcaacgggataagcgtaaggcctctcggtgatgccgcggccacccaatcggactgtacgtcatcggtgggaggctcctgaagggtgagggtgccggtcgtgtcgacatcgacgcggccgcccttgaatatgacggttttgccggttgcgattaccggcgtgctcccgatgacggtaaagctttcaacggtctgctgcttgccgtcggtcagcgattcgagggttttggccttggcgctgctgggattgtcaagacgcagcaccataccgtcggatggacggtatccgtagaccttgccatcgtgggttactacgatgcgcccgccctcgcccagcttcattttcggatcggaagtggtgggggccacggaatcaaggttttccgacaagccggtccacacattgccggtcttctcgttgatcagggctacggtatccccgccgaccacagtggtggtgttggctttgatgtcggtcttgacaccggtgctgaccgtggatgccttgatggtggaggctttggtcgtttcggtcaggatggtgtcgccattatgctgcgcgatgtcgaatcgtggggcggaggaggagacgccggcgtcggcctccttgttctttacgttgaatcgtgcggccttctggttcttcagcgaagtgacccacacggtgccatcgtccagttgcacatggcggcgcgtgacggtgctcatgatcaccgcgccggcaacaagtcccagaagcagcaggagcgtgattacgggaaccgtccacgtatgccctccggagggcataaggcggcgcaaagccgcgctgatgcgtcggcgacgatcgtatgactgggacgatgtggccatctgaactccctgaaccctggtttctctggttgctagtgtaatgacaacgctttacggttccaatacctgccgttcctgttgtccatttggtgaattcgccactgccgggcgcatgcctgatgcgatacgcaatgccaaggtggtatgcccggcagcggcgagcggatcactcttgcggcttggccgcacaggtgatggcggggctggcggacatctggcgattcttgcgcacaatggacacctgaatgcaggtctgcgagccttcctgcgcgttgacggtcaccgtgggatctgacgttgtgacggtttgcgcgctctggtcggtattgctgccctgcactatggcccacgtataggtatcaccgctttgcgggtctggattcgtccaggtgaacgtcacggatgacccatccgccgcataggtgccgttcagattctccggggaaggaatctgggcgttcgcggtatcggtgatcacgtcatcctgattattgcggttgttgtcatcatccttggtgccgggcgtcgccacctgtttggtatctgatccggtggcgctgtccatgcggggaacgaccacgaaggcgaatatcagtgccgctgcggtgattgccgcaagtataccgacggtaatacccaccggtttgacccatcgccgtgacgaacgggtggtctgatctcgctggtccgtggcccggcgccgacgctcgatgtctttggggtaggccggcatcccttccacggtaacgggagtggcatgcccgaaatatgcgaattgcacacgctgcatggcacgtgcgaactccaacgcggagtagtaccgctggtcggggtccttgttcagggcccggcgcagcaccgcttccacatcggccggtacgtcggggcggttgaggcgaggcaatggctggttgacgatcagcgaaatcagttccgattgcgaacgtggatgatattcgtgctggaatggcgagcagccgacgaacatggcgtacagggtggccgccagtgaatagatgtcggcggcttccgaaccattggtcagatgctgaagcacttcaggcggtgcccacggcggcgagaatccggtttcggtacggtcatacacatcggtggagataccgaaatcacccagaacaggcaagccctgcgaggtgatgagaatgttgctgggcttgatgtcgtgatggatgatattgctgcgatgcgcggtgaacagcgcgcttgacagcttgatgccgaggtcgagtacctgctcgcaggtcatggaccgggccttcatgatgctgttgtaggtgccgcccggcgcatattcgatgacaatgtagccatggccatcggaggtgacgccggcaccatataccggcagaatgtacgggtgggatgacagcttggccatgaagttggcctcgcggttgaacagggcagcggcccgtgggtcaagggttttggcgctgacctttaccgccaccgggcgtgcgggcatacgctggttatataggtacaccgtggcggtggcaccgcttcccaacatctggacgaaatcatatccgggcagcttcggcggcctcatcggaatattggccatctgttccctccctccttggaaaatgcgctctccctgcattcgttctacaggataccgtcaagggtacgattcttcgtcgggttcggtaaaatttttccctctgtgacggtcgggtttaggctggagccatgatgacgagacttgaacctggaacagtgctggacggcatcgaccgtgatggagcggcgaggctgattgtcggcacgcctggaagcggcaaaaccgaattcgccttatcggtgttgatggcggggctgcgccgctacggtggcacgcaggcggtgatggccgtatccggccgtgtggccgccgacgcattgggcaatcgggtgattcgtgagctcgggttttccgtgcaggccaggccggtcaccacgctgggtgccgtggcattccgggccatatcagcttcgcgcgagggaactggattgccgtcgcctcgattgttgaacggtgcggaacaggatgctttgctgcgtcaagtcatggccgtgcatctgcgccatgccgtagcgggagatgattgcggcacctgtgatttgctacgcgtctactttgcccaggatgactgggcgaaactcatacgcgatgccggtgccggcgagatgcccggctcggccgcttccgtacaatcaagcctctcgcaacaagggtcggattcgccgtctccgacgtcggcaggcggctcgaccagcgcggataggttcactcgaggtatttcagatgcgtttatcagccagttgcgcgatatgctggcccgattggatgagctcggtgtaggcgttcacgaagagccacgtctcttggacgccgtgacggaggacgcgcgattgtcggtgcaatggcgtttggctttcgcattgcgccgtgaatatattgcagcccaaagcgcggcatatccggggcaataccgtttggatgcctcgtatttgctggtggcaggagctcgtgtggtgcatgaggcattcgccgccgatcacgcggatgattccgaccggcctatgcgtatggaggcgttgggcttgccccggctgctggttgtggatgatgttcaagacaccacgctggccggcatgcgcttcttggaggagttggggaatgccggcgtcaagttggtgctggtcggcaacccggatgaatcggtgcagaccttccgtggatcgtatccggaatatctgatgcgccgtgccgtggaagggtggctgaaagccaaggaagaacagctggttggcggcagtaccggcgctgatcagtcgcacatgacgatggctgatgtgatcgcgtctcgtatttcgctgtcgattccctcgccggaagacgagccgctgcctccggccgagcgtcccggcaagctgaccgccatgctgggcggagtcgatgcagcgaattatcagtcggacggcacggtgaccgccggcctgtaccgatcctcacgtgaggagctggatgatgtggtctggcgcatcaagcgggcgcatctcgaccggcatattcggtggaacgacatggcggtcatcacccacgacaatgccgccgtgcggctgttcggcgaacgactgcgccgagatggcgtgccggtgcggtattcgtcggtcacccgtcctttgaaggacgagactttcgtgcagggattgttcgcgcttgtggagcttgcccgattgcgtgccgagggaatggcggaatgccagatgacgttggcttcctgcgcggcatatataaggactagagtggccacgttgatgaacggcccgttggtgagtgccgggggcagacccggtcaagggcgtcctgcaaggctcgctccgattgaattggccatgagcgcgctggagtcgctggcgcatctcgccacggatgatgccatgctgacctctctgacgacggcatgggagacattgcgtgaaacataccatgaaacacggcgtgaaacaggtcgtgaaacatcctcatcagtggttccgtcgccagtgtctgtcgaaatactcggtgaaccgtccgacgatgacttggcctttggcgttgacgcgctgtacgtgatgcttgccgttgatgatgccgccgcgccggcgcaggctgcgctcgcatccatccatgcggtgcttggcaacgaccctcaggcccgcgcttttgcgaacctgtggcatctggtgggcagcgttgcttccggcttggagcggctgccggcaagccagcgcgtacagccgcgttatgcactgtctgttgcctggaacgccaccggtctggcaccggtctggcagcgtgcggcattattcaacacggcagaggggcgcacggccaatgaccggctggacgcggcaatgcgcctgttccagttcgccgatgattccaccgccagccgagacatcacgtcattcatggcacaggttcggggcatggaagtgcaggccgattccttggcccacatagggccggtggaagacgctgtgacattgaccacgccggcaggcgcggccggacgccactggggatatgcgtggataccggtggtccagcaagacgtgtggccgaacctcgccgggcgcaacaccatgttcggtggtgaagaccttgccgagctcgtgctgaggggagcgcttgaagaaagtgacaaaaccgggcatgatccgcagttcgcggctgtgctgtcgggcgagaagaagggtttcctggtcgcgctgacccgtgcacggcgaatcatgatcagcgcggtatggaacgacagcatgagcccctcggactttcttttcgggtatctgccggaatactatccgcgcaaccggcaacaggcgcctttcaccacagtgggggcgcatacaggatccgccgaatatgatctggccggattggacgccgacccacgtgggttggtcagcgccgcccgcgcggttctggccactgctcaaccgcagcaggctgccgcaaaggacgccgcggttgcgttgacactcctgtcggagcatggtgtgcgcgccgcaaatccgcagagctgggcgttcgtggaatcgccggcccaatcggatagcgcgtcatctggcggtgcgtcatctggcggtgcctcatccgacagtgcctcatccgacagcgcgtcatctggcggtgtacagtctgacggtatccaaacggggaaaggcaagacggatgcgcaggccgcacccatggtcaccctgtctccatcggcggtcgacagcctatgggcatgtccggtgtgctggatgctggagaaccggttcgccggtcctcgccccagctccgtggccaccagcttcggaaccctcatccatgcggttgcacagcaaggcagcgaggaagggctggaccatctttcccacaatgcccagacgttggccatactgggcttggactccacggccggcacggaacgccgcatcgaggctgtcacggcacggcttaatgccatctatcagagcaaacgccccgatccgaatgccatagccgacacccggaaccgctatgaggccacccgtaaggacgagtccgcggcagatgccctgcgcaacatcgccgattactttgtgcgcagcgacgccgatccggaaacgtatcttggcaagaactccagcaacttcagcattggcgcattggccggtgccgaatgcgaacgggagtttgccgcacgattcgatgtgcgtgacatactcgacgcatacaatgccgtgcccggcatgcacccgatcgatcggaacatgctggtccgtctgatgggagcactggtcggagggtggccggaaggcatggacgagcatctgaccgtgagactgtccgggcgcatcgaccgtatggaaacccgcgtactcgcagacggcggcgaatgcattcgcctcattgactacaaaacaggcagaacgcccacggtcaaacagattttcaatgatctgcagctcgtgtgctatcagcttggcctcgtgttccccgaagacgggccgcgcggtgccaaggcacttgccgcaatgccgcatatcagccaaagcgcgctgttccatgtcgggcagaatgcggcaccagccagaagctacgccccggaaggtgccttccagccgccgctgttcactgatggttcgttgaatgccgaaccgttcacgccacgatactggtataaagaccccaaccgtttcttcgacatacccgccatagatccggctactcctcccgaaggtgtgagtgccgaagcgtgggcgcaattcgccgcgctcgccggtacgcagacgttatggtcgctgaccatgatcgcccgcgtattctatgccgcggcggccagcaggtcggccatcatcgaggcccatccgcaagacacccatatcggattctgccgtatgaagaacgtctgccctgcctgtgcgggccagatcgacacgattttcgaaacgaggcaagcatgagcacgttcactcccagtgcggaacaggccgccatcatcgatgcgccagtcgatgctgacgtactggtggttgccggtgccggttccggcaaaacctttacgatgacccaacgcatcatcgcgcttatcaatcgaggtgtggcacctgaacgcatccttggcctgaccttcacacgcaaggccgcaggcgaactgctggaacgcgtctccgccgcagtggccggtgatatggcgggctctacgaccgccacggtgtctgatcgggcattcctcaagccggccattttcacgtatgacgccttcttccagaccatcgtgcgccaatatggactgcttgtcggattcgatcagaacacgcaaccattgagcgcagccggagcgcttcaactggccaccgaagtcatcgacagtcacatggatctggcgttcagtgaggattttggcgccttctccagtttggcgaaccgtgttctggcgttgtcggatgccattggcagtgccatgatcggtgccggctgcaccagcttcgatgatgcgatcaatcaagtacggcaatgggattcggcattcatcaatcgattgcagcaagccgtcgcagacgaacccatgcccgaggacgagccgaaaatccccaagatcaaacgactgaagaaagataccgacgccagctggcaagccaagctcgatgaccgtgccgaacatttgcatgcccgctgcgcctatcattgcggtgcgctgctggagaccacacgcaaacgcgatattctgctccagctggtggaggcctatgcccaagccaagcgggaacgcaatatggccgaattctccgacttcaccattgccgcgtatcagcttatcgagcgcttcccctccatcggagagcgcacgcgccgcaggtacagccatgtgctgctcgacgaatatcaggacacctccaccacgcaggccgctctgctggcagcactgttccatgtggatgcgtcacggaggtccgccgtcaacgcggtgggtgatccgttccagtcgatttacgcatggcgtggtgccagccctggtgcattccgtatgttccagcaagatttccacctgcctgccggatacaagccattcccgttgtccgtcaccaggcgcaacagccgtatagtgctcgaagccgccaataatctcacgctgccgttgcgctccaatccgtcgcgtccctccagctcattgatgcgtgaggtcgatgtctcatcgctcgaccccatgcctgatgcccccgaaggaacattgggagtactgggcttcgccacggccgggcaggagatcgacgccgtagtgcgtttctgcaagacggccatcgcacggcaccgttccgcagccgaacaacaggaacagatgacgggcgaacagaaagcgccggtcgccgtgctgtttcggtccaaatcacatatgcccgaatatcaggcggcattggaacaggccggattgaccacattcgtggtcggctattccgcgctgctggaacgtccggaaatccgcgatctgatggcgttgctgcacgtggccgccgaccacaccgatacgggatcgctgatgcgcttgctggccacgccacgattcaccatgtccgcagcggatttgaccatgttggcccgttttgctgaagaacagaacacggaacaacgcttccaatcattggtgcaggccggccttgcccaaccggatacaccagcgaatgaatgggcggctgtggtgcgtgagtaccgcgatcaggtggccaatgcggtattcctgccagacgtattgctacgcggcgacctggtaaaactgcttgaacggttgagcgcacacgggcgcaacgccataacccgggccgcggtgatgctccgtcaggtgcatgatgccgtcgggcggccactgggcgacgtgattcgcgccggcatagaagcgttggatcttgacatcgacaccgtattggccggtgtgctgcataatccgcagcaccgcgccaatcccgctttggcgcatatgcctatggatgcgattgtggatttggtggatacgtacacgcaagagattgccgctgagcaaactccctcgttgcatgggttcatcacatgggtggatcatctggcttcggtggaggatgaagccgccagtctccccgacgctccggtggatgtggaactgatgaccgtacaccagtccaaagggttggaatgggatgccgttgcggtagtggggcttaccgccggcggattccccagcaatcagggcgaccatctcaagatcgtgctggacgaacaccatacgggaggcaccgagcaaggtcactggaccgcacccgaatatcatgagaccgccgactcctggctcaccaaccccaccgccgtgcccgtgcctatgcgcgccgatgccggcattttgccgcgattcccccatgatgccgatgtggaagccgaccccatcgcatcgttggcggctttggatgatgtggagcttatcgatgatgaagtgttcggctccatgcgcgaattcggcgatggcgtggaagaagtggatgcatccggctggtatttgacgcaggcggaggaatatgggcgtcggctgcatgccgacgaacgtcgattgatgtatgtggcgcttacccgtgcgcgggaagatgccctgatgacctattgcgcctatacgggcgaatccgggcgggacccgtcagtggtgcccaaaggctctcgcgccgctcagccatccaatttctggcttgaagtgcatgacgcgctccaagcccgtgaacatgcgatatcggctcaggactgtgtggaacggctgcaagccgccaatgccgggaagcccatgttgatctcggcgcaaggcgaagcgattgcccctcccgaagggttctttatcggagagcatgccgcggcatacagtgacgccgtggtgggggaggcgtggcaaacgccgattacgcagacgaatgccgccgccgaattgccgtggccggctaccctcagcgacgcggtgcatgaacagctgtcacgcggcatcgatgtcatcgccgcagattcctcgtcacttgagcagcaccaagacgccggcccactcctgcaacgggcacaattgctggtggacgacgccgatttgatggccgatgccgccagcggccagtcgcttgatgaggcagtcaaagccaaggcgcaacgcgttctggctgcaggacgccagaacgtgacaagcctgcaagcccgcgtaggtggcatgaacgaacgggaggagcgcctctactggcgtagcattatccgcccgattccgcgcatatcgtctccggcggccgaggccggcacgcagttccatgcgtgggccgagcaattcatcaatgccggtaagccggatgaagcggtactggcatatgaagccgaaccaagcatgccgcatacaggtcaggatgcgggattcgtttcccgggaagccatgttggccgatttggccgaacgggagcggcaatgccgcaagccatccacacggcagcccgctgtcccacagcccacggctcaacaatccgtatccgccgtatccgccgtatccgccacttccataagcagcgacaatgccaccgagtccaagctggtggcgtggcagcgcagactggccgaatcatcgtgggccaagcgcatcccggcgtggacggagcgtgccatcgtcgtggacgtgccgggcgtgggcctggtcaatggcaaactcgatgcggtattcatcggtggacttgacccgtccagcaccaccgcacgctttaccgtggtcgactggaaaaccggtcgtcggcccaccaagccagacgacatcacccgcaaacttgcccagctcgacatgtaccgactgctgctggcagcggtcgaaggtgtggaattggacagtatcgacgccactctctactatgtcagtgagcccgacgagggcttgcgcgagcttcacgcccgcgcgaaaaccaaacaggaaatccttaccgagttgagctccggcattcccgaacaatctgacaacgactgagcccaaaggctcatgacctgtacagcatcggacggccttcaccggtggagagaccttatgcatcgcaaggcatctccgacgatgaagacgactggccacgtaccggtccgcggttgaaacgcaccgcgtgacgttgctcgggaaccgctaccctcggatggcacgtgtgggcgggcgcacgtgccggacaacgcaccagtaaggagttattgtgtccacgactcgcgcggtttcgaagtcgtccgctgcccactcgccctaccagcgcctgttcatgctgcccggagccaaggcgttctgcctgtccggcgcggtggcacgattgccgatctccatgatgagtctcggcatcgttctggcgctcaaccatctctacgacaattggaccatcgccggcaccatgagcgccgcctatgtgctggccatgagctgcgtcaccccgttctacgcccgcgccttcgaccgtttcggccaagcccgcgtgggccggcttgcgctcgccgtgcagatcgtggccatgctcgccttcgccttcgcggcgttggtgcgcgtgccgattccgctgctgttcgtcctggccatcatcatgggtctgacgcagttctcattcggcgcattggtccgaacacgctggtcctatgcgttgcgcggtgtggaagatggtgaacagctgctcaacacggcctacgccatggaagccgccattgacgagatcgtctttattctggggccgattctggcggcttggctggccacctccgtgcatccggtatcccaactgttcgtgcccaccgtggcatgcggtatcggcggcactatattcttctcgctgaaatccacccagccaccggttatcgtggaacaggtcaccgtggccgcgcacgatgacggcagccctgctgcaagcgaagatgccgaccagctgaccctgcgccagctcaaacgcagcggcgccaagcccaagagcgtattgctctatgccggcgtactgccgttgctcgctgtgttcatcgtgttcaatatgagcttcacgtccttcgacgtgtccatcaccgccaccatgaaatccatgggacttgagcccttcctcggtctgcaattggcgatgttcgcggtcggctcgtgcatcggcgcgctggtgttcggctcttgccgactcaaaggctcccattgggcgcatatggtgatgttcctatcgctgctgaccgtcggctacgtgttcttccggctgtcaatggacaatctcatcctgctgggcgtcttcgaaatcctcgccggcctgaccgtctcgccgacgttcgccaccggcaacctcatcgtcaaggatctggtgccggcggaatccctgaccgaaggactgagctgggtaaccaccgcaggcacggtcggcacatcgatcggctcgtccgtggccggtattgtgcttgacgcctccaaccctcatgtgggcatgatgctgccattcatcttcacgctggcgtccgtgccattggcattggccggatgggccttggccaagcggcgtgggtgaaacggaatcgggctacgaccgatggatggttggcggcttcgccggggtctctccctcagtccgcttcacgtccagctcgaacgcaattaaatgatggctttcagccaactgaattattgctcactgtcgttcgccctcacctaaaaacgcctccggcgttttcttcacggttcggctcatcagagggagctcgacttcacggttcggctcgtcagagggagcttgattctgtggacgggatattggcgtgagggtttggcggtgataggctgattgccgattggaaaacgtcccgggtacattgccgggcaggtacgggtagacagggaagaagacatgatcaaggtttcggtggtcggagcaaagggccgcatgggctcgcacgtggtcgaagcggtgaacaaggccgaggatacgcagctggcgctcgcattggatgccggcgacgacctgacccaggtcaccaccgacaacaccgatgtggtcgtcgaattcaccgtgccgtccgtcagcctgaacaacgtgctgaccctgatcggccaaggcgtggacgtggtggtcggcaccaccggctggaccgacgagaaactcacccaggtcaaatccgccatcgccaacggcccgaagcccgaaacccagaaggtcttcatcgcacctaatttcgcgatctccgccgtactggccgactactttgcaaccaaggccgcgaaatacttcgaatctgccgaagtcatcgaactgcaccaccccaccaaggtggacgccccctccggcaccgccattcacaccgcccacggcatcgccgaagcgcgcaaggccgcaggactcgcccccgtgccggacgccaccgaaaccgatggcggctcacgcggccaggtggtcgacggcatccacgtgcacgccgtgcgtctgcgcggcctcaacgcccacgaggaagtgctcttcggcaacgccggcgagcagctgaccattcgggccgacagcttcgaccgcaccagcttcatgcccggcgtcctgcttgccgtgcgcaagctcgccggcgacgctccggctggcctgaccatcggcctcgaccacttcctcgacctgtaatcgacccgcagtcgaccagtagtcgcccccgcatttcaggcagggaagcgcgccgggacgcgcatcacggcattgccaccggttccggtcataatgccacgcattcagcaacaatcaaggtacgtaatgtaagagtccacaatgggaagtacggtgaacactatgagcgagcatgacatgcaccttcttgagccagcacctttcggccgcattctgccggctatggtcaccccgatgaaatccgacggcagcgtcgatttcgccgccgcgcagaagctcgccaaatacctcgtcgccgatggcgcggatggtctggtggtcaatggcaccaccggtgaatcgcccgtcacccatatggatgagaaggtcgagctggtcagggccgtcaaggaggtcgtcgacgttccggtgatttccggcgccggctccaacgacaccgcacacaccgtgcgtatggtcgaacagactcaggaagcgggcgccgacgcggtgctcgtcgtcatgccttactattcccgcccctcgcaggacggtatcgtcggccactacaaggccgtcgacgaatccgccgaaaagccgatcatcgtctacgatgttcccggccgtaccggcttgaaggtcaaggtcgaaacctacgaccgactggccgaacttgaacacgtcaaggctgtcaaggacgccaccggcgatcttgcagccgcagtggagaagcagcagcgcaccggcctcgcctggtattccggcgatgacggcctgttcctgccgttcctctccatcggcgccgtcggcatcatttcggtgattgcccacgtcgcctccaaccccatgcagcagcttgtccaggcattcgatcgcggcgatatcaccaccgcccgtcgcctcgccaaccagctcgccccccttgtccacgcgttgaatggc

SEQ ID NO: 1173 - DNA, 13325 bp, Unknown
  R81_24m  MAG No. k141_13309
ccgaccagatcattcccgctgtgttcttgaagcgcgtgaccaagtccggcttcgatgacgccctgttctacgcatggcgccgagacccgaacttcgtgctcaacaagccggaatacgccggtaagggccagattctggtcgccggccccgaattcggcatcggctcctcccgcgagcacgccgtgtgggcgctgcacgattacggtttccgcgtggtcatcgcgccgagcttcgccgacatcttctacggcaacaccgccaagaacggcgtgctggccgcgattatgccgcaggagtccgtcgaactcctgtggaagctactggaggaagagcctggtcgtgagatgactgtctcgctggagacccgcactgtcacttgcggcgacgtgaccctgccgttcgaggtcaacgattacgtgcgttggcgtctgatgaacggctacgacgatatcgatctgacgctgcagcacgaggacgacatcgccgcctacgaaaagatgcgcgccgaaaagttccccttcaagcccaagaccatccccgccaaacactgggccgaagaaagaatcgagtccgcccgcgagcctgaggacgcagactggacagggccgttggccgatcgcggcattatttagccgcgatcggcctgctgaaagcccggtgggctttcagcaggccctgtgccgagctgcgacagcagcgaggccagcattgagcctcgccgaaaggcgagtccataattgcaggcccagggccgttggctctgtgtctgattgagattattgggtcgctcgcatcgcatcaaacaaaggtctcactggtgcccgcgccccacatccattgcgcggcgggcaggagttgcggcaatattcccttcagtgccaacaacgccatacggtcgttatccaccgcagccaccaacaccggcgtggcggcgctttcctcaacactcatgaactccgtcctagcgttcgaaatactgtgcctgaattcgtacacatttgtggacataatcacgattcatccagtaatgacggttaggttgagcatcatgaccatgaatgacatgaatccgtcgaacgattccgatacggctccggcgcaatcgctgtcagcgcaaccgttgccacctcgaccggcaccgcagtctgcggcacagtcacagacgccgatgccacagacgccacagtatgttcagcctgggccgagcatgcagccgcaatatgcgggtcagccggaggcatgggcacaaccgctacctccacaagatgtttcacggggtgttccacggattgtttcacaaggtgtttcacaacctgtgccgcaagccgcaatacctgctgtgcagcctgcacaatacgccgcgcagctcgtatacccgacatatcccgtccaacctacgtatcctgcccagccgatgtatcccgcgcagccgacgtatccggcgcaatccgcctattccccatacccggcgcaacagtcggctccacagcccctcgctcatccgtactacgctcaaccagtgggctacgcgccacaaccctattccgctgcgccgcaaccattcgtgcaaacggctccggcaatgccagtcacaatgcccaacgcaatgccggccacgatgcccgcagcaatgcccgtggtcatgccgatcgatcctcgccgtgtatggcgcacgtggcgtcgcaaggtggtcaatcgtgtaatgggactgactctcgcctatgaaggcatgatgctcttgggcgcaatggtcgccaccattatcgtcggcgtaataaccgcgagcgatttgtccggcgtgcagtgggatggcatcatcagcctgatatcggtgttcgtcgcgttcggatttctgctgctcatgcgccaccgtgacatcttcacctgcgaattctggcttggtggccagcatcgcgactcgtacggggagcccaatcagcttggccacatcagccaatatggcggcgggcgcatgcagcctctctgggcgttgatgttcatcgtgctgggcatgggcgtgcaaggcatcgttatgttggtgcaggtcgctttttccatgctgggcaccgatcttgcctctcccacgtcagacagcatcgccgaatccagcgtcaccgtaagcatgtggctgtacgttgggctggtcgctccgatttgcgaggaagtactgttccgcggcgtactgatgaaggagctcaagccgttgggcaagaacttcgccatcgtcacctcggcaatggtgttcggcctgttccatgacgacgtagtgcaaggcacattcgcgttcctctttggcctgattctgggattcgtggccatggaatactcgttggtttggtcgattgcactgcacatcttcaacaatgcgattctttccggcgccatcgatacccttgccggcaactatcttgatgacaacgcatatttgatattctcattgtcgctatctgtgatcggcgtgatcggatcgattatcatattcgtgatatacggcaaagagatgcgccaatatcaccgtacgaatcgtagtattccagacacgtactttggctgggcagccccgacgttcatcatctttgtggtagccaatgccgctttcgccattatttcgtttgtcggcgcgatgatgggttgagtgtgcgtgtgcgcatgcaggttggcttatcgttgaagcatgagtgattttgagccgttttacgatgtcagccgcagttacgaagacaactatgagcaagggccgttcggcgcgttcgccgaggcgctgaaggatggcaacggtgccgatgccgccggaaccaccagcgagggtgccttggccacctttttgggccagccggtcaacctgcctttcggcattcccgcaggcccgctgctcaacagccgtttcaccacggccgctttccacatgggtttcgatctggcgacctacaaaaccgtgcgttcgcgcgcctggggctgcaacccgttcccgaacgtgctcgccgtacaccccaagtcggcggacggttcactgacgccgggcagcgccgaactggacgaaggcgtgctggccgacaccaactatgaacagccgatttccatctccaacagcttcggtgtgccctcgcagagccctgacgtctggcagtcggacatgcgcgccgccatcgaggccgccggtcccggtcaagtgctggtcccgagcttccaaggctcgcgtgtggagggcatgagcgaggaggaatacatcgccgaccatgccactaccgcccgcctggtcaaggagaccggtgccaagctcatggtgatgaacaccagctgccccaacgagggccacaaccgcctgctatgccacaatccgctgctcgtgggccgcatcaccgaggccgtgaagcaggagatcggcgacatcccgctgatggtcaagctcgcctacatccccagcgacgacgctctggagcttatggtgcgttccaccgtgggccacggcaccgtgcagggcttcagcaccatcaatacgatttccgccaaactggtcgatgccaatggcaatcaggccctgcccggcgcgggccgcgatcgctcaggcgtgtgcggcaatgcgattcgtggcgccggcctcgacatggtcgcccgtctggccgcgattcgtgaaaagctcgggctcgatttcgcgatcaacggcgtcggcggcgtggtctcgcccgccgactaccaggcgtaccgtgacgccggcgcggactcggtgatgtccgccaccggtgcgatgtgggacgccgaactggcccacaagatcaaggccagccggtaaatcggctccaaaaacaagcaacagcctgtacgggccgtgattcccagacgattcccagacagtgcccatgttgcattgaaactgttgctgttatatgtaatcacggccgaacaagctgcataacttaacctctttcttcttctctcctttctctccccggcgcccatcacgccggggtttctttttgcggtgggtacagccgtcttactcggccgccgccttcatggccacggctccgacgtagtagaccggcttgtcgaagttcggctggaacaggaagtccacgttggcgagctggtcgatggtgaagccggcctgaatcgccatggaaatcacgtttgccgcgccggagatatcggccttggaacagaactggccgcccttgaccttgcgggtttccgggtcccaggtcagaatcgacgtgactggggtggtgatgagcatgaagtccgggcgataatcctcggtgagcgaggtctcgcggaccgtgagcccgcggcgttcggcaccggcgcgggtcaggccggaggcggcgagcgagagatcgtacagctgcacggcggacgtggcctgcgtgcccatgtacttcacggtcggcgtctcgatgttgcggcccaccagcaggccctggcgcaccgcgttggtggccagcggaatgtaatcgtgctggccggtggggttgtagaacacggtggcggagtcgccggcggcgtacacgcccggcgcggacgcctgcatgtagtcgtcgaccacgatcgcgccgttcggcagcatgtccaccttgcccttgagcaggtcggtgttcggcaggaagccgacggccagaatcgccatttcggccgtgtactcgcccttttcggtgaccacagtgacggtgtcgtcgtcattgtcgcggaactcgaccaccttctggccgagcgcgagcgtgacgccgtgctcctcgaacgcggccgccacctgatcggtgatggtcttatcgaaattattggccagcgggcgatcaaggccgtcgaccagcgtggtcttgacgccggtgacgctgaactgctcggcgatttccgcgccgatatagcccgacccgatcaccactgccgacttggcggttttcgccttttccttgatggcgatggcgtgatcccagttcttgcacagcagcacatgcgggctgtcgatgccggggatcggcgggatgaccgggcgcgagccggtggtcacgaccagtttgtcgaaagcgagggtctgttcggcggggtctccggcctcgtccagcgcgcggtaggtgagggttctggcgtcgaggtccacggacgtcacgtcggtgcgcatatgcatggtcgcaccggcttcggccagagcggcaggggaggagtagaacattttcttcgggtcggatacgtggtcgcccacccacagggcgatgccgcaggagaggaaggacagcgtaccgttgcgctcgaaaacatggacggtccaatcggggtgctcggcgagaatcgaggtggtggcgaacgtgccggcgtgcgtgcagccgatgacggcgactgtggtcatgaatgctcctttgcttgtggccatggcgtctgatgccattgccctgaatcgtagcgtagaagtatggagaacaccgtggcggcaaatgtgaggaagatcacgttatcggtttgattcgacgggggggggtatgggatccgttgtgcacggtgatcaaagttcggctggggtgcatttcacggagtcggcacatggcttatggcaaactggacggtagcattttttgaatcttgattgattgaggagagtggcgtggctgagaatccggatgacgtgttgcatgtcgagggcggcaagcctttgaatggcacgatcaaggtgcgtggcgcgaagaacttcgtgagcaaggcgatggtcgccgcgttgctggcaccgggcaagtcggtgctgaagaacgtgccggagattcgtgacgtgcatgtggtgtccgatttgctacgtctgcacggcgtggacgtggatgtggacggtgcgaacggcattgtgaccatcgacgcctcgcgtgtgcagctggccgatgtggccgacgtggatacactgtccggttcgtcacgcatcccgatcctgttctccggcccgctcgtgcaccgtctgggcgaggcgttcattcccgcgttgggcggctgcgcgattggcggacgtccgattgacttccatctggagacgctgcgcaagctgggcgccacggtggacaaggaacacaaggacggcatccacatcaccgcgcccaacggcctgcacggcgcgaagatccacctgccctacccgtcggtgggcgccaccgagcagactttactggcggccgtgctggccgagggcaagaccgaactgtcgggcgcggccactgagccggagatcatggatctggtgtgcgtgctgcagaagatgggcgcaatcatttctgtggacgttgatcgcaccttccgcatcgagggtgtcaaggaactgcaggggtacacgcacacgtcgctgacggatcgcatcgaggcggcgtcctgggcgtccgccgcgctcgccacgcacggtgacattttcgtcaagggtgccacccagccggagatgatcacgttcctcaacgtgttccgcaaggtgggcggcaaattcgaggtgacggccaagggcattcgtttctggcctccgggcggggacttgaagaccgtggcgatcgagacggacgtgcatcccgggttcatgaccgactggcagcagccgctcgtggtggccctgacccaggccaacggcctgtcgatcgtgcacgagaccgtgtacgagaaccgtttcggcttcaccaagccgctggtcgagatgggtgccaccatccagttgtaccgcgagtgcctgggctcgctgccgtgccgtttccggcagcgcaactacaagcattccgccgtgatcttcggaccgaccccgctgaccggacgcgacatcgacgtgccggacctgcgtggtgggttcagccatctgatcgcggccttggccgcgtcaggcccctcggacgtgcacggcatcagcctgatcgaccgaggctacgccgacttccgcggcaaactcgaagcgttgggtgccgacttcgattaattcggccgttcctcggctcccctctctgaggggagccacaattttttacaacagcccgtccgcctcaagtgcggcggccatgcggtcgaagcattcctccagtagcgggtagggcatggcgaagttcatacgcacgcaaccgcgcccgacctcgccgcattcacggccgtctgtcaacgccacgttggccttcttgaagaaatagtcggccgggtcatcgatgcccagtgacgagaaatccagccacgcgatatacgtgccctgcggctccacatagcgcaccttggcgaatctcgtgcgcatctgctcgttgaccagcgcgatattgcgctcgatgtacgccatcacgccctcgaaccatgccgcgccgccgtcataggccgcagtggtggctatggcaccgatggtggccgtctggtgctcggaccattccgcgttcctcatccacagttccagatcgtccggattggtgagaatcacctgcgcgcacttggtgccgggaatattgaacgacttcgaggctgaagtggaggtgaaagcctgcatggccgtctgccggttgattgaggcgaatggcacatgcgtgtggccttggtagacgaacggcgcgtgaatctcatcggagaatatacgcacgtcgtacttggcggccaggtcggacaatcgcagcatttcttcgcgcgtcaataccttgccgatcgggttgtgcgggttgcacagcacgaaggcatggcagccgttcgcgaacgcctgctcaatggcgtcgaaatcgaacagccattcatcattgcgcccgctgctctcgccggcgccctcgcacagcatcggaatctcaaggacctccactccatacaggcgcggcacgctcaggaacggcatataggccggagtcggcaccacgatggagttgccggcgcgcacaatctcgcgcaggaacacttcgaacgcctccagcacgtccggcaccggacggatgcacgtcggatccacatcccagccgtatcgacgctgccatgcggcgcacgagcgggcgacctccttcttccacgggtcgggaatgtagccgagcgcgccacgttcggtggcctcttcgatggcttcggccacgcacggcgccagaccgtaatccatctcggcgatgaatgcgccgatgcagccggggtagcgggtccatttgtccgaaccgacctgcttcagatcttcgatggtcgtcacgtcgatgtgattggcatcaaagcaagaggcaccggcggttgcgctgctcaaagtcgttgactgggaaacgttgttcatgctcataacatgtcattgttcctggtacagaagggctgctcaacggtctggctccccgaaatcgtgatggcgttcgcaagcttgcttatcgctgtccgactacttggcgctcaaatatttgagtgacgtgcgctcgagctcttcgagcaatgaaccgagcgcgggacgatggtcgccggcacgagtcacgatgccgacctcgcgcgccgcaaaatcgtcggcgatgggacaggccaccagatcgccttgcagattgatatgtgtatcgagcgccggcaccagcgagacgcccatgccaacctcgaccaggttctgcgtggcccagtaatcatccgtgcagtggcggatatccggcttgaatccggcacgggtggccagtttcaccaaatttgcgcggcaggtggggcagccggcgatccaatgctcgtctttggcggcggacagcggcacgggttcgccggtctcctcgaatcgtttggcgatgtcgctggagcggcggaccaacaatcgcatcggatcgtaacccagcgactggaaggtcagatcgtcgccgatgtgcaggaagttcgggatgctgctgtaccggaacacggcggcggcatcggccttgccttgggaaatcagaccgatcgcctccggcggctccatctgaatcaggctcagctcgatgtccgtgaacatactgagcttgaccacggtacgggccgcgatagtagagcagattgacggtggggccaccaaatgcaggtgagcaaaccgatgatgccgataatcctcgacctcacgggccgcccgctccagccgatcggcgatggcctcgccgtggcgggcgagcatcgaaccggtggcggtgagttccacaccatgcgaggtgcgttgcaccagagtcgaaccgcactgtgcctccagctttttgatctgctggctgatggccggctgcgaccaacccgtggccttggccgtggcggagaacgaaccatactgttcgatctgccacaacgtgaccaatgattgggggttgagcccggccatatgcacctctttcgcgcgtcgttccattatggccgccgacaatgaccggacgcggcatggtgtcgccgtcgccggtatccttagaagaatgagccctgaagccttaagtgaactgatttccagcattgcccacaacctcgtcgccgccggccaggccggcacgttgaccgacgagatgattccgcccgtcgacaagctcgccgtgatgcgcccgaaggaccgcgcgcatggcgactgggcctccaacatcgccatgcagctggccaagaaggccggcatgaagccgcgcgatctggccgagccgttcgccgccgcgctcgctgaagccgacggcatcgccaaggtcgaggtggcaggccccggcttcatcaacatcacgcttgactccgcctcggccgccgccgtggtggacaccgtactcgccgccggtgccatgaccgacaccgacaagcatctcaacaaggtcaacgaatacggccgcaacgcccatctgggcggccagaccctgaatctcgagttcgtctccgccaaccccaccggtccgattcacatcggcggcactcgttgggctgccgtcggcgacgccatggcccgcgtgctcgaggccaacggtgccaaggtggtgcgcgaatattatttcaacgaccacggcgagcagatcaaccgcttcgccaagtcgctggtcgccgcttgggctgaggccaataacttgggcgaggccggctaccagaccgaaaccccgtgcgacggctacaagggtgcctacatcaacgagatcgccgcccgtgttcaggccgaagccgagtccgacggcgtggacctgaccgcactggcccaccaggatcaaggcctcaacgacgacggtgaaccgctcggcgaggccgacaccgaagtgcgcgaggaattccgcaagcgcgctgtgccgatgatgttcgatgagattcagaagtccatgaaggacttccgcgtgaacttcgacgtctggttccatgagaacagcctgtacgccgacggcaaggtcgacgccgccatcgaagagctcaagtcccgcggcgacatcttcgacaaggacggcgccacttggtttgaatccaccaagcacggcgacgacaaggaccgtgtgatcatcaagtccaatggtgagttcgcctacttcgccgccgacatcgcctactactgggacaagcgccatcgcgccgaaaacccggctgacgtggccatctacatgcttggcgccgaccaccacggctacatcggccgcatgatggccatgtgcgcggccttcggcgacgagcccggcaagaacatgcagattctcatcggccagctggtcaacgtgatgaaggacggcaagcccgtgcgcatgtccaagcgcgccggcaacgtcgtgaccatcgacgatctggtctccgtggtcggcgtggacgccgcccgctactcgctggcccgctccgactacaaccagaacttcgacatcgacctggccctgctcgcctcgcacaccaacgacaacccggtgtactacgtgcagtacgcgcacgcccgctccaagaacgtggaccgcaacgcagccgccgccggcatcagctacgagggtgccgacctggccctgctcgacaccgaggccgacggcgaggtacttgccgccctcgcccagttcccgagcgtgctcgccactgcggccgacgaccgccagccgcacaaggtggcccgttacctcgaagaactggccgccacctatcacaagtggtacaacgtggagcgcgtggtgccgatggccctgaccgatccggaaacccgtggcgacgatgaggctcgcaaggccttggagatcgccaagaatccggagccggcccgtgccgccgcccgcctgaagctcaatgacgccgtccagcaggtcatcgccaacggcctcgacctcctcggcgtcaccgcccccgaaaagatgtgattatgcccatttctccaatttggccggccgctacggctgtgaatgccgacggtgccattacattccacggtcgtaccgccgaatcgctgcttgacgagttcggctcgccgctctatctcatcgacactgatgaagtagtcgcacgtgccaggcacttcgtgcgcgctgccgctgaagcattcaacacatccactacgcacgtgagctttgccggcaaggcgtttctgtccaaagaagtcgtgcgattggtcaccgaggccggcatgttcgtggacacctgcacgatgggcgagatgaaaatcgccctcgccgctggcgttcccggacgtcgtctggtgctgcacggcaacaacaagtccgatgaggaaatcgcgctggccatcgaacagggcttcgccaaaatcgtgatcgacgagcccgacgagccggagcgcgttgctgccatcgcccgcaagctcggcaaacgcgcccgtgtgatgctgcgcgtcaccgtcggtgtccacgccggcggccacgagtacatctccactgctcacgaggaccagaagttcggcgtgccgctgctggccgccggggccgacgccgccgtgctcgacgtgctgaacgccctcaaagacgtgacgcctgccgctaccaacgcgcgtatctctgcgacgcattccccggaaaatggcgcggaaaagaccgagaaatcagagcgcgagctgcactacgacgtcaagtacccgtacgacctgagccacgaggaagtctccgacacagacaaggcgctggccgccgcgatggaagccattgcggacggtccgtccatcgccgtgctcaagaccatcctcgccgaccaggacgtactcgaactggtcggagcccactcgcacatcggctccaacatccacgatgcggacgccttcattcacgcggccaagcgcatgatgctgctgcgcaagaccctgtgggccaccgacgcctacatcctgcccgaaatcgacctcggcggcggctactccgtggcctacaccgatggcgaagattcaatggacattgacgtggaactcactcgcttggcggatgcggtcaacagcaccaaccgtgcgctcggcatgcccgcgccagccatcagcttcgagccgggccgttacatcgtggcacccgccggcgtaaccctgtaccgcgtgggcaccatcaagcacgtgcacttgtccgatgccaaagacagtgccggcaacccgattgccgagcgcgtgtacgtgtccgtggatggcggcatgtccgacaacattcgcccggcactctacggtgccgactacaccgcgcgtctggcgaatcgcactggttccgctgaaacgatgcttgcccgtgtgtgtggcatgcactgcgaatccggcgacattgtggttcacgaggtgcagttgcccgccgatttgaagcgcggtgacattctcgccgtgccggttaccggcgcatacggccgcaccatggccagcaactacaaccaggcgctgattccggcggtggttgctgtcagcgagtccggcgcgcacgtcatgctccgccgccagaccgtagacgacctactcaacctcgacgtcagcgagtaatcagcgtgcagaggtgagcgcctgacagtctgtaatgtgcggccaaaaccgtcataatacgaaaagggccgtcagcttgatgagtactttcggtctgctgtcggaaataatccgtaaaataggcgtgggatatagaaaactttttggaaggaccctgaattggctcacaacagcgaaaccccgattcgcgtaggcctgcttggtgccggcaccgtcggctcccagaccgcccgcctgattgtcgagcagaaggacgaactgtccgctcgtatcggccgcccgatcgaactgaccggcgtcgcctgcctcgacccgaaggaaaccgagaagttcccgtggatcgaccagtccatcgtcaccaccgatactttgagcgtggccaccaactcggacatcgtcatcgagctcatcggcggcaccaccgtggcccgcaagttcgtgcttgccgccatcgaatccggtgcttccgtggtcaccgccaacaaggcgctgctggccaagtacggcccggagatctactccgccgccgaggcca

SEQ ID NO: 1174 - DNA, 6475 bp, Unknown
  R81_24m  MAG No. k141_13334
aggcctcggccttgccggcgacctgacgcgggtcgcgggagtacggctcgtcggtcagcgggtcgacgatggagaaggccacgtcaagggtcttgtgcttgcggaacgggtcaacgaaagaggtctcaacgtccgggaccagcttcatgtcggactcgttgatggcctggaagccctgaacggaggaaccatcgaacggcatgccgtcggtgaaagcgtccttcaggaattcgctagccggcacggtgaagtgctgctgaacgccgataagatcggtgaaacggacggagacatactcgatgccttccttgttgataagggcctcggcgtcttccttggacttgagttcggtcacgggaccgctcctttcgtatgagatataacggtatatatcgtaaaatagcgcgtttcgccggctcgaaacttgggttacgagaatgtttcgtgactgtggccgacaatcgcgcaggcgcgttatttcaacgaaacatcattacagaatggaaacggagactatcgggggagtaggtagagatgtccgcaacgtggacagtgggtattgacaggtgacgtaggtggatgtaagtggacgcgattatgagacatatgacgaagccccggaaccgattgaacggattccggggcttctgtgcgatttggttgtgtgctgccgatcagcgaccgcgcatcgcgcggcgggagatcttctgcgggcggttcggatccatgcccttggggatggcatagcccttcttggcctgcagcgtgcgaagacgatcgttcagcgtttccatctcggccttggtcagcaggaagcgacggcgcggatgaatcttggcgatcagtgcgttcttgtggtccgtgggctcatagctcttggacttgatcaccgtgctacgcagcttggtcagcggcacctgcttggggccgtggcccacggcgatgcggtatatcggaatggaggagccggcggtgacgcccttgatatcgcgttcctgacgatccatcgccttcatgacgcgaccgtattcgccttcgccgatcaggtagatgccgttcatcgaagtgccgcgccagatggcatccttggtcttcgggtcgatccacaccggttcctgcgggaagtcaaagccggctttctgcatgttgctcagcacgccgatggcggcaccaggcttgccatcaatctgcttgtagccgactgcatccgcgcggcgggtgagcatcatggtggccagcagaatgccgagcatgatggcggtaatcatggtgaagatccaggtcagccaggtccacttgacaatcagaccgatgatgatcatcacgactacaggcagcaggaaagcaccggcctcaagccacggcagggccttgtcttccttagccgtgtacttgtagatctggatgatctgcttgattgtgctctgcttcttcggcttcgcgtccttttccgccatcacttcttcctttgttgggacgaaacacactgggcaatatcttatcaggtgcgctggtccgaacttgcttgtgctggttggtctcagcgtgtgtgcaacggtcgtccgtcggccttgagcagcgcctcgccgagcgtttcactgaatgtgggatgcgggtgaacgaggcgggctgcgtcggcgagcggcacatggttgccgaccagctgttcggcttcggcgatgatgtcggaggccatcggggagaccatgtgcacgccgagcacgcgcggggtgtccgggttggccgcgtcgcagccggagacgatggtcaatgagccggccgtgccgctcatcagcatgcgcgcgttcgccagcatcggatagttggtctccttgatttcgacgaggtcctctctcgcctgcgcctgttcgacggtgagcccgaccgacgccgcttcggggaaggagaacacgatctgcggcacagcggcttcgtccaccggcttgggattgagtccggcgatggtctccgcgatgacgatgccttgctcaaaagcacgatgcgccagtgcgtgaccggccgtcacgtcgcccaccgcccatacgcccggtttgtcggtgcgaccgtacgcatccgtggcgacatgtccgtggtcatcaatcgtcacgccccatgctgggtcggtgatcgggtcacgcccgatggcgacaagggcgatttcgccccaaacgctctgttcgccgtcctggccttcgcgcgtgtagtgcacggtggcaccaaggttcgcgccggtgtccacatgggtgacgctggcgcgggtgatgatgttcacgccatgacgtttgagctcacgggtcagcgtggtgccggctctccggtcccaggctgagagcacgcggtccttgcgaatcagcagggtcaccttcgaaccggcggcgttccacatcgaggcgaattcaagggcgatggccccggcgccgataatcaccgccgaagagggaaattcgttgacttccagcgcctgtgtggagtcgatgagggcgccggcgaacgggttaccgggcaatgggtgtggcttggcaccggtggcgatgacgatgttcgtggccgtgaggtccatcgtggggccgctgggttcggggacatcggccttgtgataggtgaggatgtcgctttggtcgggggagggaacgaggtggacgatgtggttggaagttgctggagcgatctcatccgcatggaacgcggcattggctcggaacacggtgatgccgcgatgggccagcagtccggccagtcctcccaccatcgtcttgaccacgcgcaggcgatagtcgcgcagcgtgccgaagtcgatgccattcaccgaggcgttgacgccgagttcggccgcacggtgcacggtgtcgatggtgtgggtggcggtgatgagcgccttggaggggatgcagccacggttgagacaggtgccgcccacggtggcgtcacgctcgacgagtgccactttcatgccgagttcggcggcgcgcagggctgtggaatagccgccggggccggccccgatgatgaccagatcaaactgttcgctcatgattgcctccttggtgcatataagtatggctcccatgctagggagccatatgcggctatcgccgccacttcgcctaaaaacagtccactggactgtttgctttacggctcagcccctcaacgaggggagccagagtatatatggacatcagtctgccggccagtgaccgcgcttcgggtaacgcggcttgggaagcctccaacgacgcatctgaatcgaacggctccaagcgtaggagaaggagcgggagcccttggacacggactgttcgccgtacttggcgatgagcttggccttgagcttgcgccacatcagccatacgtcgatgatcacggcaatcaggtaaccgtacataagcgccatcatgatgatggaagcccactggttctgcatcaaagaagtgacgaacatggagacgatcagaatcgcgaaggccaccgggatgaaccattcgccaaggttgaaacgggcatccacataatcacggatgtagatacgccaaggcaggcgttccgccttgggcatgtggttgatatcgcccttctgcatcgcctcgtactcggcgttctccttctcacgcagacgggctttggcggccttggcgctggccttgcggtccaccggaaccagcggacggataccggcggcctgagcctgcttcatcttcggggtaggacggccttttttctcagaaggatcggcggtcttcttcggggcctgctcaacgggaacttgggcctcttcttttttcctaaacggattccatgtcatgctttgaggttacggtgacgttcagacacttgtacactggcgcagccattgcaatgacgccgctcacacacatataaaggaggaccatcatggcaacgctcaccgctgacgagattcgttcgcgcgtcgaaaccgattggaaccgcatcgtcaaggtgctggccgaaaaggtcgcgctgcagtcgatttccgccaagggcatcaccgccgaacatatgaagcgctccgctgaattcgtggcagacgaactgcgcctcgtgggtgtggatgccaaggtggtccaggcttccaatgccgacggcactccgggcgcatgggaggtcatcggctcgcatatcgtttctccggacgcccccaccgtgctgctctacgcccatcacgatgtgcagcctgttccggacccggccgagtggaacaccgacccgttcgtggccaccgaaatcgacggccgtctttacggccgtggctccgccgatgacggcggcggcatcgccatccactccggtgcgctgaaggctttgggcgacgacctcaacgtcaatatcaaagtgttcatcgaaggcgaagaggagatgggctcgccaagcttcattcccttcatcgaggctcaccgcgacgaattcgccgccgacgtgattatcgtggccgattccggcaactggtcggcggacattccttctttgaccacctcgctgcgcggcaacacctgcgtggacgtgaccgtgcagggccttgagcacccggtgcactccggtcagtacggcggcccgattcttgactccaacacgttggccgccatgctcatcgcttccatgtacgacgagaacggcgatctggccgtgcccggcgtggccgcggaagagccaatcggcggtttgcaacgcgaccttgacgaaaccaccgtgcgcgaggattccggcgtggtggccggttacgagttcgccggcaccggttcgctggcctcacgcctgtggaccaagccgtccgtgaccgtgatcggcttcgacgcccacccggtcgagggatccttcaacgtgatcgccccggagacccgcttccgtctgtcgctgcgcaccgcgcccacccagcgccctgaagaagcgcaggaagcactggctgcattcctcgaatcccacgcgccgttcggtgccaaggtcactgtcgaacgcggcgaaaacggcatgggctgggccatggacccgaccgccgtggccaccaaagacgcgctggaagccatgaccgaggccttcggcgttgagcccatcaacaagggcgagggcggctccattccgttcatccccgaactgcagcgcattttccccaacgctcaggtgctggtcactggccccgaagacccgaaggccaacgcccacagccccaatgagtccatctccctgcccggcctcaagaacaacgtgatcaccgaggctttgctgctggacaagctcggcaagtaaccgaaccgcatcggtaatggtggcgagccgccgtcaggtaggtcacggatgtggctattgcctttgacggcggcttgctttatagtcggggagttgacacgggagctgccgttaggcggctgagaggagattcatagtctcgaccgatggaacgtgaccggataatgccggcgcacggaaatgtcgctcttacccacccgtgcctgaaccaacccgcgcgtggccacgaacatgtgcatcatgtgcgtacatatatccatgtatgttcggcctgcgtacgagcagaagaaaggcacattcatgactgaagctgtggccaaagccaattacaagtggcgcgtcgtcgatatcgtcgtcgccgcaatcatcgccgtcgcatccggcgtcattttctggggctgggacattgtctgctccgccccgctggccctgttcgagggcgtgacccccggtttcgagggtctgctcaacggattctggctgttcgccggcccgctcgccgcaatcatcgtgcgcaagcccggtgccgcactgtttgccgaaaccctcgccgccttcctcgagcttacgctgggcaaccagtggggtgtcggcggctcgctgatcgtcggcatcatccagggtctgggtgccgaaatcgccttcgccgtcttcgcttggaagaagtggaacatcggcaccaccatcctgtccggtgcgctcgccggcgtgggctgctgggcctactactgggccaccaacccgggctggaacggcctgcgcgtcacttggtatctggttggctccatcatctccggcgtcgtgatcgccggcgtggtggtctggtacttgtctcgtgcgctcgccgccaccggcgctctggaacgctttgaatccggccgcagcaaggcgcgcgtctgatgcaggttaatccggccgcggtcagggccagcggctggggatggcggcacgccacgcgtaaggacttcgcgttgcgtgccgtcgatttcaccatccggccaggtgaacgtgtgcttttgctcggcgcttcaggcgcgggcaaaagcacgatgatggccggtctcgcgggcgtgctgggcggcgatgaggaaggcgagcaggaaggctcgctcaccatcgacggtgttgacgcgcgcgaggcgcgaggccgcgtgggactggtacttcaggacccggactcgcagatcattcttgaacgactgggcgatgacgcggc

SEQ ID NO: 1175 - DNA, 3031 bp, Unknown
  R81_24m  MAG No. k141_13439
gccgccgcccgaagtggagaagcggatacgcgaaccgttgccaccggcaccctggccaaacatggagccgaagatatcagagaaaccggaagcgtcgaagccgccggcaccggaaccgcctgcgaagcgggcgccgcccatgccgaactggcgaatcgcgtcgtacttttggcgatcttccttcttgctcagcacgtcgtaggcttcggagatgtccttgaacttctcctcggcttccttggtcttgttgacgtcagggtggtacttgcgggcgagcttgcggtacgcctttttgatgtcgtcgtccgaagcgtccttggagacaccaaggactttgtagaagtctttactgagccattcgttttcagccattcatgtctcctttcttgaagagtctttatggttggctcccgctggatgaacagcccagtgggctgttcatagcagtgcgcaattgcgcacgtcgcataaaacatcgggagctgtcgaacgaagcgagactgagggtggtttatattcagtgtttgaccaccctcagtcagccttcggctgccagctcccgccagcgggagccaaggtaatgtcagctcgttaacgagctggccgttatcagttttgcggggaggctactactactcgggcggcgcggattacgcggtcgccgatacggtagccggcttccaccacggtgtcgacggtttccttgtcggcatcggcatccggcttgtgcaggattgcctcatgcttggtggggtcgaagtcctcgcccttttcgccgaacttctcgacgccgaacttctcgaaagccttgtcgatcttggcggcaacggccttgaacgagtcgtccatctcgctgtgttcgcgaatgcggtcgatgtcgtcgagggcgggcagcagcgcggtcagcacgtcgatgatgccgtgctggcggaagcgctcctgctccttctgcgtgcgattgcggtagttgatgaactccgcacgttcgcgttgcagggcttcgaggtagtctgcggcttccttcttggccttgccgaggggggtgagggtgtcttcggaatcggactggccttcaccagtcttctctccggcatccgacttctctccctcagctgcggcaggagccgcgtcggctccttcattggaaggagcctgggcagccgaatcctgcgcagagtcggactcggcggaggcgtcagcccctgaagaggcctgagcggcctggccggcagcctcagcatctgagggatccggcaggtcgttcaggtagtcgtccttgttgaactcggacatcacttgttgtccttgtcgtcatcgtcgtccacgacctcggcctcgacggtgtcgtcgtcggaaccggaggcggagccagcggaagcgccggcaccgtcagcgccagccgcaccggcaccagccgcggcaccctcagcaccctgctgggcgtagaggacctggccgatcttctgggcggcggtcatcagctcagtctgggcagtcttgaccttctcggtgtcgtcacccttcagggcttccttcagagcgttgaccttgtcggtgacttccttgacgatgtcgtcggagagcttgtccttgttgtcgttgacgagcttctcggtggagtaggcgaaggcctcagcctggttgcgggtctcggcgtcttccttgcgctgcttatcctcagcctcgtgagcctcggcttccttgaccatgcggtcgatctcgtccttcggcaggccggaaccaccggtgatggtcatggactgctccttgccggtgcccttgtccttagcggacacgtgcacgatgccgttggcgtcgatgtcgaaggtgacctcgatctgcgggacgccacgcggagccggagcgatgccggtcagctcgaaggtgcccagcggcttgttgtcgcgagcgaactcacgttcaccctggtagacctgaatcagcacggacggctggttgtcttcagcggtggagaagacctcggagcgcttggtcgggatggcggtgttgcgatcgatgagcttggtcatgatgccacccttggtctcgataccgagggacagaggggtcacgtcgataagcaggacgtccttacggtcgcccttgatgacgccggactgcacggcggcaccgacagccacaacctcatccgggttcacggactggttcgcttccttaccaccggtgagttccttgaccaggtccttgacggcgggcatacgagtggaaccaccgacgagcaccacgtggtcgatgtcgctcacggagatgccggcgtcgtgcagcacgttgttgaacggcgtgcggcagcggcccagcaggtcggaggtcatttcctcgaagtgcgcacgagtcagggtctcatccaggtgcaccggggtgccgtcaggagtcatggccaggtactgcatggaaatgctggtggaggtggaggaggagagctccttcttcgcctgctcagcggcttccttcagacgctgcagcgcaatcttgtccttggacaggtcgacgccgtacttgttcttgacttcggaaaccagccaatcgatgatcttctgatcccagtcatcgccaccgaggtggttgtcgccgttggtggcctgaacctgaatggtggagaagccgtcgtcatccttgccaatctccagcagggagacatcgaaggtgccgccgccgaggtcgaagaccaggatgcgctcgtcttccttgcccttctcaaggccgtaggccagagcggctgcggtcggctcgttgatgattcgcaggacgttcaggccggcgatcttgccggcgtccttggtggcctgacgctgggcatcgttgaagtatgccgggcaggtgatgacggcgtcggtgacgggctcgccgaggtatgcctcggcgtccctcttcagcttcatcaggatctgcgcggaaatctcctgcggggtccacttcttgccgtcgatgtcgacggtccagtcggtgcccatgtggcgcttgacggaggagatggtgcggtcaacgttggtcacggcctgacgcttggcca

SEQ ID NO: 1176 - DNA, 42180 bp, Unknown
  R81_24m  MAG No. k141_13720
cttggcgtcctgaggacgacggcgcacggcggacttggcgaagttctccagcgaggttcccgaagtgtaacgttcggcgcagccgcgcaggccgcagccgcagtggtcgccgtccgggaccatcggcaggtggccgagctctgcggccatgccgaaggagcctcggtagagctggccattgatcacgatggcgccaccgaggccggtgcccacggtcagcgcgaccatgttggagctgccttggccggcaccgtgcacgaattcgccccagccggcgcagttggcatcgttctcgacgacgaccggaacggcatggtcgatcaacgcgccgacatgctcggacagattgtaattgatccaggccggaatgttggcggagaaggtgagcgtcttgcgatccgcgctcacattaccggccgcggagatgccgatggcctcgatatcggtgtggccggcggcgatggcttcgcggtagatctcggcgatgtgcttgttgatggcgtcggcgtccatcggcgtggggacgcgccaacgctggatgatgctgtcgtttgcatcgcagacggcagcggcgatcttggttcctccgatatcaatggcgagcgtggtcatggcttactccttgaagactttcgtaacatgcgagatagcgaaaatagtagcgagccgccatgacctcccaccgcggtttttccgtggttcgtcatgcgtcgcgaacattccgccgatgcgcttcctcatgcatttcacccgttgcaaacgggcgcccccttaacgccggcatcggtgcggacggcgtgtcgaatcggatgcaatcactttcaccgtccttgcggatggcatcgaagaacggcaggaaacaaaaaactcccgacatgcatcgggagtttggtggcgaccccggccggacttgaaccggtgacctccgccgtgacagggcggcgctctaaccaactgagctacggggccgtgcgtgcctcgctgaggcacaagaggatatgttacagcatcatcggattacgacacgccgtctgatacatcgttccttccaccggcgaaccgaccgcaggcgcggtggacggtatgcggaccacaccgttcgaccgcgcacggccgcactccccataagaccgtagccgtcatgcatcaacgcacgttgtgcgacaacgcggcacgacgcacggccaccgaggccagcaaaccgatgaacagcatgatgccggcaaccagaagcgtccactggccgccttcgatgaaccctgaagtcatcgcatcggcaatcttcggcgcctcgtcgccgaatcgggccgccggtccatcaccgttgcggaacacgccgatcactccacccgccgaaccgctgaccgcttgggccagaccgtcgccgaccttggcgggcagcccgagggattcgagccgcgccggcaatgttccgttgacggccatggccaacgacgcgccggagatggccgaaccgacggcggtgccgagctgccgaaccgtggactgggtggccgacccttcgccggactgcatgatcggcacttcggagagcaccacgctggtcagctgcgcggaggcgaagcccagacccagaccgtacgcggccatgggaacaagctgccaccacaccgacaatcccacaggcataaggaccgcgaccaaagcgacggcgatgatctcgatcacaagaccgagttgaatcacgccggccggggtgagcttggcggccatgacatgggcctgcgcacctgcgacgatggaccccagacccatcacggccagcatcgcaccggcctgcagcgtgttgagcccgcgggcgttgatgaggtacagcggcagcatgaacaccagcgcgaattcgccggcggcgatggccgcagccgccagattaccccacgagaacgtcctgatgcgaaacagggtcatgtccagcatgaccggccgaccggctttgccccgcgcggattcgaagacgatgaagacggccatcagaagcgcgccggcgatcaggcagatcggcaccggcgacaaccagtcacgattccagctcaacccgccgagcttcaactgcgttgaggtctgcttccaccaaccgtaggtctcgccttcgataagaccgaacaccaacagggccgaggtcagggcagacaacaccacgcccgggatatccacaccgacgcgacgggatcgggcatcctgcgcggcatccgcggcaccggcgaccgaggcgttcccaccggtctgcggcaccaggaagatggccgacacaaagaccgcgatacccaacggcaggttcaccaggaagatccaacgccatcccaaggtctcggtgaacacgccaccgagcagcggaccaagcgcggcggccgaactcatcaccgcgccccagacgccgaacgccgcggcacggtacttgccacggaacagggcggacaccgtggacagggtgttcggcatgatcatcgcgcctccgatgccctgcagcacacgggcggcaagcagcatccccgcaccctgcgaggcggcggcgagcgccgaactcgccacgaagatcacggtaccggcttgaaacaccagtttgcgccctctggcgtcgcccaacttgccgaaaggcagcaacaacgcggcaagcacgatgttgtagagcgaggtgacccactgggcgtcggtcaggttaatgccgatgtcgtcgatgatggtggggatggagacattgacgatcgagctgtcgagcacgatcatggccaatcccagggccatcacccacagcgcgccccacggcggcgcctgggcaggcagtggcgacgaggccgtcggagtcgttgaagagatcgaagacgcatcggcctgagtctgatgctgagatcgggatgcatgatccataacggggtttcctctcattgccatgattgcggcgaccgacacgcctatgcgccattcacggtacatccgcggcctagaccgtctcgccggatttcgcgggacattccgggcgttcagccatgggcgtaacctcggcggatcactgaagagaggagcaccaaagacggccgcactattccagatgcgtcatttcgaaatgaaagcccggcagaacgccggaatcgcaacgatcgacaaatcgccagacgatacagggccgggctctcgctcaggaaacagggcatgtccagcgcccatttaccggcgtcggcaatgacggcatcgccgccaccttccacgtctcctcccgatgaccgaatcgctaattcccgcccgccagaaccccattgcatcgtgtagacgggatatgggataatccacaaggtgcttttgcttgggaccgaggcgccgcgatgacacggaaaatccagggacgggcggcatcaaacgggtcgttcggaacccccgaaaccggacgcatcgttccacagtgtgtcatcacggaatccaagcccggcaaaacgttgaaattgcaacgataagacaggataagacacttatatggcagaattcgtatttcagatgatcaaggcccgcaagtcttacggcgaccgcgtgattctcgatgacgtgaccctgagcttcctgcccggcgcgaagatcggcgtcgtgggcccgaacggcatgggtaagtccaccctgctcaagattatggccggcctggagaccgtgagcaacggcgaggccacgctgaccccgggcttcacggtcggcatcctgcagcaggagccgccgctggatgacaccaaaaccgtgggcgagaacatcaagatggcgttcggcccgattgccgagaaggtcgcccgattcaacgagatcggtgaagaaatggccaacccggacgccgacttcgacgccctgatggaagagatgggcaagctgcagaccgagatcgacgccgccgacggttgggacctcgactcccagcttgagcaggcgatggacgccctgcagtgccccgatccggacaccccggtcaacgtgtgctccggtggcgagcgccgccgtgtggccctgtgcaagctgctgcttgaggcccctgatctgctgctgctcgacgagcccaccaaccacctggacgccgagtccatcctgtggctggaacagttcctgcaccagtacaagggtgccgtcatcgccgtcacccacgatcgttacttcatggacaatgtggccgaatggatctgcgaggtcgaccgcggccacctgtacccgtacaagggcaactactccacctacttggagaccaaggccaagcgtctggagatccagggagccaaggacgccaagctcgccaagcgactgaagaacgagctcgactgggtgcgctcctcccccaaggcccgtcaggccaagaacaaggcacgtctggaacgatacgaacagatggagaatgaggcacgcaacaacaagaagctcgacttctccgagattcagattccggccggcccgcgcctgggctccaccgtgctggaagccaaccacatccacaaggctttcggcgatcgcgtgctcatcgacgacctgtccttcacgctgccgcgcaacggcatcgtcggcgtgatcggcccgaacggcgtgggtaagtccacgctgttcaagaccatcgtgggcctggaaccgctgaccagcggcgagctgaagatcggcgacaccgtcaaaatcagctacgtggaccagaaccgtgaaggcctggacccgaacaagaacctgtgggaagccgtgtccggcggcctcgacttcatcgaggtggccggcgtggaagtgccgacccgcgcctacgtggccagcttcggcttcaagggcgccgaccagcagaagctgaccggcgtgctgtccggtggtgagcgcaaccgtctgaacctggccctgaccctgaagcagggcggcaacctgctgctgctcgacgagcccaccaacgatctggacgtcgagaccctggaatccctcgaaaacgcgctgctcgagttcccgggctgcgctgtggtgatctcccacgaccgttggttcctcgaccgcgtcgccacgcatatcctcgcgtgggaaggcgacgacgacaacccggccaagtggtactggttcgaaggcaacttccaggcctaccaggagaacaaggtggcccgactcggtgaggatgcggcccgcccgcaccgcctgcacaagaagcttgtgcgcggctgagatacgccggcattagtgccacaacgcgctttatacgtcgaaagccgtccctcaggggcggctttcccataattgcccccatgactgccccgccccgcatcccataaaatcccacagtcacctacggcaacgcaccggcaacacaccggcagtgcagcagcaacgtagcggcaacgcaccgcataaccaaccgtttaccttccaaacagtctcgttacatttcgctcccggaactcttaacccccaccggatagactgccaaccataggttggaatacgataaccgaatatcgaacacagcagaacaggaatcgaggaacgccatggctcaggcaaccaccgtaactccattggaccatctggtgaaggtgctgaagttgggcgagccttccgcttaccgcaatcacacatacatcaatggcgagagtatgtacttccccactggccgcgtctacggtggccaggtcatcgcccagtcggtgatcgccgcgtccaaaaccgtgggcccttcacgcctgccgcattcggtgcatggctatttcattgccgccggcgatattcgtcaagacctgctgtttgacgtcgagaaccttcgcgacggccgctcgttctccgctcgtcgggtcaacgtcacccaagccgaggggtcgattctcacggccatcgcctccttccaagagaccggtcaggagggtgtggaatttgccgatccgatgccggaaaacctgcccgatcccgaaacgttgacttccgccaaggaactcatgcagccgttcgccgaaaagtcgccgttcgccaatttctatgtcgagaaatcgccattcgatatccgccacgtgacgccgaccgtgatgctgcgcgcagacaaggattccgccgagcatgattccggcaagcagatggtgtggatgaaggccgatggccacgtcgatgtgccgcaggtcatgcatcgtgcgatgctggcactcggctgcgatcaggtgatgatggagccggtgctgcgccgcgccggactgtcgatttccacaccgggcatttcctatgcgtccatcgaccattcgatgtggtggtatcaggatatcgatatcaacgaatggcatttgtatgtgcaggatacgcctatcgccgcgcacggacgcggactcggcatcgccaaagtgtatgcgcagaatggcgacttggtggcggccatcgctcaggaagctatggttcgcgtgccgcaggaatagtgggaatcggcttggccgatggtgtggttttttcttctctcccccagtcggctacgcctacggcctcctcgtcagagggggcttatcacggattatcttttgtaggcctgggctatgtcgctacggcgcttggcttccttgattttcgggttttcggggccttcgttcggcggtaactggcacaaccattcgccgataatgccgatgatcatgtcggcgatgcacaccacggccacgattgcgcactcggtgacggcgtgtgcatagaaatccgcctcgatatggctcaggctcatcacaatctgaccgccataccagccggcgagcgttgcgcccgccaatcccagtgccttagacagcaccagcgtatacaccgcgatagtgggattgatgaagctatgcggacgcttcttggggtcggtattcgcgtatttatgcacttgcagggccaagatcagcacgataacgcccagcacggccagcaatccggtcacaatccaaggcgcaccaatcagcgacagtcccgagctttcgccgtaggaggccagaccgatacccgccaacaggcccagcacagcaccgatcacatactgccaccatggtgttcgccgtgttttcatgtccggcctccttatcgttgcgttgctgtttgctgtttgcgaacggccctcgcgcctgggctgttcatcttgatttggttttcgtcactgccgtgcccggctgttcgaggccggagactggtccgtcaccgtctggtttctagcctaccgttcgtaactggttctgccatcagctcaactgttcgacagtatccagttgtccgatagcaatccgacctgtccggcatccggtgccatggccaaaaggaaagccaccgggtcgccgcccagagaagcattcgggtccatatccagccaaggtgccaataccgacgcatggttacgggccgacggccaaggaatgctgcagttgggctcgtcggaagtcacgccttccatgtcgacaaggtcaaggtcgactgccagatcatgaacactttcgatgctgcccaatacggcaatcaggtcggcgggcggcaacttggtttcgatttggatgaccgcgctcatcgcgtccgggccgtcgaaatggctgacatggtagagcggcgagatgccctgtacctgattgccaggaacactgtcgatggaaacgatggtttcgcggaacagccgttcggcatcctgcgaggtggaatccagcgaaataatcgccttgcgtgagacgggtgccgactccgacgctgatttttgcttgactgcatgcccgccgagcatccagtcttcgctctcgagctgcacggcgttacggtccggtgcggcggccagcaaatcggctacaggcccctcatgggctccggcaagtttggcgttcggattcagcgccgcccagggagccagcacaaacgcgcgctgccaagcacgcggatggggcaatgccagatccggatccgcgctggtgatgccatcaaagtcgataatgtccaagtccaacggcctggaatcccaatgattctcacgaattcgcccatggttcgcctcgatgctttgcaacgcggcgagcaattcgtggctgcccattgtggtttcaagctccaccacggcgttcaggaaatccggcgtaccgtcagccatgccccacgcggccgtgcggtaaagcggcgaaataccggtcacctgtgtgccgagcagcgcgtcaatctcccgaacggcggctcgcaaggtggattccacctcgcccacattgccgcccaaggccaccaccgcgttatggatggcatgctcttcagcagtgcgtccattatcggtggcacgcacgcgcgagatggagaccgatacatctgcaaaagccacgacgatgggcgcatgaggcttgtgcacggtgacgtcgatggaggcgacggccggcgcatcggcaaggatcttatccgcgatacgttgggccagacgctcgatcaggtccacatgagggccttcgatgacagccgcgatatccttggccacacggccgtaatcgatggtgtcgttgagatcgtcggattgaccggctgcggccagatcaaggtgcagggtgacgtccacgacgaaggtttgtggccgttcgtgttcaaaggcgagcacaccgtgggtgccgttggcatgtacgccggtaagagtgatggtgtccattggtaaggctttctgctcaaatgctctcctcagtcgccttcggagccagctcccctcgtccgaggggagccaaggcctagaagcaaccaaaacagggagccaggggaatcatgcgtattcgcgccaggtgttgccggcgatgacggcggcgcggcttttggccacgtcgtgtacgcgcacggcccatgcgccatgttcggcggacagggcggacaaggctgcggtcacgtcatcgcgctgggccatgatcggcccatcagcaccggcagcgcccgcctcggtaagcatcgccgagatgaagcgtttgcgggactggccgatcagcaccggatatccagtggcgcggaaggtctcgagtccggtcagcagcggcaggttgtgctcgatgccgggcttggagaagcccaggcccgggtcgatgataatgcgctcaggctttacgccggcggccagcacaccgtcgacttggcgcatgagttcgtcgtgtacgtcggtcaatacaccgtgctcgtagacggaggtgtcttgatcggggttcgcgcccttggagccggcgagccaaccgcgccaatgctgcacgatgtacaggcagtcgtggtcggcgaccacgtgcggcagttcggcatccagcgtgccaccggagacgtcgttgatgatctgggcgccctcgctcagcgcagcggcggccacggatgcgcgcgtggtgtcgatggacaatatggcaccggccggaatcaatgtcttgacggcaccggtgatgcgggccagttcgtcggcctcggacacgcgcttggcgccggggcgcgtggattcggcgccgatgtcgatgatgtccgcgccggcggccatcatgtcgcgcccgtgctgtgccgccttggccgggtccagccacaggccgccgtccgagaacgaatcctcggtgatgttgagcacacccatcaccatggtgtgcgtagtgtcatgcaacgcctgcaaatcagtcattatgtttccccttctatgtaggtcccaagtgagctccctatgatgagggagcttagtagacactatttatccaaaatgaggctcatggcttcggctcgggtggccggattgcgcagcatgccgcgcaccgcagaggtcaccgtgcgggcggaagacttcttgatgccgcgcatcgacatgcacaggtgctcgcattcggtcaccacaatcacgccacgtgcgcccgcgtactcgaccagcgcgtcggcgatctgctgggtcagtcgctcctgcacctgcggccggcgagcatacacctcgaccagtcgggcgagcttgctcagccccatcaccccgtccttggcgggaatatagcccacatgggccacgccgtggaacggcagcaggtgatgctcgcacaccgaatacagttcgatgtccttgaccagcaccagctcgtcggtatccacgtcgaagtgcttctccagcacatcggccggggaagcctgcagaccggcgaacagctcgcggcacgcgcgggcgatacggtcaggtgtttccaccagcccctcgcgctcgggatcctcgccaatcgacttcaggaacagacgtacggcctcgcgcacgccttcctcgtcgtatgtgcgtttctcccgctggcaagactctatatattcgttcatctcatctctcccttgtcattgtccacaacgacgtcggcccggcctgcgtacgtgagaaaccacatgaacaggtcgggccgaatcgtcatcgtgtctactcttccggcttcatgccgaccgagcgcttgaggctttcgggaatctccaccggcggcttgtccgagtcgggacggcggtcgttggacagccacaccgggcggaccggcgccttcttgatcggcgcgaagatctccgcaagttccttctcgttcagggtctccttgaccaacagctggcggaccagctcgtcaaggatctcgcggttgtcgttgatgatggtccacgcctcggtgtgcgcggtctccaccagcttgagcacctcgtcatcaatcacttcggcggtgcgatcggagtacttgcgcggctgcagaccgtccatcacagtggtctggtcatcgtcggaaccccacttgatggcaccgagcttgtcggagaagccgtattcgatcaccatcgtacgggcgatgttcgtagccttctcgatatcgttcgaggcaccggtggtcgggtcgtggaagacgatttcctcggcggtgcgaccgcccatcgcgtaggccatctggtcgagcagctggttgcgcgactgcgagtagcggtcggaggtcggcatgacggcggtgtagccgagggcgcggcctcgcggcagaatcgtcaccttggtcaccgggtcggtgttgttcagggcggcggccaccagcgcatggccaccctcgtggtatgcggtgttgcgcagctcttccagagccatgcccttggacttgcgcttcggtccggcctgaacgcggtcgatggcctcgtcgatggcgcggttgtcgatcaactgggcaccggcacgggcgcacagcaacgcggcttcgttgagcacgttggccagatcggcaccggtgaagcccggcgtgcgcacggcgaccatgtgcaggtcgacgtccggtacgaacggcttgcccttggcatgcaccctcagaattgcctcacggccttccagatcaggggcggccacgcccacctgacggtcgaatcggcccggacgcagcagagcggggtcaagcacgtcagggcggttggtggcggcgatgatgatgaggttggtgtcgttgtcgaaaccatccatctcgacgagcagctggttcagcgtctgctcgcgctcgtcgtggccaccgcccatgccggagccacgcttgcggcccacagcatcgatttcatcgatgaagatgatggcgggggcgttcttcttggcctcatcgaacaggtcacgcacacgggaggcaccgagacccacgaacatttcgacgaagtcggagccggccatcgagtagaacggcacgccggcctcgcctgcgatggctcgggccagcaacgtcttaccggtgccgggaggaccgtacagcagcacgccacgcggaatacgagcgcccagcgccttgtacttggacggatccttgaggaagtccttgatctcctcgacttcggccacggcctcgtcttcaccggccacatcggcgaacttggtggtgggggtctggccatcgagtagcttgccgctgttcttcttgccacccatgccgagcatgccgccggcaccacccatgcggctcatcaggaaccagaacagggcgaagaagatgatgaacggcaggatcgaggtgacgaggtagctcagcatgctggtctgctcgatattcgaggtccagcccttttcgagatcaccgttctccacggccttggccacctgtgcgccctgcgcgaaggtgtagtagaactgcacgttcttgccgtagttggtcaccttgccggtgtcggcgtttttcttggtgtagtcgttcttcagcttaaggcggacgacctgcttgttgtccgtgatctcggcgtaggtggccttgccctgattgatcagcgcgaaaccatctttggtgtcaatggtcttcgtgccaccgccggcgaacatctggaacatcagcacgaccatgaccacgagtacggcaccccacagccagggggactgccatatcggccggttctcgttgttgttgcctttgccattgttcccgttattgccacggttgaacgggttggtgaacgggttgccgttgttacggttgttgttcgggttcggattattgccgttacccggcccttgcgggaagctcatgcttgcactccttggtagacggacggcttgaggaccgcgatcgaatcgaggttgcggtagcgctcgtcaaagtcgaggccgaagccgacgacgaactcgtccggaatctcatagccggcgtacttcacatcaacgtccacttctcggcgggaaggcttgctcagcaaagcgaagacctccacggaagcggcaccacgacgtttcagttctgcgaccagccacgcgagcgtgcgtcctgaatcaacaatatcctccacaatcaaaatgtgccgtccgcgaacatcggcggacaaatcctgcctgactgtgacctcaccgctcgacactgtgcccgagccatagctcgaaaggctcatgaagtcgatctgtacaggaatgctcatggcctgggtgaacgcgaccagcgtattcacggcccctttcagcaccgcaacgagcagcggattcttatcgcggtaatcctcgctcgcgagagcggccatctcgtggatcttggcatcgatctgttctttgctgaccagctcgtggtcaatatcttcctcaacgtcagcgattcgcatgcgctccatcttggcacacgcgaatgacgtgtttcttgcgattggctgaataacctctgggaagtgagacgccgccttggccatgccaatcgacgaccagccggtcgatggcggcaatctgggcggcactggcgttcacaccggcctggctcagcgcgtgagcgatgacccgcaaccgaatcgcctctggctcacgtgcaatacgtttgacgccgatcatcaggccgatgccatggcccgaatcgttggtatcgtctgcagcacaggctcgtggcgtatcggtcgataccgctgccgacgatgccggccggtcaactgccgtaaccgcctcccccatcacctcgtcggatcgctgatccagatactccttatccattctggccaaccgtgcgctttcggcgaaatggcgggtgacattgaatccagcgaatcgttcgatggccggcagcaggtcgtggcgtacccgcgagcgcaacggatagtcgtccggcaactcgccgtctaccgcatcgccattggtggggtcatcccaatattccacacccaagtcttcacagaggccggtggtttcgtctcgagtaaaggtcagcagcggccgcgcaaaagtcacgccactgcgtgtgaagacctgcggcatgccggccaacgcatccacgccacggctgcgcagcagtccgatcaatacggtttccgcctgatcgtccatagtgtgggccagcagcacggcaatggcacctgattcacgcgccgcggcgcacagctcgttgtaccgggcctgccgtgcggccgcttcgaggccctcaccgcgtgcctgcacggtcgtgttgcgcacgatgaccgggcccagtcccaacgcacggcaacgatccgcggcctcgccggcgacctgttcggaaccctcctgcaagccgtgatccacaatcacgacaccgcaacgcacgcccatggacgtgcatacgatatggcttaccgcggccagcgccatcgaatcgcgcccgcctgaacaggccacgagcacgagtggtgcatcggaggcaacggcatggtccccatgctgcgcgaattcgggagcctgcacatcgcatagttccacggcgctcagcgttgttcggaccgcgcctacggccttgcgcaatcgtgcggaatatgccatgtactcaccacccttttctggttataggcactcgtgcgtttatggacgtttacggcctttgtagcccttgatggcccttgatgcctcttttacagccccgcgagcttggtgatgaacgagtcgatggcgctacgcgcggcggcataatcctcaggattgttgaccaccacggcaaacgacaacgctcccccattggtacgggacacattgccggccatcgacgtgaccgtgccgaggctgccggttttgacgcgcaacagaccggccacggcatcatccgtataccgatcctgcgccgtgcccaccaaccccgcgatggatagaccttccgcaccagcagcaccgctctcggtggtcagattacgttgttggacggccgccagcgtgcgtacggtgagccgggagccgggagacaggccggagcaatcggccatggtcagaccggatgtgtcgagaccgagatcgttcagagtggatttgaccgcttccgtgccgccttcaggactgtttgtcgctgatttcgtcaaggcggtgagtctaccgaactcctcggccagcgtattgtccgaatgtcgcaacgtgtatgccatgatttcggacagtgttgccgaactcaccgaggccaaaggcgtttcgccggatggagcggtgtttgccgtcacgtctccggtaacggccacaccgttcgattggagcagttcggcgaatttcgtggccacgtcgctggcggtgtgctgggacagttccgggtatccggccgaatcatcagggtcggccggcgcaggcgtatcggcggtgtattggcggcctccatcaatcgccattgatgagaccggcgtgaagtagacggtgtagtcgcttaagaccgcgccgccttccgacagacctgcgggaatgcgtgagtcgccgaatagggtgtcgtcgtactcgagattgacggaagtgatgcctcgctgggcgagcgcggccacggtggccttggccaaggtgttcagaccggcacgtccgttggtatggtttgcgtcggaatcgcctgcagacagcagcatgtcgccattgcctttgagggtcaacgtattggtgccgtcatcggattgggtcaggaacacttgggtatccaaggtggatgccatgttcagggtggatgaggcggcgagcgcggtcagcgttttcagtgtggatgcaggctcgcgtggagtgttcgactcatgttcggcagcgacggtgccttgggcgtcttcaatgatcaccgacgtatcgtttcccacgccttgcgcggacagcaattcgttgaccagtgcagaagcggccgtggaatcaatggccttgttcgcgttcagggcaccggcgatggtgccgcctgatttggcggtggccggattggcgaaaacaggtgcggtgacaggttttaacgtcaacaatccgggggccacgtcggtgatgtcggcggcgcagtaccccgcgaacagggcgatggtggtcagtgcggaaatgatgacggtcagtgttcggcgatgcgatcgttgggtccgccgttgcgcttcacgtcgctgacggcgtgataccgctgtagataccatcgtgctccttatgccaaggcaatcatttctgcaatgaggcgaacgagtcgagtgttgccacaatcgagagcattcgcgcatccatcagcttaccgcccagccatgtcccgagtgccagaatgccgatgccattggccagcgcgaccggaataaccgccagccacatgccgccttcggctcctgtcagcagcatgaccagcgccacgatgccagtgggcagcatgagcagcaggctgccaagcatgtagacgaacgggaagaagccttgggccatggcgcggccttgaggcgcggagaacggcttgtccattgaggcgaccgggtacatcagtacacaggaggtgacttcggccacgcccagtccgctcaaggcgatgcccatgcccgtggcgaggaagatcaggccggtagcgaggtcatcgggctgcgcccagcgtccggtcagtgcgccgaccagcacgatgccggcgagatagagcagcaccatgtagacgaccatgatgccgacgtagacgcgtacgcggccgattctgtcggtccggccacgcacgccggcgatgacttccatggtgaagccgcggccgtcatatgcgagcccgttgctttccacgacggacatgaaccagccgcaccagatcagcgactgccagacgaccgcgctgatgccgtgtgcctggaaggcgaagatgatcaggaacaggaccggcatggcgaaggtcatggcttggcgggggtctcgtttgagataggtgatcaggcgtgcggaaaccgcgccggatgccgaatcgggcatccatgcgaatgcgccgatgcctttggcggtctcggacggactgtttgcgccgatggtgagccgttcatgtctcagacaccaggtgcagacggcgaagcagacaatccatgtgacggcaaggatggcgatgcgggcgagcagcaccgcccaggctccggtaagcgcgtcgaacggtagttggaaggccgcgccgaacggcgtccatgcgacgatggtggtcgccgcgccccaggtttcggtgttgaggctgaaggccacgccggagttgaccagaatgttcggcaactgacagatgataacgaacgtcagcacgatgaagatatagaacgcgcctttgccgcgtttgctggtcaccagcgtggtggatagggcgatgagcagtttggagatgctcatcatggtgatgacggccagcactgcggcgaggagggaactgatgattacggctggtcccatatgccgataggccagtgtccagagcatcagtgaggccacgccggtaagggcggggatgccggacaggccggaaagcagcaagccgaattgcaggttgcggtcggcgatgccgtagagcgcgaatttgcgtgggttcatggtggagccttcgccaagcatcatgagctggatgaagccgatgaagatggtcatggtcgcgccgaccagcacgatgactatgttgacgatgcctccggaaccaaggatgttcagcggaaagccatccgcgttcacggtgaagggcggcagtatgccgatgaaccatgcgagcacgccggtgccgatgatggtgccggccgcgagtacggcggaaaagacataggcgacggtctgccacgccgattttcgcagggtggcgagcgtgagcgtccagcgcaggcggaccagggtgatggcgctgctgatcatcggcgggcctcatcggtgggtgtggcgggcgtggcggttgtaagcggaatgggctggaccggctggaccgaagttggtgcttgggcttgggcttgcccgccgtcgagccatgcgagatgggcggcttcgtggcggccgccgaccagttgcaggaagcggtcttcgagttcttcgccggcggcgacctcgtccaccgtgccggccgcgcacaccagaccgttgttgattacggccacatgcgtgcacatcttttcgaccaatgccatcacgtgcgaagagataatcaccgtgccgccggtcttcgcgtattcgatgaggatgtctttgaggttggcgctggacaccgggtccacggattcaaacggctcgtccaggaccagaatgcgcgggctatgaatcatcgcggaggccaggcagatcttcttggtcatgccggccgaataatcggtgaccatcgtgttggcggccccggccaagtcgaaagcattgagcaggtcctgggcgcgacgcgtggtctcatcgcggctcatgccgcgcagcatgccggagtagacgagcaattgcaaaccggtcagtcggtcgaggatctggtcgggctggggcatgacgccgatcatgcgcttggccgtgttcacgtcgctccacacgtcatggcccaaaatcatggcggtgccggcgtccggtaccaatagaccggtcaccatattgagcgtggtggttttgccggcgccgttggggcctacaagtccatagaacgagccgaccggaatatcgagcgcgagtccgttgacggcgatcttccggtcgaagtgcttgaacaggccacgaatggacaccgccgcattcggattcggcggccatgcttgtggctgcggttgcgacggctgtgcaggcgcgggggcggcagctggcatcatcggcggctgaaatccgacattcctttgagtattgtctaagctcatacatccactctaccccaccagccaaccctcagcgaagcaaacccccgggttgctgttggattgccccgctgagcagctccaactagcggactcggtcaacccttatgcgcgatgggcttccactgggctttggagaagagggcctggaaggagatcggcacgtagctgagaatgtaaatcgggaagctgagcacataggcgagcagctccttgttcgtggcaccgatctggtcgcgctcgacaatgatggtcaatgcagccaatgccatcaggcccaacaccgatatgatgatgccactggaccaactggccagcgattgcagctggctcggccaactcacgaagccacacgcggcgaacagcaagcccatcaccgcgcgaatcacgcccaacacggtaaacggacacagcatcaaggtgaaatcgatgcaggagaaatcacgttcgcgaaccgcgcgtttcagcaatgccgagccataataacggaatacctgcaggaatcccttgctccaacgcaaacgctgacgccaactttgcgagaaggtaaccggctgctcgtcgtagagaatcgcagtaccgcaatagccgatgcggtcgccatgcagaatcgaatccatagtgaattcaagatcttcagtgagcagatggaacttccatcccttgttccgcttcatcacctcgcgggagaacatgaatcccgtaccgcccacatggcaagaggaaccgagaatcatacgcgagttagacaggaatcgcgattcacggatgaaccacagcgcagaaccagaagacacccagttatccgccagattcaccgaattacggtagctggtcagaatcttgaatccggagcagaacgccttgttcatttcctcgaagtagtgcttgtccagcttgttatcggcatcgaacacgaagtaggcctcataatcatcggccacaccgatgtcgagcatatgccccaacagatacgtcagcgcatatcccttgccaaccagctcaagattgtggcgttccaccacatggcagcccaaagaccgcaccacgtcggcggtgttgtcggtgcagttgtcggccaccagccagatgtcgatgaggttggacgggtaggtctgatcgcgaatcgacccaataaggttgccgatcactttttcttcgttgcgcgcggagatcagcacggcataccggttggtcatcggggcgtcggggaagcgcacgggcttggcgaacagggacatcacgatgcacagtccctgatatatcatgccggcaccgccgacgatcatcagaagaatatcgagtacggaaagcagagtcatcagcgccaccctgccctaggattgctggaggcagattgatcagactgcttggtttgcttgcgttgctcgggctgctcaggctgttcggcggaccgctcaggctgctcgggccgctcagactgctgcgtatccgcggcaccacgctgcggaatcgccgccgtatccggctcatcaaagcttgcatccgcaccgactgtattatcggcgttatcggtatcatcggcatccgactccggctcagtgccgtgtaatcccttgcgagcgctggaggatagcacgttcttcggaatcgccacggtggcggaatcgtccaaatcggattctttcgtctcgtgcgacggaatcgcatagatctgttcctgcagcaaacgcagttcctcgttcatcggcacgcggttggtggatcccctggccgcacgcggcatgtgctcgccgattggctgcaatacgtgctcgccgaacgcctcggacgcctcgacgatcttggacttcttctccggagtcggatcgttcatcagcggtgagtcaatcagctcatagcgcttggtgtacgcacggaagatggcctgcagcgatgcggtgaccggcagcgccaggaacgcgccgaatgcgccgaacagcgagccgaacgccagcaccgagaggaaggcgacggccgcgttgatatccatcgtgcgctgcgaaatcctcggcgagagaatcaggttctcgatctgctggtagacgatgatgaacaccagcaccgccacggcgtacgtccacccgcggttgccccaagcgaacagcaccggcagcgcaccgccgatataggtgccgaccgtggggatgaactgggataccacgccgcagaacagggccaacggcagccagtagggcacatgcaggatctccaagaagatggcggtgcaggtggcgttgatcagcgccagaatcgaacgggagaacaggaaggacgaaatctggccttgggccacggtccacaccagcaggaatcgacgctgcgtgttgggggccagccactggcagaaggagcggcgcagctttgggccggcggcggagatgtaatacgtggtcattaccacggtcatgaggttcagcaggaaggagaacaggccacccaccgtactcatggcggtgccggcgaaatcggtgacccacgaggtctggatattgttgaagatttccatgccaagattgctgatttccggcatcttgaacgtggcgtgctggtccacgaactcacgaatctgcccatacattgccggcaaaccgcggaccatggcaatcatctgctgtacaaacatattgccgaacagcgtgagcagcacacccacgaccacggccacgcccaccagactgacggcggaagccacgccacgcttccagccatgagccaccagcgccaccactagcggttcgacggccagcgccaggaacagcgagatgatgatgtcgaacaccagataggagatgtcgccccacgagcgccagcagaacatgaatacgatgacggcgagggccacatacagcagcgcgcggccgaaccattccggtggcctgcgggaatctcccttggcggggaacaaagtaccaaagtcgatacgattctcgtcgtccgggtctgccccggcttctgcggcaccgcttctcgacgtgtcggtgctgtttatgtttcgcgcgcgttcgctcatggctccccattgtagcgaggggtttgaagctcggatacgccggcggcgtacacccgcttttctattgttgatgttatgctcaacgtttcgatcatcatcccagcgtggaacgaagccgaacgcatccgcgactgtctgctgaacgccactcgccagaccatcatgccgcatgaggtgctggtggtggacaatcgttctacggaccacacctgcgcgattgtcgaacagttcatcgccgaacatcccgaggccccggtcaaactgttgcaccagaacgatgaacaggggctgattcccacccgcaactttggcctgaacgccgcgaccggcgatgtgctgggccgttttgacgccgactgtatgatccggcctgactgggtggaggtggtctccggcatcttcaccgaagacccggccgcgatgggtgccactggtccggtgatgtattacgacatgccctcacgtcatttcgggttgaaaggcgacaattccttacgcaagcgaatctaccgtgccgatggcggccagccgctgctgttcggctcgaatatggccttgcgcgcttcggcctggcatcagatcgcgaatgaggtctgccgagataaggccgatgtgatgcacgaggatatcgatatttccctgcatctgatgggcaagaatctgaaaaccgtgtactcgccgcgcatgatcgccgcgatgagcgcgcgacggatggacacgtcgctgagttcattcctgaactacatgcgacgttttaagaatacgtttgatgcgcatccgcaacatacgcgcacgcataagccggaggtgttgttcaccgccatgtatccggcgatgcatatgttctacccggtgtggcagaaagtgctgaattccgcggatatcaatcctgctgaagccgcgtggatcaacgagcagatgaaactggcggaggcgcaaggcaagcagctgtacgacgagacccccaccgacgaagtctacgacgaaaagcacgaaaagtagctggatatacgagccccctctgcttatgcaagctccctctgatgagggagctgtcgaacgaagtgagactgagggagagactgcgacgcagccgctaaaacattgaatcggccgcaggccgatacctattattcagcggctacgccgcaacttctctcccagtcagccacgctgacagctccctcatcagagggagctaatgtttaccgtcatcgactgatcacatcagcgacttgtaaatcgcgagaatgtcctcttcggtggcctgacgcgggttgccgggagtgcacacgtcgttgaaggcgtcgtgggccagcggttccagatcagcctcggtggcgccgacctcgctgatcgtggtcgggttcttcagatccacggtcagcttgtggacggcctgcacggcctcttcgcgcaccttctccaggtcgccggtgtaggcgtcctcgacgccgaacgcgtcggcgatgtcgcggtacttctcgcccgtgtagtccttgttgtattccatgaccggggccagcagaataccgttggccacaccgtgggccacgcccagacggccgcccagcgggtgagccatgccgtgcaccaggccgaggcccacgttggagtaggccataccggtgatgtaggaggcgtacgccatctgctcgccagccggaatgtcgccgtcggcggacttggctaggttcttggcaatcatgcgaatagtctgcatggacaggcagtcggacaggctccaggcacccggggtaatgtaaccctcgatggcgtgggtcagggcgtcaagtccggtggcaaccttcaggccgcgcggcatggagtcggtcagatccgggtccacgaaggcgacgatcgggatatcgtgcgggtcgacagccacgaacttacgcttgttggcggtatcggtgaccacgtagttgatggtcgtctcggaagcggtaccggcggtggtcggcacgccgaagatcgggacggacgggttcttggtatccgcgacgccttccagggacagcacgtcggcgaactccgggttggcggtgatgatgccgatgcccttgcaggtgtcttgcggggagccgccgcccaggccaatcaggaagtccgcaccggactcggcgaacttggcgacgccgtccttaatgcactctaccggcgggttcggcttgacgttggagaacacttcgtagggcaggccggcctcatccagaaccttggtgaccttctcggcggtgccggtctccagcagtaccggatcagtgacgataaatgccttggtgaagccgtgctgcttggcgacggccggaatttccttgatcgcgccacgtccgaagtatgcagtctggttgaaaatcatgcggtataccatagggactctccttttgagctagtgtcttaactggtggtccactcactctttgagtggtccaacggttccccagtctactccgcgcatgagcattcacctgaaaacacgctgaaagaacaacactgaaaataatggcaagaaatggcggaattccgcacttgtcgaattattgtccattgaccaaaccagttcaatcgcccgagatctcaacgataagaccattttccggagtcgcttggtgctctccgagaaactcgtctctcatccgcttacttcgcgcgtacacaatcaatatgcgagatgcctaattccattcgtgtttcatcagccgaacgcgaactggttcaccagatggtgtattcaacggtttcagtctcttgaagaggactaagatacctcgacaattggggtgatcatcataagagaatgaggcagataatggcaaatggcaaggctatgacggtcggcgagatggcgtccctgtttctcgaccccgacactcccgttcgtatcgacgcttttgacggctcgcatttcggcccggcagacgcggatttgaaggtcaaaatcgccacgccgaactgcatgtaccagctgctcgcgcacccgaatgaaatcggcatcgtgcgcgcatacattctgggcgatttcgacgtggacgacattgactacgccgacccgtatccggcgatgcgcaagctggtgtcgctggccaaatacgttcgcccgctcgctcccgcatccattgcccgcgtatccgccggcattctgagtcacggcttcaagaagccgccggtgcccgccaccgagggcccaagcaagttcgcccgcatcaagcgtggcctgatgccgcacaccgaaaaggccgattcggaaaccgtcagcttccactacgacatgtccaacgagttctacgccgacttcctcggcccctccatgacgtacacctgcgcggtattcgacaacgagcacatgagtcttgaagacgcacaggccaacaaactgcgcctgattctcgacaaactggacttgcagcccggccagcacttactggacatcggctgcggctggggttcgatggtcatcaccgccgcccgtcgcggcatcaaggcgctcggcgtcaccctctccaaggaacaggccgcgtacgccaacgaatggatcgcccgtgaggggctgcaggatctggccgaagtgcgcgtacaggactaccgcgaggtgcccgagcatgacttcgacggtatctgctcgatcggcatgatggagcacgtaggcgtcaagaactaccagagctacttcgaagagatgttccgtctcctgaagccgatgggccgactgctgaaccaccagatcaccatcagccatgacaagcctcacggcaagcccggcaccgacgaattcctcgaccgttacatcttcccggacggcgacctcggcgcgcccggcttcatcgaatcgtgcatccatgacgccggcttcaacgtggtgcatcaggagaacctgcgccagcactatgcgctcaccctgcatcactggaaccagaacctctccgagcattgggacgacgcggtcaagcaggtcggctttgaacgcgccaaggtatggggtatgtacatggccgcctgcgctctgaacttcgagctcgacggcatccagattcaccagttcctggctgtcaagccggatcgcgtgggccacccggacggcaagtggtaccctctgcgccaatggtggcaggcctgactccgtttctgtgggacggcacgcggtttttaccattgttcatctgccgtcccacagaagtgtgggatagcagatacatcaatcgtttgacgtatctgctatcccgcatgacataagccgagaaccgcagaatagagccgttctttgccctcagctctgagggcgttcttcgaacgctgtgggacggcacgtcgaaaatcggcaaaatcacgtgccgtcccacacgattcccttcgcacgcgcatttcgcaggtgctttttctgcaatactgactctatgagcgccacagccccagaaacggctggggcggacgatcgcaccgaccatgacacgcgcggataagacccacgtttctttatttaaccctaacccgatgttcgcattggtgctgttggcgtgcgtagttgcggcgaggaagacagttgttggcgaacgcgagcctttgcattgaccggccagcccgccggagtaggtacgtgacggatatgcaaaagccccacacaaggcggggcttcattgtggtggctccgaacggcgtcgatccgttgacctagcgattttcagtcgctcgctctaccaactgagctacagagccatgaacagtcaaaaacccggataatccgggtttcataaccattccagcgaccccggccggacttgaaccggtgacctccgccgtgacagggcggcgctctaaccaactgagctacggggccattgttctcacttgcgtgaggcaacagatgtatatattaccgaaattcgccggtcgtgcaaatttcggcgtgttccgcgtaatttcaaggtttttgctatcaccagcacacggacacgtctgccataaacatccacaaacgacgaagggcgcgaccggaaccccggtcacgcccttatgaacagaagcacttcacggcatccaccgcaaagcaatcgtcaatctcagtcagcctgcttccaggtgtcgacgtcgatgtggtgttcggggttggcctgccaggcatcccacgcggacttgacgatgtcttccacgtcgtacttggcgtgccagcccatctcctcgttgatgcgcttcggggagccgatcaggtgcggcgggtcgccggcgcggcgggccatgacagcctcggtgaacggcagaccggtgaccttcttgacttcgtcgacgatctgacgcacggaggtgccttcaccggtgccgacattgaaggcgtcgtacttgcgctcgtcacggtcgaggtacttgagggcggcgatgtgggcgtcggccaagtcggagacgtggatgtagtcgcgcacgcaggtgccgtccggggtcgggtagtcgtcgccgaagatggcgggggccttgccctgcttgaggcggttgaacagcatcgggatgaggttcagaatagccgggtcttcgagttcgaccgggccgcagccggccacgttgaagtagcgcagcgcgcagaagcggatgccgaacggctgctcgcaggcgcgagccatccactcgccgaacagcttggtctggccgtaggggttgatcggcagcatcgggacgacgtcctcgggcaccacctcgaccggcggcacaccgtaggtggcggcggaggaggagaagacgagcttcttggcgttcttggactgggtcatgccggtgagcacgttgagcatgccgttgatgttctgctggtagtaccacagcggcttctccacggattcgccgacctgcttgcgggcagcgaagtggatcacggagtcgacgccttcggcgtcgaggatttcggccagacgctcgccggcgcccggggcggcgatatccatgccgtacaggcgggagccttcgatgcgagtgggcttgccgtagctcagatcgtcgacgacaacgaccttttcgccggcctgatggagtgcgtgaacgacatgcgcgccgatgtagccgcagcctccggtgacgagaactgtcatagttgacctttccttatgcgggttgcaagtgtcggccgtgtggagttcagcggctgttcacttttggtccgctttgttaccttttgaaacaatttgagtatatcacacgaacataatcgcacaaaacggtggtgtcgtccggcaatatctgcattcattaggtcgatctggcgttcattaggtaggtcggcccggagccggcccgcacgaacaccgggtaaatggcttgatatggtggttggtatcgcacaccacccacctaatgaacgccaaatcgacctaacgaatgaacagcggtgcggcgcacaaggaaaatccgaggaatatatgaccgatcccgaatccacagcaatcgattccgtcaccgcgatggccgcggaccacaccgaggcaccggcgcaccccctgcacaaggtgctttccttcgtgcgccgctccggacgtttggacgatcgcctgcagcgcgcatgggacaactatgccggcacatatctgttggacattgcggccggcaatctgctggacgtgcgcgaaggcgtcacgctcgaccgcgcgctcgtggagtccgcatggggcaacgacaatccgctcattgtggaaatcggcaccgggcagggagaaaacgtggcggccgcagccgcggcccatccggagacgaacttcctagccttggaggtctatgaccccggtgtggcccacacgctgctgctcgccggcaagcaggggctgaccaacattcgtgtggcccaggtcaatgcgcccgagctgttcaaggtgaccgcgcccggcaccgtggccgaggtatggaccttcttccccgacccctggcccaagaagaagcatcacaagcgccgcatcgtgcaggaggccatggccggcgacattcatcgcgcgctggtcacagacggcgtctggcgcatcgccaccgacatcgaggactacgccctgcacgtgcacgaggtgatggacggcctcgatggctggaagaacctgggcagcataaccgtcagcctcccgctggagcacgtgggtaagggcaatgccgacatggccgccgacatgccgcacgccgacttcaccgaatccgagcggttcgagggccgcgtgctcaccaacttcgaaaagaagggcctggccgccggccgcgcgatccacgacttcacctatcaggccgtcaccctgaactgattgcgacacgccgaaatgccgtcgatttgcataaccgaacaacctcccgtaaagtaattcgagttgttcgcccccatcgtctaacggttaggacaccagactttcaatctgacaacgagagttcgactctctctgggggtacttcattgaagacctcggtcatagcgaccgaggtcttttcgtattcgcgggaccaggcctgaaagcattcggcccgcttccctgaaggaaacgggccgaatgcttggactcgggtttcgacccggaaggcttcagtccagcgacttcaccacaacgacctcggtgggcacgttgcccgcggtggccttggagtaggggcacagctcctgcgtacgctcgacgagcttggcggcagcctcatcgtcaagatcgggcaggactacctcaatcttgcccttcaggccgaaggactcgccttcaggaccgagcgagatgctggcgcgcacctgactcttggccagcttggtggccgccacgcgctgctccttggcggcaagcgccaacgctccttggaagcaggcgccccagccgatggcgaacagctgctcggggttcgtgccctgacccttgccgcccatggcgaccggcgtgtccaggtcgaactccagttccggctcatggctcacggcgtggccgttgcggccgcccgtaacctgcgccgtagcggtgtagacgatttgcgatggttcgttaccttgatatgtgctcatgctttcatctcagcacgtgttcacgcccgccacaaggactgtcccaccgtagacgatgtgacatcatccacactgtgacttcgcgcacagagtcccgacaccgtcctcacctcgtttatcggcaccatgcgtgtataaccacatatggcattatcggcgaatatcggccggcagaccagttgcacaaggagaacatcatccacatggcagacaccgccaacaccaacgcctggttgccggcgctcaaagcggcgtttccgctgaccataccgatttgcctgggattcctgtttctcggcgcctcatacggcattctcatgggcaccaagggcttctcgtttgtatggccgatgtgcatgagcgcgttcatcttcgccggttcgatggaattcgtcacggtgaatctgctgctctccgcgttcaacccactcgccggctttctgctggccctgatggtcaacgcccgtcacctgttttatggactatccatgctcggcaaattcaaggggctcggctggaagcgtccgtacctgattttcggcatgtgcgacgagacctttgccatcaactccaccgcgaaaatccccgccggtatcgaccgaagctggttctacttctgggtcacgctgtgcaaccagctgtattgggtgaccggcgccacactgggcgggctgattggcgcgcatctgccgttcaataccgacggtcttgatttcgtactgaccgcgctgtttctggtgatcttcctcgatcagtggctcgccggcaagcatcgcgagcgactgtccgccgtcatcggtgtgctgacgtcgctggcctgcctgctgatattcggggccaatgatttcatgattccctcaatgatcgccatgctgatactgttcgtcgcgttgcacccgcatctggatgtgttgcggccggccgccgacgccccggaagccacggcagaccgtgccatgagccacgcagcggaccagcagaaggaaggacagacgcgatgacgatgaccatctggcaaggcgcgctcaccatcgtgacggtggtgctggggacgatgtgcacccgttttctgccgttcctggtatttcccgaatccaagcagccgccgcgcgtcatcgaatatttcggccgagtcctgccctatgcgatgaccggtctgctggtggtatacgcactgcgcaacaccccgattctgaccggttcacacggccttccggaactcatcgcctgcaccgtcatcgtgctgctgcacgtctggaaacgcagtatgctgctttcaatcgccggcggcacgatcgtatacatgctactggtgcagctggtgttctgaggttgggctcggcttctccttcgttgatctctccctccggtcgccttcggcgaccacctccctctgtgagggaggtgctgaacgcagcgaagcggaggtagagacccgcggtcgtaagactgcgaaacacacagcatcggccacaggccgattcctacagctgcttcgccacccaatcgacgatgtacggagcgacttcctcaatctggtcgatggcgacctcgaactcgtgcttgccgccgtaccacggatccaccaaatcaatctgatcctcgcggccgggcttcggcttgggcagattcgggtcgaagctgcggtacatgtgcacttcggcgcgcttgccggccggcagcatgcgcagcagggcgcgcatgtgggaggcggtcatcggcaggaacaggtcggtacggtcgatttcctcacgtgagatgcggtgtgcgaagtggtcacgcggaatctcatcaccatagccacgttcgcgtaacacgcgcacggcacgcgggtcgatcggatggctccactcctcgtcggacacaccgctggattccacgttcacctggtcgccgagaccgcgctcattaaagaagtgacgcagaataatctcgcccataggcgaacggcagatattgccggtgcagacggtcattacggtgtagggctgggtattgctcatagctttgaatcaatcctcaatcgggcttcaccgggccgcacacggcccgaatgtgtttttggggtcgaatgaatatgaatccggctcatgccgccataaaggacacaagccggattcgcatgcttacttggttttggccaagatacggaaacgataggaatcgatgccggactcctccttggcgggcgtatgccactcgcccacttcggcttcccgccacatcccggcctcgaccagcgacgccatatcgggcgcgtagctgtcggcatccacggtggcggccagatcagtcacataggctttgtccgcgaacggcaaagcctcggcgaacagctgggcgccgccgaggatccaaatctccgaacggtccagaccgtcgtccggaatcgcctcctgacgggccatatcgagcgcgtcgtcaagactggtgaccacagtggcccccggcgcacggtacatcggatcgtgggaaacgacgatgttgtcgcggttgggcagcggccggtacttgaccccaagcgattcccaagtcttacgacccataatcaccggatgggagacggtcagctccttgaaatgcttcatatcctcggcacagtgccaaggcatgccgccattgaggccgatggcactggcgcgaccttccttgtcgcgggcttcggcccagataagattcaccgagaaggtcttgggataatcgtcaccccagtcttcttcagtggcagacagcccggcagatccgggctcgggttcgtgatagccgctacggctactgtcatgctccatttcgcttactcctcctggattgcggaactgggccttagtgtagtggacagcgaagactcggggtccgtcaccttcacagtcttcgctgtccacgaaatggtaatcagcatcagaccgcaacaggtgccttaatagtggggtgatgctggtagccgacgaccttgaagtcctcatactggtagtcgaacagggaatcggccttacgaatctcgatggtcgggtacgggtagggcttgcggcccagctgctcaaggaactggtcgacgtggttgtcgtagacgtggcagtcgccgccggtccagacgaattcgcccggcttgagcccggtctgctgcgccatcatcatggtgagcagcgagtaggaagcgatgttgaacggcacgccgaggaacatgtcgcaggaacgctggtacagctggcagcttagcttgccgtcggccacgtagaactggaagagcgcgtggcagggcggcaacgccatcttctccacctcggccggattccacgcggagacgatcatgcggcgcgaatccggatgatgcttgatgaggtcgagcacattggagatctggtcgatggtgcgattcgggtcctcgggggtcggtgcgggccaggaacgccactgcacgccatagaccgggcctaggtcgccgttctcgtccgcccactcatcccaaatatgcacgttgtgctccagcagccagttgatgttggaggaacccttcaaaaaccacagcagctcgtaggccaggcccttgaagaacacggtcttggtggtcagcagcgggaagtacttcgacaggtcgaagcgcatctgctggccgaacagggaaatcgtgccggtgccggtgcgatcggacttcagcgtgccttcggtcaggatcttgcgcaccaggtcctcatagggcatcggaatgtccgtttcgggacgtgcggggatacgggagcgaatatctgcgagttgttcttcggtcaaagccatgtgcaccagtgtagcttaggggcataatagagaagtccgatgatgcgggagagcggccaggtgccgcgctcccccgctggcatggcgatgggccagatcgccggcggctgaaaataaaggagcagctatgggtaagcgactgtgggttgaacgcaacaaggacggttcgtgggatgcgttcagcgacgatggcgcgcacattaagttcggcaaggatcgtggccagttcacgccgggcgatctgatgaaggtcgcgctggccggttgcgccgcgctgtccagccagttcgccatcgaacatacgctgggtgagggcaagggtgccaagatcgtggtggatggcacgtacgaccccgagaacgacgcctacaccggtttcgaggagcaggtggtgattgatgcttctgacgccagcctgtccgaggaggatgccaacaagctcaaggaacgcgtcacccgccatatcgacaagggctgcacggtcaagcacacctacgtacaggagaccccggtgcgcatgaacgtcaccgtcaagcactgacgtactaataaaccgacgtactaataaattgagctccctctgatgagggagctcattgtatacccggactttactgcctgtcgggatcgatggtcttttcgatctgctgggcgacttcaggctcggctgcggacaccggaatctcctcgacgccggcaatctcctccagcgacttggtaggcacttcggcgggcgagctcggcacggtgtcgagacgcgattccgcagcctcaacatacttgcgtggcaccacgtacaccgggccggccgcatgctgcagcagtccctggctggtggagcccagcagcagaccggtgaagccgccgcgaccacgggagccgacaacaacaacatcgtgatcgtagctggccttggtcagtgcgctgacggccgggccggaaacgatctgcttgttgattttcagatcaggatgcgattcctgcaacggcttgatacgcacctcaagatcgtccttgtaggactccatgatggcatcctcgccatccacgcccttcaggttcggcacagcggaaatcacgtccagttccgcaccccagcacgtggcgaagtcggcggcaatgtccagcgccttcagaccccacttggattcgtcggagcctacggccaccttggtaatcgtgttgttcaggtgcatcaggttgccgtcatcatcggtgtacggcaccactacaatcgggcagtaggcgtatgccggcagcgacgaggacgtggtgcccagcagacgctcggccagaccgcccttgccacggttaccaatgacgatcagattgtagttacgcgacaattcgacgaacaccgatgccgggtctccggtaacaatcagtgtggcggcttcgacgccctgctcgtctgcgatggccttggccttggccagaatctcctgagcatcggaatgcgcggcgttatcgtcccccatcgccgtgtaagttgcatcgaacgaaacggcggcatagctcggcagggaatatgcgcagacaatctgcagcgtcagccccgcgtgctttgcataattcgcggcccaccatgttgccttgtaactggcatgcgacccgtcaacgccgacgagaatggccttgtcgttaatcatgacgacctccttgaagttattgtggcacgaataccgcgtacctccaacaataccccgcgacactcggtttggccggtatcctccgctcaaaaagaaatccgcgtatacgaaaaaggcacatcccaaaggacgtgccttaatacgaattcgcttaccgcataattcttgttacatcacgcggcgaatggaatatccagctccaccgaacacggaaacgttgcttattgccgttccctgcaccgggttcatagcattcatcacctgtccgttaccgatgtaaatggccgcatgagtaccattcgcaagaatgtcacccggcttggcatccgccaagcttgcgaccggagtacccacagtggcttgagcaccagaggttcgcggcagggaaatgccaaactgggagaagacgtactgtacaaaaccggagcaatcccatcctgccggagtgttgccgccggcaacatacggatagccttggaacttcagtgagaagctggcaagctcagcgccagtgccagtcattttacccaagtcaacctgtggaatcgacgcacgctgttcagagcggctggctgcagcagcagcggactgggctgccgcagcttcatcagcggctttctgagccgccgccgcagcagcagcctccttctcggcctgagactcggtctgtggcacatcaagagtctcgatgccaccccatttagagttctcgtcaaccgaagtggaggtggattcggcgaacaaattcttcttcaccgaactcgccttcgggaaagaacgtgaggacaccatagcactcgtctgcgcggaatcggcagaggcaaacggggctacgcatgcaaacatggcacccgtggcgataaccgccactgatgtggaaataatattcttaacgttcgtcatcagcgccttaccttagcacacatgggtcgatttcataacaggaatgtcttttcgaagatgatgtcgcgggtgtatcactcggcaggagaacgcaacgggcctcggataccgattggcatccgaggcctgcaatatatcaatcaataagactgcatcacgggatacgtaccacgatggtgagtttttcggtcatggcgctagcgagagccacgctgtagccgttccagccaccatggaccgcctgaccgttgccgacatacagcgccacatgatcgtagtgcgcgccgccattccatccaccggtgttggcataaatcagaatatcgcccggctgcagggacccgtctgtaactacgtggccaccgggaacattgacgtactcttcaggccaaccgtggaagttaataccacgggccgccaacgcttgactgaccaatgcggtgcagtccatgctctgtccgatcaaagaatacgcacggtcgatagaggcaccggcaccagcggaaaccgaaccactggcatcggaataagtaacagaagagcgagactcattacggctcgcggcgttggcctgcttctgggtcgcctgagcctcggcctccgtctgcttcttggcctcctcttcggcagccttcttggccgctgcggcatccttttccgcctgagattccgtctgcggcacgtcgaggttctcaatgccgccccaatcagcattgtcctcaacattcgtggcagtggcttcagtcgtcagatctttgcgcacctgggtgtacgaggggaaggacttggtggaagtcacagtaacaccctcagctgcagtcgctgtaggaacaaacataaacgagcaagcacaggagacaatcgcggcaacaatggaagaagctacagttttggtcttcatagaaccatcaccttacacggtgcgcattaactcgtacaggatggaagaaataaaacaccccggagctattgggatatatcggcgtgtcggcgcaggtcagttcggactaatacgcggtcgcaacacttgaaatgtcatttcgcgcgaacgattgccgatagggcgacgtcacatccgaacagtaatcaccgaatgtaagccaatgaaatgaatcagtagtggacgtactggaacttaccggcttcggcggcgctgaacgtacgggccgaaatcacacccaatcccttggcattggattcggagatctcaatggagccgtcggcattgatcttttccagaacggcaacatggccgtatgtgccatcggcattggcctggccaggagcgaacaccacagcatcaccgacatggcgaggagtgttgtccacccaatagcccagagcggaagctgacgccgcccactcgccaccattgccgaagttgccgctggaaggcagtcccagttcggcacgacgctggtacgcgtaccacgtgcactgaccccacggatagttgttggagttggtgccaacggcatggttcgggttgaagccagccggcacagcatcgccatcggcatccatgagagccgacaccacaggattgttcgcattattgcgattcatcagcttggcgtccaaggtgctgtctgaattgctcagcccccaaccgccttcattggtggactgtgcggtaacggaggacgaactcagatcagtacgtgcttcggaacgagaagccgcagtcacatcgctgatgcgcttaatctgcgtggtcgtcgtggccggatcagccacgaacgagttcgtggcgtctttattgttggaaaacgcgagagcacctgcggccgtgccgaccagagcggccagtgaggccgaggcaagaatatggctacggcgttcagcggcacgagcggcctcacgaatggaacgacgagtctggggagcgatttcattgatcttctcggcaatggccggatcaagccccaaaacaacggcgtcgctgccagcggattgcaccgcgcgcacggcacgaacggaatgagaacccttgccggaggcaaacaatgccttcgctaagctgaacttctggcgcgagaccgtggtcgctttatgcgaagcatgcttcatactacgttaactccttggatgggttcggcggggtcctttcaacgaccccgtatgaccggcacaattgagtactgtacaacgaacagaggtcaatcctcaatgcgatcccccaccatccgggcatgtcaaacgatttacgtaaccgtgcggcagggtgaaaaactgccttgtttccgcccgttcacgaacctcactatccggttatcggaagaatcactaactcatgtcattccgacacaccgtagccatgatgtgctgcgtacattctgcactgcattccgcattgccgctactaccgcccggcaccccggaattccgcagtagccccgcagcaatcccgcacaccgagcattatccgcgatattccccaacactggtctacccttgaaaccatgactatcacactgagtattcccgagtcgctgaagcccgaagatggtcgcttcggctccggtcccagcaaaatccgccccgaacagatcgccgcgctcgatgccggcgccaccaccctgcttggcacatcacatcgccaggcaccagtcaagcaactggtcgcttcgattcgtgaaggtctgcgcgagttcttccacctgcctgaagggtatgaggtggcgcttggcaacggtggcgccagcgcgttctgggagattgcctgcgcttcgctgatcacccgtcgcgccgcattcggcacgtatggctcattcagtgccaagttcgccgcgtccgccgcgaacgcacccttccttgaagacccggtgctgttccccggcgagccgggcacttaccgtctgcctgagctcaccaagggcgtggacacatattgctgggctcacaacgagacctccactggcgtggccgccccgattcgccgcgtgcccggcagtcgtgaagccggtgccctgaccgtcatcgacggcaccagcgcagccggcgctttgcccgtggacatcagccagaccgacatctactacttctcaccgcagaaggccttcggtgccgatggcggtctgtgggtcgccatcctctcccccgaagccatcgatcgtgcggcatgcgtcgaatcaagcgctcatctggaaggcgcacatcgctgggtgccgccgttcctctcgctgaccacggcactgaacaactcccgcaaggatcagaccctgaatacgcccgccgtggccaccctgatcatgatggaaaaccagattcgctggctcaacagcaacggcggcctcgcctgggccaccacgcgttgcgccaagtccgcatccatcctgtactcgtgggccgagcgctccgaatacgccgctccgttcgtcgtcgatgcggacgcccgctcgaacgccgtggtcaccattgatctggacgagcgcgtccaggcctcccagatactgtccatcctgcgagagaacggcatcgtggacgccgccggctaccgcaagctgggccgcaaccagctgcgcgttggcgtgttcccctcggtggaaccggctgatgtcatggccttcaccaagtgcgtcgactatgtggtcgagcacctgtgatggcggtctatgcctcgcatggccgaccatatatgccatgcacattgatcggtctcaactgataccgattgaataaatcgtagggagaggtgtttgacgcccctccctactcttactacagtgcatgagtatgaagttcgcgcctctcattgaccctgccgtccgcaaacccgcgcccaagcccgtacgggtggacctgcgtaaggtgtttgccatcggtaccggtctatggattgtggcgttgattgtcgtgctgattctgctggccgtgggctacagcgtaatgccgttggtgattatgtgcgtggccggtgtcattattggcttgctactgctgatttgggaatacttcgaccgctgggactaccgccgcctcggacagtaataaagttcactgcgccaacggcaacgtcaggctgaacgtactgccttgcccgggcgcgctccatacggtcacatcgccatgatgggttagcgccacatgcttgacgatggccaagccaaggcccacgccatccgccgtgcgattgctctgttccgcaccccggtagaaccgctcgaagatgcgcgtctggtccttcttcgcgatgcccgcgccctggtcgatcacgcgaatcaccgcacggtcgccatccttgtctttggatgcggacacactgaccacaccattttccttggaatagccgatggcgttttcgatgagcttggtcacggcgctgtcgatctgatccgcctcaccattgatgactagatcatcgtcgcccttgatgttcagctgcacgccagccgcggccgcctgcggctccagtcgcgccaccgtggcctcgagctgttccataacgttcagtcggttggcggaagacggcgtaatcggctcctgtgcgcgtatgagcagcagcaaatcggacaccatatggttgagcttgctgcagctggaacgcacctggcgagcatcggcagccacctgctgttcgtccagattgccggactccagcgaatcggcgagtttggccagagcttcagtggggcccaacaattgctcggatacattggtaataaacgagtcacgcacttgagcgaaacgaatcacgtcactgacatcggtaatcaacacgatgacgaactgctcgttgatacgccctacagtcaccttcagccagttggggcggtggacggactgcgtggcgacgtgatcgcccttgttctggtctgcgacgtaccgctccggagtatcggtggtcaagtcgaactggcgcttgccaccagacttgcgcgcctcgtgaatggcatccagcacctgctgctgggcgatggcgtcatctgacaccacacccaggcggtaggcggcgggattgcagcggaccacctcgtcgtgctcgtcgaccaccacggacgcacccggcagcatggacagcagcgtggcggtgtcgtcggacagatcgtcattgtcgtcatcatcggccagcggcgattccacggacactcgatgtgtcgcaaatcccacgatgagcgtgatgattcccaccacaaataaaacagccgcgacaataagagcaatcgcggcgacgagcggcatctgtgtcatgcccccattctttcacaccacacgctgggattgcggtttgccggcgcgccggtaacatgaatttcaggtgaacaacccaatgaacagtagaacaacttgaggttgccattacctacgttgaagtggggaacaagtactggaataatacactggtacaggttgcaataagcaagcatgaaaggctagagaaatgcgcgttattttcaacgaggagctgaagcaggttgctgacgacctcgaccgtatggcgcagaacgtgcgcaaggcgatcaaaggcgctggggaagccctgctgaatcaggacgttgaagccgcacagactgtgattgacggcgacatcgagattgatgccctggagtcctctgtgatcgaccagtgcgtcaagctgctcgccaagcagaacccggtggccaccgatctgcgtgtggtcgtttccaccatgcgtctggcttccacgttcgagcgtatgggcgatcttgcccgccacgtggccgaggccgctcgccgcacctacccggccgccgcgattcccgaatccgctcagccggtgttcgccgagatgatcgacttcctggacaacaccgctgaccagctggtggccatgctctccgatcgcgatgccaagaccgccgaggccatcatcctggccgacgacaagctggacaacctgcaccaccagaccttcgatctggcgctgtccgatgacatcacccgtcagcagaccgtggatatcgtgctgctgggccgcttcctggagcgtctcggcgatcatgccgtgtccgccgcccgccgtgtggtgtacatcgtctccggcttcgaccccaccaaggagccgacccgcgacgagggcaccgacatcgactgattggggcttgtcctcacattgggcgaataactgaacacttgtcctcctatggtttgaggaggatgcccgaaagcggcgatccggctacggctggacgccgttttttgttgcttctgggcggtacaccggcgtatccatggggcggcaaaacacccatagggcggtaacttgcccatggggcggtttgaaagatatgtgaaaccgcggaattaagccattctggcataccgccccatgagagttttaccgccccatgagggttttaccgccccatggggtaatcaccgccccatggggatttggcaggcatagcaaaggggagccacacattatgtgcgactccccttacagcttgtaccgtgttagcggcttaggctcacttctggccttgagcggcgacagcggcggcaccggc

SEQ ID NO: 1177 - DNA, 11044 bp, Unknown
  R81_24m  MAG No. k141_13752
accaccccgccaacaccaccgccatggtcatcaccctgatgatcggctcgtttgtggccatcctcaaccaaacgctgatgatctccgccctgcccacgttgatgcacgagttcgacgtgcccagcagcaccgtgcaatggctgaccaccggattcatgcttaccaacggcatcatgatcccgatcaccgcgttcctcatcgagaccttcaccacccgccagctgttcctgtacgcgatgggcatatttgcagaatgatcttggcgttaatgcactggtgcccggtctggtgatgatgccgagcggcatcgccatgggcatcctgaacccggtggcaggcaagatgtatgaccgtatcggtggccggccgctcgccttactgggcttcgcgatcatgacgtctgcggctgtgctgctggtcaccatcatgaacacgcacaccgcggcggccatgcgcaccggagtgccggaagcggcggcatcggccattggcgtgcgggcttcgttccgcacggtcgccattgtgtgcgcggtctgtttggttgcgtcactcttcattcgtgatcgcggccgccgacttggacagcagcgttaggcgaatccttcaccgattgctggccttcttgatcagcgcgtccaaagtaccggcttggcgcgcggcttccacatcttcccagtcgagaccggtgtctttggccctcccgtagaaaaaccgcaccagaccggcaaagtccggtttatatccggtttcccggaatgagcgggccagcgaatcaccgatttgcgggtcatcaggccttcgtgcctcatagatcgggatggaacaggatcgccacacgcctctcacatgtgcgatgcgattgacgatcatgccgccgtgcgcaccatcgtattgcgaggcggcatgtacgtccgccacctcgtagacaccaccatgaatgatgtcctcaactgtcagacgacctttgaccgcgctggcatcgcgaatccagaacatcgaagcgaaattggtgtcatcaagttcgcgaaaatcacgtatctcgcgtgtgccgatacgttcgtccttgtcatacatgaattcggccaaggctaggaatggcgagatacctgcgcccggaccgtactgcaattcgatacgtaaatcttcggattcattgccggtcagtccaataccgctgacggcgcagtcataggcaaaccaatcccagaaccaccattcgatcctttgcagcacctgcttcggatactttttgcatgggttcagattcacttcgcgataatatatgcgtctcgcttcggcatagacggcgagattgcagcgtttgaacatctcggctacgtctttggtgtccagcattgccggcaaaccggcattttcggcagtagtagtggttgcggtgctcatggtgtttccccttcatgtgatgtggacggcgggctacgttgcccgccgtgaggcacactgtatgacgttcgtgcggcggcccgcaagcccgcatggcgagatggtggataagtggaaaacccaatgattccaaggggtatggaatgtgcataacagtggctaccgtcggtggataaccgcactttcttgcaggttatccactgatcgcgcagctgttatccaccgtctctgggttatccacatcgtctctggcgtgtcatccactgtcagcagtcgatttctgcttcgtttggcgtgtataagtgcacggtgaagtgtataactccgcgcattaggcatatttgctactgagaaaggtcccgaaatcgccttcgaacgcatagctacactcagcagatgtattcagcatggcaatagacccacttaggcaccggcgaatgattttccctcgcttatagagtcggcaaaggcccaacacctgtcccaacgccgacgctactgcactggcagcgtcggcagaggaccacaacttggcacagcaacgacgctaaaaccgcccagcatcgttacacgtccaagttttggccgctaacgacgcttaatgaacgcttagcgtcggcagcaggtcacgcactggttctccaccgacggtaacgctccttagcgaagccagcccgccactctttggcacatcaccgacgctgagagaacctccagcgaagccaaccagccaaccgctggcaacatgacaccacccacacccctcagcgaagccaaccagccagcgcatggcaccccaacaccgctgagaacacccaccccaccagtgcacataaaaaaaaactggtcatagcggttgcgatgtaattgcatcgtaatcgcgatgaccagcctcgggggggctgcaacgagcaccgaatgaatcagatgatgatgccgttgcagtgatcgacttcgtgttggatgatctgcgcggtccagccggtgaaggtggcgtggcgggcgcggaaccgacggtcctcgtagttgacctcgatacggcggcagcgcagtgtgcggcgttcaccggtcagcgacaaacagccttcctgggtgtcgaaggcaccatccgaagcggtgatcacggggttgagcatcaccgtgatacggccaccgagatcttcgtccacgaagacgatgatgcgcttgctcacgccgatcatgttggcggccatgcccacgcaccgtgaacggttggcctccaacgtatccacgaggtcctgaatagttgcctcgtcgccgggcccagccgcttcagacggcgtgcgcaaaaacgaccgcgaagtcataatagggcgttgcatgttggaatcacgcttcttcgtgccagtggatgttggtgataagcggcagggagatgccggtaccgagcgacatgaccagtcgggcggcgagcagcatcgggaagttgaccgcgagcgcgcccagtaatgtgccggcggtgaaaatcacgatggccatgatgaacagtgttttggtggcgaatttgcgcaccatgaacggcgagctcggaatcgacaccgacagcaagagcagataaccggtgacaagccactgcaccaccgaggcgccgatggagaactcctccatcggcgtggagtaggcgatgttcagtgacgtttccgataggatgccgaggaaggtcaggatcgcgagcgagacgaccgcgatgacgagtttgttggagaccggttgcttgccgccgttaggcagctgtgttgcggaatgagtcacgatcttgttctctcctccattcattcagatattctgactacgacgttggaagtcttcctgcatgagtcgcagagcctcggtcaaggtgcgtaccgtggtttcgcactggtccgaggtcaatccgcccagcagttggctcaaatgcgcgtgatattcctccatatagatgcggcggatatccaagccgcgttcggtgagcgtgagcgtcaccgcacgccgatcggcggcatcggcgtgtttgacgacgagtccgaggtcggccatttcgccgacgagcttggtgatgctcggcgtagtgacgccgaggaatgcgctgacgtcgcccacgcgcgcggtgccggtatcttgcccattcggttcgttgatatgccagacggcgtcgatcacgtggacatagcgcggtttcatacctttcggcaatgccggcatcagttcggtgatggtcttggccttccagcagacatccaggaggctccgcacctcattcaccggaagcaagccggtcttggtatcggttcgggaatcgcacatcgctggcccaacctccaattagttactaatagtcattaccataagtaactatatgcaggctctagacaaacccaacgacctgcgcgcccgtgtcgagttccgtttcggcataaaaaaagccaggggatccctggcttgcaatgcacatatcgctgcaggtttgccgggacctatatgttcccggcaacaacagccgtatatacgttaccgatcagcgctgccctcatcatccttggcacccgccgtggcggcctcagtctccttggcgttccacccggtgacggcattccaaccactccatccgatgaccactagcaagcacagcgagaagacaatagtggcccaattgaacagcgagccatcgttattggcctcgaccagtgactgccagagccagataacgcaggccaagcaggtcaatgcatacatacgggaggtggagcgcgcggtgagtttcatggcggaaaaagtcctttgattacaagaatgacggcagataacagtgtgggatccgcaccagcggcaccggcacgaatcccacatcgaggaggagaaaggggaaggtcagctcttcttgcgcttggatatgatgtccacggcgacggccagcaggagcacgaggcccttgatggtcttcaccacggcggtgtcaacacccataatcgacagaccctggttgataacacccatcacgaatgcaccaatcacagcgcccgggatggtaccaataccaccggtgacggccgtgccaccgatgaagcaggcagcgatggcgtccatctcgaactccataccggcctgagcagttgcggaagccagacgggaaagcatgcagacagcggccactgcggacaggaagcccatgtggacgaacagcaggaagtccacgcggcgggtgttgataccggagaggatggcggccttgcggttgccaccaacggcgtacacgtggcgaccgaacacggtcttggtcaggatgaagttgtagatgaagaccagcacaccgacgatcaccagcatgatcggggtaccaccctgatcagcgttaccggaggaagccagcaggtaggtgacgaaggcgatgacgaccgcgacaagcacaatcttgaggacggtcaggctcatcggctcgggcaccaggccgaccttggccacacgggcgcgcttgcgcagctggctccaggcaaagccgacaatgcacaggatgccgagcacaatggtcagaccgtcgaacggaccccaccagccaaggatgttgggcaggtagttacgggcaatgccacggaattcgagggaggtaatcggcacggattcgccgacgatcacggtggcgagaccacggaagatcaacatgccggccagagtggtaatgaagcccgggatgccgatgacggcgacccagaagccctgccagacgccgacgatcaggccgacgaccagagcgatgacgatggcgagcatccagttgactccggcgcgttccatcagcagtgcacacacaccaccgatgaaggctaccaaggaaccaaccgaaaggtcgatgtgggtggcgatgatgaccatcaccataccaatggccaggatgatcacgtaggcgttctgctggatcagggacacgaaggagttcggcttcagcagcacacctccggtcaggatctcgaaggccacgacgatgatcagcagtgcgccgacaataccgtattgacgggcattgttggcgaccgtggccagcaggccggtcttttcttctttctttgcaggtgttgcagttgcggcgctcatcaggctgccacctccctttccttggtcatacccttcatcaggtattcctgggtaaatccattcttctcgacattgtcggtgacgacaccgtaggacaccgtgtaaatgcggtcgcagataccgatgagctcaggcagctcggaggaaatcacgatgacggccttgcctgcatcggcaagcttatcgatgatttcgtagatctcatacttggcgccgacgtcgatgcctcgggtcggctcatcgaggatgaggatgtccggctgcgagataacccacttggcgagcagcactttctgctggttaccaccggagagggtggagacattcacatcgatgtcatgacacttgatgttgaagtccttgcggtactgttcgacttccttgcgctcaaggttgtcgtccacaaccccgcccttgctgatcttggtcagggaggccagggatgcgttctctcggatgttctgcagcaggttcagaccgttgcccttacgatcctcggtggcgtaggcgagacctgcgtcaatcgcggactgcacgttgggcatcttgacttccttgcccttgacgaacaccttgccggagatgttggaaccgtaagagtggccgaagatggacatggccatttcggtacgacccgcacccatcagacccgccagaccgacgatctcgccggcgtgcacgttgatgttcgcatggtctacgatcacgcgctccgcgtcgagcggatgatgcacggtccaatcctcgacgcgcaggtattcctcgcccggggtattggaggggtggttcgggtacaggttgtgcagcggacgacccaccatcttgcggatgagttcttcctggtcgagcggcgtctccggcgtcacgtacatcacaccgacggtcgaaccgtctcgaatgatggtgacattgtcggcaatggcggcgacctcgttgagtttatgagtgatgatgatgctggtcacgccctgctcgtcacgtagctgacgaaccaggtcaagcaggtgggcggaatcctcatcgttcagtgcagcggtcggctcatcgaggatgagcagcttcacgtccttggacaatgccttggcgatttcgacgagctgctgcttgccgacgccgatgtccataaccctggtatccgggtcttcgggaagtcccacacgatcgagcagcttcttcgcctcggcgcgggtcttgtcccagtcgatcacgccacccttggcctgctcgttgccgatgaagatgttctccgcaatggacaggaacgggctcaacgccagttcctgatgaatgattacgatgccgtcggcctcggaatcattaatagtatggtatttgcattccttgccatcaaaggtgattttgccggaatagctaccgtatgggtacacacccgaaagcacgttcatcagggtcgatttgcctgcaccgttctcgccgcagatggcgtggatctcgccgcgatcgacggaaagattcacatcggtgagggctttgaccggaccgaacgtcttcgtgatgttttccatcgtcaagatggtgtcatttgatgacatgtcatcactcctcgtcacagttctgtgttcatggacatgcggcgcatatcggctatgcgccgcatgtcattgtgtttgtttacggattgcctgatgaggactacttagtcagctcgtcgaagcgatcctgggtgatgtagttggccgtgaccagatcctggaggttgtccttggtgatgttctgggggtcaagcagcttggacgggacgtcgatgttgttgttgttgaacttgccgttcaggccggagacttccttgccctcggcgatctcgacgaccatgtcgtacacggcgtcagccagcttgttcacgtccttgaacacggtctcgccctgcttatccttggcgatgttggcaactgcgatctccatggcgtcctgaccggtgatgtacggccaggagtcggtgcccggcttcatgtcgggacgcttggattcgatggcgttgatcacaccctgggcgatgccgtcgtacggagtgaggaccgcgtcgagcttctcgccgtgggcgtaggtggagtcaaggatggattccatgtccttctgcgcctgctcggtcttccagctcatcacggagatcttctgccaatcctcaacggtgaagtccttggtcacgccaccctgaccatgctgggacggggagacgagcacgcccttctcgaagtacggctgcagcagatcccaagcgcccttgaagaagtacttggcgttgttgtcatccggggaaccggtgaacagctcgatattgaacgggccggtggcgccatccttaagcttgagctggtcaatgagccacgtggcctcgagcacgccgacctgctccagctggaaggtggcgtagtagtcgacggcgtcggtgttcatgatcagtcgatcgtaggcgatgaccttggcgcctgcatcgcgggccttctcaacggcggggcccactgcggtgccgtccttggaagcgaccacgacgatcttggcgtcgttgttgaccatgttctcgatgtcagcgttctgctgggccggcttatcgtcggcgaaggacaggatgaccttgtatccggccttctccagcttggccttcaggttgttgccgtccttgttccaacgctcttcggacttggtcggcatcgaaatgccgatagtggcgcccttttcgatcttggcatcaccgccagttgcctggccgctacggctgccaccgcaggccgcgaggcccgcgcacatggcaacgcctgccaccacggcgacgatcttcttagtgaacttcatttgttctccttcatcttcgaggggatggcgaaccctccttggtcgcccgaacctgagaataacctcaggttcatctcatagaataccgtattgagttaagttgtcaaactcaagaaagcgaatttcctgtcgtttatgttcaaccaatgaacgcaatggcgatttttcgcgcatcacaaggcgacacgccgaaaaatccacgctctgcgcctcgctgtgcctcatgccggtaacgactacactgaactcttatggcaacaaggcttttcggttcgcagacctcgcttcgcgaggcaaaccgcgtcaacttgctggccagcatccacaagttcggcgccatgacacaggtcgaactggcagaggtgacaggactgtccactgcgaccgtgtccacgctcgtccatcagcttgtcgacgaagaccagctggagaccaaaaacaccgttcgcaacggtcgcagagccactctggtgacccttgcacggcatcagggcctcggcgtcgggctttggatcgcgcgacgtcatcttacgctttctatcgttgacttctcgaagtcaatcatcgctgagcacacgctccccctgccgttgggccacaaggcggacacaacgctggaacgcgccatgctgctcatcaatgagaccctgagcagcatcgacgccgaagccagcgagctggtcggcatcggcgtggccgtggccgcaccggtggccaccagcgaccacaccatagcgattcccggcattctgcccggatgggacggcgtcgatatcacggccccgttgcgcacggcgttcaacgttcccgtatacgtcgataatgacgcgaatttcgcggcatacggcgaatcccgtatgggcgtggcggcaggcaaacgcaatttcgtatatatctcagccaacgacggggttggcgcaggcatcgtcatcaacggcgaaatcatgcatggcgtgaccggcctggccggtgaaatcggccatatccaggtcgacccgctgggtgccatctgttcgtgcggtaaccgcggctgccttgacaccgtcgtggcggaaaacaggctggtgcagttgctcagcgtcacacacggcaatatgacgctggatgatctggtgtcctttgccaacgaaggcgaccccggttgccgtcgcatcatcgccgacacggccgtgcgtatcggtcaggtggcggctgatctgtgcatcagcgtggatccggaggtcattgtgctcggcggcaagctggccatgaccggcgacgtattcatccaaccgttcaatgaagcgttgcagcgcatgctgttccctgatgccgtggcacccatcgatgtactcgtgtcatcccacccgaacgacaactgcgcgctaggcggcgcattatgcgccatcgagttctcggttcgcaatgacgtcagccagtgaccggtaccaggagaagagtgagaagaaggaacacaccatgaggaattcgagcacacctcctctgctgcggctggaggacatctgtgtgaagttcggcttcgtcgaggcgttgaaatcggtgaatctgtccatccaacgccaggaggtcgtcgccatcgtgggcgataacggcgcaggaaagtccactctgatcaaggtcatcgcgggatttctgcagccgggattcggccatatctatctcaacggcgaacaggtgaccattccctcgatcagggaggcggaccgcatgggcatcgcatcggtgttccaggggcaggagttctgcgacaacctggacgtggcctcgaacctgttcctcggcaaggagatcaatcagattggcatacgcgatgacgattcgatgaactcgcgtgcccgttccgtgctgaagaccctgagctcggcgattcgggtcggctcccctatcgcatccttatccgtcggccagcgccagaccgtggccatagcacgcacgctgctcaatgacccgcagcttattctgctggacgaaccgaccgccgcactgtcggtgatgcagtcggcggaagtgctcgcatatatcaagagactgcgctccgaaggccggtccgtggtgatggtctgccacgatctgccggatgtgttcgcggtatccgaccgcattgtcgtgatacgtcaggggcacgtcaccggcgtgcatcgaaccgtcgaaacgtcctatgaggagattatcgccgaaatcgccggcgtgaccaccgaacacgagtacgaggaaatcgctgagaacccagaattcgattccatggtcaggcagcggaaactcatcgaccgcactatcagcgcggcagtgagccatggcaccggccatgactcaccattagactaacgtcccgttgccggagcgacatcgtcagcgcagagccaggttggccgcgccgatcagaccggcatcctggcccgcagtggccgcgacgatcttggcatggccgcggtaggcgctgccttccaggaaacgctggtagttgtagcgggccggctccagcagaatgtctccaacggctaccacaccaccgccgatgacgaacaaatccgggtcaagcacggcggagacggcggccatggtgcggccaagccattcgccgatcttgccgaacgcatacaggccaagtacgtcaccttcctgagcggcttgggacaccatcggtccctccaacttggtgatgtcgccaccgcacagctccagaagacgtttggcgtcctgaggacgacgacgcacggcggacttggcgaagttctccagcgag

SEQ ID NO: 1178 - DNA, 36282 bp, Unknown
  R81_24m  MAG No. k141_14495
aacctcaacgcccgcgcgcagagcctcggagtaggtgtcgaagccgtacggggagatcatgtactcctgaatgtcggtggcgaagtcagcgtgagcgccaccgttcatgatgttcatgttcgggaccggcaggatgtggccgttggtgccgccgatgtagcggtacagtggcaggccggcggactcggcggaagcgtacagagcagccagggagacacccaggatggcgttggcgcccagcttgcccttgttcggggtgccgtcgagctcgatcatcaggtcgtccagagcgcgctggtcagcagcgtccatgccgatgaccttcggagcgatgacctcgttcacggccttgaccgcgttaagaacgcccttgccaccgtagacggacttgtcgccatcgcgacgctcccaagcctcagcttcaccggtggaggcgccggacggaaccagacccttgccctgagcgccgtcttcggtctccaggtagacctcaacggtcgggttgccacgggaatccagaatctgacgcgcgtacacgctttcaattactgccacaactactccttaaaacggttgtgtatcttgaatgacattcttaagagtagtgcgatttgtggacgttgtgaacaacacgcccaaaatttagtgttagcgctcacaatgccgatgcgccgcctgattgcaaggcagtacggacgaaatcgctcagtcgacgtccttgccattgaggtagtcgatttcactgtcggacaatttcagttcgctggctttgaacgagtcctgaatctcctgcgggtttctggccgagggaatcgtgaacagatattggtattgcgcaagttcccacgcgagcgtgacgcgctggtaggagcagtcgtgggacttcgcgacttcgcggaaccggtcgaacagatgctcgttgaacgggtcaaggaatccaccgagcggcgaccagcagacgaaagccaaaccgagtttttcgcaggtctccaacgtgtgttcggggtcgcggtgaaccggggagaactggttctggacggccacgagacgatcgcccaaaatgttgtgggcggcttcgatgtccgcgttgtcgattctggagataccgaccgctttggccacaccttcgtccacgagctgcttgagtgcgcccatctggtcttcgtacggcacctgcggatcattgcagtgcgagtagagcagatcgagcgtatcgacaccgaggcggcgggctgattccttggcattggcgatcatggtttcgggtcgggcgtcggcctgccagccgtagttgccgttgccgtcaagcgtgcgcagccagccggttttggtggctacgagcacctgatctttggggccatgccacgagtgcagagcatcgcggaccagatattcgccatagcccatatcctccggttcgccggtgccgggtgcgctgggcagataataggaccaagccgtgtccaaataacggactccggcatcgagcgcggcatggatggtctcgatcgcctgatcacggttggaggggcgcccctcgatggcgagcgccattgtgcccatgccgaggcggggaatctcatagccggcaagtgttgccgcgtgttggtttttcatcgttgtggcctccatgccaagtcatcgaggagttggttagtccagaggactacctggtcggagctcatggggccttggcccagggaaccggtgaacggggtgggtacgatgagctggtgggtgaccgggcggtattgggcgcctttgtaaatacggcccatacgcatctggatggattcgggcgggtcgatacggccgatgcgcacgcggttggattgcgcgagaatctccgaaatgccgagcttgcgggccttgaacttcagacgggccacgtcgaacagggtctcgaattcgaccggcggcttgccgtaacggtcggtaagttcctcttccaaatccttcagatcggcctcgttgcgggcggaggcgagcttgcggtacgcttccagacgcagcttgtccgaatcgatgtactcgatcggaatcgacgcttcgatgggcaggtcgatggacacggccaccggctcgacgttctcttcgggctccttgtacttctccacggcttcggacaccatgcgtacgtacaggtcgaagcccacgccctcgatatggccggactgctcgtcgcccagaaggttaccggtgccgcgcaattccaagtccttcatggccacgtcgaaaccggagccgagcgccgtgttctgcgcgatggtggcgagccggtcatgggactgctcggtcatcggcttggacgggtcgtacaggaagtaagcgtacgcgcgctcgcggccgcgaccgacgcggccacgcagctgatggagctggctcaagccgaaacggtcggcatggtcgacgatcagcgtgttcgcgttggatatgtcaagacccgtctcgatgatcgtggtgcacacgagcacgtcgatgtcacgatgccagaagtcgcggatgatctggtcaagctgcttctcacccatcttgccgtgggcgatgccgacgtgcgcttcgggcaccagcgtatggatcttgtcggcgatggacgcgatgtcctgcacgcgattgtgcacgtagaacacctggccgccgcgcaacagttcgcggcgcaccgccgcggtgacctgcgcgtcctcgtaggcgcccacataggtcagcaccggcaaccggtcttcgggcggggtggcaagcgtggacatctcgcgaatgccggtcacggccatctccagcgtgcgcgggataggcgtcgcggacagggacagcacgtccacgttggtgcgcagggctttcagcgtctccttgtgttccacgccgaaacgctgctcctcatcgatgatgacgagtcccagatccttgaacttgattttcgggttcagcagcttgtgcgtgccgatgaccacgtccaccgtgccggtttccagaccctcgatggtctcgttgatctctttggtggtctggaatcggctcatggccgccacattgaccgggaaaccctcgaatcgttcgctgaacgtctcgtaatgctgctggacaagcagcgtggtgggcacgagcacggccacctgcttgccgtcctgcacggccttgaaggcggcacgcagtgcgatttcggttttgccgaagcccacgtcgccgcagatgaggcggtccatcggcacgggcttctccatgtcggatttgacctcgtcgatggtggtgagctggtcggcggtttcctgataggggaaggcatcttccagttccttctgccatggggtgtccgggctgaaggcgaagcccctggcgcgctggcgggcggagtacagcttgatcaggtcgtcggcgatctcgtggacgtgtttgcgggccttggccttggtggccgcccagtcggagccgccgagcttgttgagcttgggggcttcggcaccgatgtatttgctgacctggtcgagctggtcggtggggatgaacagtttgtccgccggggcgccgcgcttggaaggcgcatattcgatgaccaggtattcgcgagtggttttgttggcgccggtgccgatggtgcgctggcgcatttcgatgaaccggccaatgccgtgctgctcgtgcaccacgtaatcgccttttttgagttccaccaagtcgatggccttgcgccggcgtttcggcgttttggccacggccacggccgaagtgcggccggtcaggtcgcgttcggtgagcagggcgattttggcggctttgtccacgaagccgtcgatggcctgagagcggatgacgtcgaaattggcgatgccggtagtgttgatcgcgcgcctgagcctggccaaggtgccggccgcagcggcggtgatggtgacgtggaagccggcgtcgagcaggccttcgatgccttgggaggccttggcctcatcccctcggaattcggccgggttctgggcgtcgagctgcacatggccggtcagcgtggtgtccacgccgaaactggtgaggcgaatcaccggatgttcggagtattcgagggagctgatggtttccgcatagtcgaggaagctggctttgtcgaagctgatgggcgcgccggcgccgtggccggaagcggccacatgccagctggcggccaggaactcgttcgcggtttttgccaagtcttcggcggaacggcgcagtttctccgggtcgctcaggaggatcacggcgtgcttgggcagcatggagcccaccggttccagatggtccacgagcgcgggcatcagggattccatgccttcgaccggaatggcgttggcgatggattcgagcatgtcctcagcattgggaatcgaaccgaccaaggctttggcgcgggcgcgcacggcgtcggtcagctgcagttcacggcatgcggtggcccagatggtcttgaggccgtcgccgtaggtacgctggtcggaggcgtggaattccttgatggtgtcaatttcgtcgccgaagaattcgatacgcaccgggtgcggtgcggtgggcgggaacacgtcgaggatgcctccgcgcaccgcgaactcgccacggtccatgaccaggtccacgcgcgtgtaggcgttttcgatcagacgtttggcggcttcgtcgaggggcaggtcctcccccacggtgaacacgagcggctcgacgtcgcccagtccttggacgaccggctggatgagcgagcggatcggcatgacgagaatgcgaatcgggccgaacatcggatcggtatcgctcggatgcttgagtctgcggaacacggccatgcggctggccacggtgtccgcgcgcgggctcagacgctcgtgcggcagggtttcccaggcttcgagctgggcgatgtcgtccgggtcgccgtcataccaggagcgcagcgagcccacggtctcttcggcttcgcggccggaggccacgaccagcacgaccggcttgccgggtttgccggtcacaccctgcccgatggcggcggccaaagccgggcgcaagccttcggaaacaccggccagaacggaattgtcgatgtcgtccgaaacctcgatgtcaccagtggcgagtctaaggaaggtcttgtcctgttccagctcagacaggatgcctaccagtgagccgttgatcaggtccgggtgcgtcgcctcaccggccattgaacttctcctgggtcttggcaagaccgcggaagatgatgtcctcggcggcgtcggcgccgtcagccaggaattcgggcagctgcttgcgctggtccggaccgaatccgcccagcacccagttcaccgtgttgtcatgcgcgttcgcaccgcgcttggagtgaccgacgcccatgcgcacacgcgcgtatttcggcgtgccgagggaacggtcaatcgacttgatgccgttgtggccccctgcggagccgcctgccttgaccttgatacgaccgaattccaagtccatgtcatcgtgaatcaccacgatatggtcgggctcgatctggtaataggcgctaatggaagccaccgcattgccggaatcattcatataagtcagcggcttggccagaaagaacttgacggtgcggccgtccaggttcatcacgcttttaccgagcatggccagacctttgtggtcggcgaagttcaccgtccaacgttcggcgagcacgtcggcggtcatgaagcccatgttgtgccgcgtgtcctcatattttttgccggggttgcccagtcccgcaatcagccagaaatccgatgccataatccactcctcgtccgtcttcctatattcccgtatgcacgttctgtacgttccgtacgtcatgcgcgcgttcgcctcgcgcactggcccatgcccggccggattcaaccgtcaagattgtactcaacgccgccgtcaagccttggaatcggcaagcagcagggcacggcattgctcggcatccatcgatcggaccgatgaatggtgaaacgcttcgacgtcacgagtcacgatgacgtcggcgtcattgtcctcggcaacggcacggatgagcccgtcctcgaagtcgggctcatcggatcggtacgacatacacgcatggcgttccataagtggacggatgtcgaacaattccatcagtccaccgatatcgtctcgcgccgcccgctcctcgccataatgcttgcgcaacacgcaatacacgtcattcaatgacgataccggcgccatgatctcaatgtttggccgtgcaacggcttccatgagcaaatcaacacattgtttatggaaaggcgctcgtttgtcattgcacaaatcgagcagaatattcgtgtcaaacagcagtttcatcccgtcccccaaatcgttccatacgtgcctgcgcgagaatctcctcatccgaaagatcgccttccgcctccggcaaattccggtcggcgaaacgttgaatcaactcctgctttttcctacgctcccgctcctgaatcagggagagcgtcagacgctcgaattccggcagttcccccgtatccgcaaggtagtcggtcagatcacgaatcaggtccgaataggtgcgcccattacgcttaagcactttctccgcgtcgcgcttccgttcggcattgacgcgcgccgtcaccatggccatagtcatatcgcacctccttgtaataccagtattacaagagatggagacgagtgaatcgcgtctattaggcggtgtcgccagcgaccttttcgcgctgtttgccgttgaggtaccagtaggccagcgccacgaacagggccgccgaggatattgccgagcgtggctgcggacaggttatagaggatgcccgatggtgtcttcacctgcgcaaccaactagcgatgaattcaacgcgacatcagccgtatctcccctgcctgcgccgtcacctgaacatattgcaaagcgctattgcaccaattgcggcacgccttgccgagtctccgcacgattctgcccaaactgcggcaaacagttggactgatatgtccaccaatgccgtatatcgggcatcggtgacgagccttgattgtgcaacgcctcacgcttccctgcaatcggatgacatattgcgggacggcagcggattttgggcgttcttggcgtggcatcccgcaagcgttatcgcacgttatctgcaccgaatcataagaatggcagaattccaatgatttcgcaggaagagttgcgggacgcgagctatgtgcatcgtttgacgtgtgtggcatcccacgtgattgcgggataccacgtcaaaacggacgaaaatcgcgtgccgtcccgtagtttgccgttatctgggataagcgcgtccgatatatggcgttcgaggaaaagagctgatccgatacaactttttagtgttataggacaccggaatccatggagagcaagggtaaaccgcctcgggcctacaggtccaaataccagtaggacatgtcccgcatggtgccggtggagtcggtggcagcggcgggcatgaggccgaattgggtgaagccgaagcggcgcatgagggcaatggagccgacgttatcggcgaaaatgatgccacaggccttgcgcatgtggcgggcccgcgcctcggtgagcagcctgtcaagcatgaacgtgcccactcccctgccttgccatgccggatcgatgtaataggccaaatcggtgacgccgtcatacccggcacgatcgtagaacacggagagcgcaccgaagccgatgattgaaccgtcttccgattccacaacaaaaacgccgtagggcggcgtatgggattcgacccaggcgcggcgttggtcgagggtgcgcggggtgaggtcggcggtggccccacccgccaccaccgcagcgttgtagatgtcggtgatggcttggatgtcggattcgacggccggatggaaggtgtatggcatgaagttcctttgaatacgcaaatagcccgtccttatgataaggacaggctatgtcagttgaggtaaccgactcccttcagtcgccttcggcgatagctcccctcaccctgagggaagccaagttacttgtcgagctcgatggccttgttgagggcgtcttcaagctcctgctgcgccttgccgtaggcggtccagtcgccgttcttcatggcggactggctgtccttcatggcttgggcggcatcgttcaacgcctgctggagttcggggctgcggtcggaagacgagccggaatccgactttccgtccgtggtgccggactgaccaccattggtatcggaaccagattggtcaccggacacgttctcggcatcgcccgcggccgcaccggaattgccaccgaacacctgatccaaggcctcatccaacgtatccgcgaatccaacctgatcaccgaatgcgaccagcgtcttcttgagcaacgggaatgaggtcacgcccgaagacttgacgtacacgggctgcacgtacaccagtccgccaccgagcggcagggtgagcaggttgccgcgcaccacttgcgtgtcgccggattgcagcaggttcagttccttggatacatcggcgttggcgttgaagttgttctgcgcctggccggggcccggtacgttcgaatccttgggcagctcctgcaatcggatggtgccgtagtttgagcctatcttgcccttctcattgccggcatccgagtcgaccgacaggaagccggtcaggatctcacgggtggactggccagccggaatgtaggtggaggtcagcgagaacaccggttcctcggtgccaccggtctgcaaggtcaggtagtacggcggctgcaggatgtcctggtcctgctgggactgggattcggtcggatcgaccggcgtctgccagaagtcttcgcctgagtagtactggctggcagaggtcacgtggtacttggagagcagctcgcgctgtaccttgaacaggctttccgggtagcgcatgtggctcatcaggtcgccggagatatcggagagctggtggtactggccagggaagatcttctcccatgccttgatcaccggatcggattgatcccacacgtacaggtccacggaaccgtcgtaggcgtccacggtggccttgaccgagttgcggatgtagttggccttctgagagcccagggacgagaccgttgcggaagagacggtggtggaatccttggtggcggagccgaggtcggttatttgcgagtacgggtaggcgtcggaggtggtgtagccgtcgacgatccacttgacgcggccatcgaccacggccggatacacgcggccgtcaagcgtcaggtacggtgccaccttggccacgcgctccttgggggaacgatcgtagagaatctgcgattcgctggtcacacggtcggagaagagaatctgatcggagccgaagcggatagcgtagagaatcctggagaacaggttgccgaccgaagggccgccgtcgcccttgaacgtggtcagagcaccttccgaaccggtcgggtagtcgaactcccaagcctgcgtgccttcaggggcaccgacaatcgagtattcggtggtgttcggcgagaagtagatgcgaggctcgtacttttcggattcggtgagcttgccctgggtggggatgccggattcgaagaattcgggctggccgtcggcggtcaccttgttgccgtaggcggccaccacgccgtaaccgtgggtgtacacggtgtggtcattgacccagttgcggttgtcattgccggccagatcgagctcgcgggcggcaatcacggtgtcctgggagacgccgtcaatctcgtacttgtcgaccgccagggtgtcggcgaaggtgtagtactgcttggactgctgcaactgtttgaacgtggggctgacgacctgcgggtcgagcagacggatctgcgcggtggtgtcggcctccttggccagagcgccctgctcacccttgtcggtcaccttgtattgctcggtcttgagcttgtcaagaccgtaggcggcgcgggtggcgtcgatgttgcgctggatgtaggtggattccatctcctgtgcgttcgggttgacgcggaagcgttgcaacagcaccggccatgccacggtgagtacaagacccaccacgaccacgacggcaatggaggtcaccggcacacgccaggccttgagcgcggcggaagcgcgcacgccgatggacgcctggccttcgagcgtgtgggagcgcatgagccagatgcccagcaccacgccgaggatggcggtcagcacggccatgatgaaggtgacggggatgttggcatgtacggcggtgtaggaggcaccggtgatgcgtgaaccctgcacggtgagctggtcgaagacgccaatcatctggcgcactgcccaagcgaacatgttgagcatcagccagatgccaagctggcgacggcaacgcttggtaatggagaacaggccgcgtccgttaaccggcatggtaatgcggataccgcccatcagcacatgcgtgaccacggaaaacacaaggcccacgcccagcagcatggccacggcggcgagcacgagcttcaggcccggcagcacgaacacgtagaagccgttgtccagaccgaactgcggatcggtggtgccgaacgactgcgcgttgaacatgagcagaatctcgctccagttcgcgttaaactgggaaccgaagatgacgccgacgatcagcgaaatcaccacggccacgcggcgagcggttttcgagctgacggatttgccgacctcgaccacatcgccgttaatgcgaatggtggaaccgtcggccgaatcagggcgtgctcgaatggccagccaggcggaaacgaagccggtcagggccatgagcagcgcgtaggccacccacagaccgattttcaccccgagctgggtccagaccacggactggaagccgagctggccgtaccacatcagatcggtgatgaatcgggacaggccgaagaacagaccgacgatgatggccaaggccagcaccacgccgatcagaatcttgctgccacggctggctcctgagccaccggacgctggcttacgggtgatacgcggattggccggaccacgtggagggcgggatgacccggaggggccagcgttggtgttgtgggccggaccgtccccatcggcctcgacatcgaggatgatcggatcgtcattgttcgcattgttgcgtcgtgaatcgccgccattgccgaacagtactgagaaaggatcgttaaaagacataactcaagcctatcgaaagggcgggaggtcggttatgccctgagcacagaatgaggcaacatcctgttctacgctctgttctacgcttgccgctatgaacagacaacggccacaacatatgcgtccctcagcacacgccacacgccaacttcggcacaggagcattccaatcgtggcggcaatatgtgctttggcggtggtgttggccggtgtggcagtctacggatggcatgtcggatggttcgccaaatccacatcaaacggcaacaccaccactccccagacctcccagacgagtgcgttaccgcgcaccgacgttccttccccgaagaagaacgacgatccggcggcacaagcccaacgtgcggtatccgccatgacgcttgaggaacgtgtgggacagttagtgatggtgccgttgttcgccggttccgaaccctcctcgttggcttcaacaatcgccgacgagcacattggctcggccattctcattggcaattggaataccggcgtcgatacggtcaagaccgcgaccgcgcaactccaaggatatgcgccggccggcaatcgtctcatcatcgccaccgatcaggaggggggtcaggtacagcatctgactggtaccggtttcgacacaatgcccagtgccgttgagcagggcacaatgtccgctgacgcattgcgtcaatcggcaggcacgtggggttcgcaattagccactgctggcataaatgtcgatttggcaccggtgcttggcacagtggttggcaatcgtgcctcaaatgctccgattggcgcgctggatcgtgatttcggattggatgcggccggcaacgccgaacatggcatcgccgttattgaaggtttgcgagacgctcaagtcggtgcggcggtcaaacattatcctgggttgggcgcggtaagcggcaataccgacttcaccaccgaaggcattctggatacgaccaccacgttggacggggccgaggcaggtgcctttgaccaggcgattaccaaggccgatcctgcaatggtgatgatgtcgttagccacgtatcaatccatcgacccgaataatccggcggtgttttcttctacgattatcgacggtcatattcgcaacgtcctgaagtacacgggcgtggtgatttcggattcgatgtctgccgaagcgttgagcagctacgatgtaagccaattgggagtaaatcttgtcgaggcgggcggcgacatgtcctgcatcggtcagacggattatgtaaagccaattgtggacggcctcaacgaacgggcggagtccgatccggctttcgcttcgaaggtgacggcggcggcgactcgcgtaatgacattgaaaatcaagatgggactggcctgaccgttcatccttgcactggcgaggattgatgcgcgctgattcgcgctaatcctcaccagccctcgtacaaatgcacactagtcctcgtacgaatcgtcagtcctcgtacgaatacagaccatgcttgccgatgtattgcaccacgccgtcgggcaccagataccagaccggctcgtcgtgttcggcgcggcgacgtacatcggtcgaggagatggccaaggccgggatctcaagcgtatcgaccttgccttcgggcaaggtcacgccgtccgggctggagtagccggggcgcgtgacggccacgaagtgggcgaggtcccacatgaggtcggcgtccttccactgcatgatttcggccacggcgtctgcgccggtgatgaagaacagctcggcgtcgggatgttgggcgcggatatcgcgcagagtgtcgatggtgtaggtgacgcccggacggtcgatgtcgacacgcgagacggtgaatttggggttggatgcggtggcgatcacagtcatcagataccgatcctcggcgttggtgacgtgcttgtccagcttgaacacaggtcggccggtgggcacgaaaatcacctcatcgaggtcatacacccaggcgacttcagaggcggcgaccaagtggccgttgtggatcgggtcgaacgtgccgcccatgatgccgacgcgcaggcgtgtatgccagttgccgcgtgcggaaagcctgcctttgccgtggctgctggccccggccggtacggacaggtcggacatgcgccgttcggtttcgccttgggtgacggcaatgatttcggcgggctcggcggattccactgttttttcggactgaactgacgcagccgttttgtggctgccggtaacaccactcatgcctggccgccctcgccggcggcatcatcggctgattcggtttcctcttcgatttcgccggcggagggattgtcttccttgggatcgatcttgcccatgtcttcatcccattcgtcttggaccacgcgacgaatctcggcgaaggtgggcagcgggaagtccggctggtagaggcggcggacctcggccacgcgctcggtgatgcggatgagcgtgtcggtcatgccgtcgaggtcgccgtcgtgctccatctggctgtatttgccgatgtagccttccatgagttccatgtgttcgcgcacgatcttgagctgggcatcgttgaggtccacgacttcgggtgaatcggtctcgggccagccgatgagcacggcgtccgcgtattcgagcgacgcacgctgggcggcggaggcgatgccgtcctcaatctgcacgaggaacacatagcggacgatgctgagccgttcggccgcgatcttcaggccgagcttgggatcgttgaggtcgatgtcgggccgcagttcgcttgccttgtttgccgtgtcagccgtagtgttcatgttgccgtcctcgttcatgcgcgcacctggcctgttccgtaaccgatccacttggtggtggtcatctcccgcaatcccatgggaccgcgtgcgtgcatcttctgcgtagaaatgccaagctcagcaccaaagccaaacacgccgccatcggtgaagcgagtggaggcgttgaccatgaccacggccgagtcgatgcgcttggcgaattcctcgatggccgcataatcctcggcgatgatggattcggtgtggcccgtggaatgcgtgttgatgtggtcgatggccgcgcccagatccggcaccaccttgatgcccatcttgagggccagatattcagtgtcccaatcctcctcggtggcgcggttgaggtcaaggccctcgatcgccgcgccggagatgatgtcatacgacgtggtgtcggcctgcagtacaacgttcgcctcggccagagcggcggcgatctgcggcaggaattcggcggcgacatccttatgaaccaatagcttctcggcggcattgcacacacccacgcgctgggttttggcgttgatgatgatcaggatggccttggcgagatcaccggacttgtcgatgtagatatgcacgttgccggcaccggtttcgatgaccggcactttggagttgcgcacgacggcttggatcagacccgctcctcctcgcggcacgagcacgtcgatatggcctcgcgcctccatcatggcggtggctccggcgcgtccgtactggtcgacggattgcaccagtgcggattcgaaaccgtgtgcttcaagcaccggggcgatgacgcccagcgtggcagcattggtgcgttcggcggcgtgaccgcctcgcagcaacgcggcattgccagatttaaggcacaggctggccacgtccacagtgacgttcggccgggcctcataaatcatgccgatgacgcccatcggtacgcgcgtctgggtaaggcgcagaccgttgggcagattgtatccgcgcacgatttcgccgaccggatcaggcaaggtggccacatgacgcacgccttgggcggcggcggccacgcgcggcacgtcgaacagcaggcggtcaagcttgcccgcatccatgccgttttccttggattcgagcatgtccagcgcgttggcggcttcgatgtccgcggcgtgcccgtccaacgcatccgcaatggcgagcagcagttcgtttttggcttcggtatttgcctgtgcaagacgctcctgcgcgcgtgcggcctgatcggcctggcggcacaccgcgtcgaacacctcaggactcaattcatcgctcataacagtcaagcgtaactcacaacgcggctgattgcttactccgacccgcttgttatgggatgtctgacgttttgaatcgcaaacagaaccggctcccctccgtctcaggcgggaagccggtgacgtgatgcgctccggtcagcgaatcatcactaaccggtacaccacggtggattagcgaatcagcaaatcagtggatctggtccaggtcggggtagagcgggaagtcttcggcgagcttgtcgacgcgggccttcagcacggtcacgtcggcggacgggccggcggcgagcgcggtgccgatgatgtcggccacctcctcatattccttcgggccgaaaccgcgcgtggccagggcggacgtgccgattctcaggcccgaggccaccgaggccgggcgcgggtcgaagggcacggtgttgcggttgatggtgatgccgcaggcggcgagcagatcctcgccctgctgcccgtccatctcgctgttgcgcaggtcgaccatcaccaggtgcacgtcagtgccgccggtcagcacgctgatgccgttggccttgacatcgtcggccaggagacgttcagcgagaatcttggcgccgtcgagcgtgcgctgcatacggtccttgaattcgggggtgccggccaccttgaagctcacggccttgcccgcgatcacgtgcatgagcggaccgccctgctggccggggaacacggaggagttgagcttcttggcgtattcctgcttggcgaggatgaagccggagcgcgggccgccgaaggtcttgtgcgcggtggaagagactacgtcggcgtacggcacaggactcgggtgcaggcccgcggctacgagtccggcgaagtgggccatgtcgacccagaatttggcgccgacctcgtcggcgatttccttcatggccttgaagtcctcgatgcgcgggtaggcggaccaaccgccgatgatcatggccgggtgggtttcgagcgcacgctggcggatgatttccgggtcgatgcggaaggtctcggggttcacgccataagcctcggcatggtagaagcggccggagaagtttattttcatgccgtgggtcaggtggccgccgtggtcgagggccaggccgagcacggtgtcgccgggcttgacgagcgcctggtagacggcggcgttggcttgggcaccggagtgcggctggacgttggcgtattcggcgccgaacagggccttggcgcgttcgcgggcgatggtttcgacttggtccacgtattcgcagccgccatagtagcggcggccggggtagccttcggcgtatttgttggtcagcacggagccctggcattgcagtaccgctcgcggcacgaagttctcagaggcgatcatctcaaggccattgcgctggcggcccagttcggagtccagcagttcggcgatctcaggatcggtttcgcagatcggcgcgttgaaagcatcggtcgctttctgcgcaaggggtgaagcggtcatgggtgctcctttggtatgggcgacaattgattcgccgttgccgccttactgtatggccggtttgtagccggcctgtttcatgatatggccggtccccgttcgatggcaatggtgattttcgccggtttgaccggtcggctatgcgagacggacggcccttctgcccacggcccacgctaaactggtgtggattcatcatccctttcaggcagaaggattcatcgtgacaaccaccttccattccacccgcagcaccaccgattcgctgaccgccaagcaggcgattcgtaagggcatcgccaatgacggcggcctgttcgtttcggacgcgttgggcaagaccaaggtggacgtggcctccctgccgggcaagtcgtaccagcagatcgccgccgaggtgctgggcgcgctgctgccggacttcacggccgaggagctgggccagtgcatcgccgacgcctacggcgaacagtggtccgatgagcgcatcaccccactcaagcccctgggggacgattacgtgctcgaactgttcaacggtccgacttccgcgttcaaggacgtggcgctgcagatcctgccgcgcttcatggcgcacaccacgccggccgatggcgacgcggacgagaagatcatgatcctcaccgccacctccggcgacaccggcaaggccgcgctggccggcttcgcggacgccccaggcaccgcgatcaccgtcttctacccggaaggcaaggtctcccaggtccaggaactgcagatgaccacgcaggccggctccaacgtgcaggtggccgccgtggaaggcaacttcgacgacgcccagtccgcggtcaagcgcatcttcggcgaccgtgccctggccgagcgtctcgccggcaattcgcacgtggtgctttcctccgccaactccatcaacgtgggccgtctggtgccgcaggtcgtctactacttctccgcttacgcccagctgctcgccgaccaggtgatcaacgtcggcgatgaggtcgagttcgtggtcccgaccggcaacttcggcgatatcctcgccggctactatgccaagctgctcggtctgccggtcaagcacctcgtggtggcttccgacaagaacaacgtgctgttcgacttcctgaccaccggtacctacaaccgccagcgcccgttcttccagaccatctccccctcgatggacatcctcatctcctccaacctggagcgcatgctgtactacttgtccgagggcgacacacgcttgatctccatgctgatgaacgacctcaacaagtggggcacgtacgagatcccggaagaactgctggccaagattcgtcagatcttcggcaccggttgggccgatgaggatcaggtacgcgagtccatcaaacactgctgggacgagaaccactacgtgatcgacccgcacaccgcctgcggctactacctgcttgagcagatgccgcgagacccgctgaccccgcgcgtgctgctctccaccgccagcccctacaagttcccgcgcgtggtgaacgaggcattgggcttcgacgccaccggcaccgacttcgagtgcatggatgtgctggcccacgagaccggcaccaccgccccggccgccctgcgtggtcttgagaccgccgacgtgcggttcaaggacgtcgtggccatcgacgacatggaggactacgtggagaaggccgcccaggcgctgtaaaacataccagcacattggctcccctcagagcggggagccattttttacatcagaattgcgtttacatcagtatcgcggcgactggcagtcctatggcgattgccaacagcacgatagtgccgatgatcacgctggggcgtgcgaggttgacggtccagccgacgccgaaacgtttggggatcatgatggcaggatcgtcacggttgatgtagatgatgccgccaatccagtgcaggtcatcgtcatacggcatggcattatcgtccgaaatgtcaccgccgtcactgtgccgaacaccggcatagacgcgcgccccgttctgcccgtaatacacgccgatcatcagcgcgccgaccagagccgccacggcgatgaacatgccgatgatgccgattagattgatatccagcacgccaatggtgacaagctgaacgcctaggcccaatccaccggctgccagcagtccgatgaccagcacgtagatgctccagacccgcgagaacacaccataggcatacccggtggcggcggggtggtcgggatcaatcgggtgcttggcgtagatgatcgcggcatggctggccaccatcaccgctgccagcaccacctgcgcgagcacggcgtaccaaatcaccatcggactcttctcggcccaaccgttcacattgccggcgatatccgcatgaatcggcacccgctccggcatccggtcatagcccagcaacccgacagcaatggtgacagcgagacaaacgacttgcagcaattcccacttcaagctcatcgggtcgggattgtcccgctcacctatcaatgctgcacggcgggcactggacgcctcccatccctgatcgactttgatggatagtactttgcggcgaaacatctgctgcagcacgaaaccacatatcgcaatcgccaccgctgcgatggacacagtccagaacgccgcgtcgactccgcagagttgccaaacggccagcgagaccagtatggcgcatacgccaagcgccaccgtaattcccgaaaacgcgactttaaatccgcgaatgcgcgtattgacatgggcggcggccggcactgtgacaccgaacacctcatgccggtcggtaacccatggaacccctgccaggccggcggtcactatcaccggcaacagtaaaaacgcacacaacgcgatgttcatcgacacgactgtattattcatcgttatctcccctgatttccttttgttgcaccgtcagtaacgctctgcgaggagcgcacgccgtatgcccgttcgcattgccgtttggtggcatcgaggaatgcggccgaatcaccgccgcgcgccctgtaggccaaggcaaggcgatagagttcctcgcccatccgctcatcctgtgcttcggcagttcggttcggtgcttctcccccgccgtcatgctcggcgacggttgcaccggcaccacgacgcataacgatgtatccctcgtcacgcaacagcgcataggccttgttcaccgtgtgcaggttgatgccaaggtccacggccagcgagcgcacggacggtaacgagtcacctggcgacagctcatcgcccgcgatggctgcgatgagctgcctgtgcagctgctcgtaaatcggcacgtcactgcgctgatcgatttccacaatcacggtcaattccacccctctcaagaactgttctatttgttctacatcaaatataacagttttgccgtatgagtcaagatatgcgaatctcggttgaacatccggcaatgggccaacggcgtgttgcttgaattttctaggaaggcgggaatcgccatgctgccggcgaatgggaaaatccatgtggcttgtcagattctgttcctgcaactgaatagtcccatgagggagtagacagcattgcggcgaagggctcggcccaaaccgcaataaagcgtgccgagcgccaaagccgccaacaccggtatgacgccgctgcaggagaagctcgcgaagctggacgaacttcatgggcggcaccgccgaacagcagtcgaccattctgttcacgctgttcgtggtattccagctgttcagcagtcgaccattctgttcacgctgttcgtagtattccagctgttcaacgccttcaacagccgcgagctgggcaacgccagcctgttcgccaatctgctacgcaataaggtgatgatcggcgtgttcgcgctgatgttcgcacttcaggtgctggtggtgcagttcggcggagcgatgttccgcaccgtgccgctgccgatcgacatgtggctgaagatcatcgcggtcggacaaatgcgcggctagagttctttggctcggtagatgcggatggctataagcatggagccaaaatatgcgagcagacacaacacggcgagaacaagcgccgtatgccaccagatcgtcaggaaatcggtaatattcagcaaaagccattgccagtcaacaggcaatcgggccagcagcgcaatgacggcatacaagccaaccaggaccacgccagaggccaccatcatcttgcggaaggtgaaccggtatgcacaggccagcagcaccgacccaagaatgatagccaaagcgaagatgaaagcacctgctgccaaggtaccgatccaccccatatctgctatatcgccaaagacaatgaagacgccgccgcatatcaccacgtccaaagcccagagcaggccaaccaccaacagaaaaaggtaccgacctacaacttgtgcagtgcgtgaaacaggaatcagccctcgcatggcactgtgccctgcagattcctcggatgacgcaggccccaatgcactcatacatgccatcgccgatgccaaacctccgagtccgcccatcagaccactaacaacgtgttcatcgacgtgggtcgatatcatcaccagcgataccacgatagacagcaccgggaaaaccagcagaaataccatattcgccacgctgaacagacccgtcccgacacaatcgaatcgacattgctttactacggatttccagctcatcgtcaccattcccttgaagcaaatatgcgagaggcaattacatacgagattccatatgccacaaccgtcgttgccaataccgcaataaccagccacaatcgttgcgcgatgatggcattcgcggcatgggccaatcctttggtcaccgaagcaggcaaaatagatagcagtatgaatccagccaatacaacgacataaatcaccatcatcgtgacttgaagaccgcctagtttggtccacagataacccgtgggcacgataagcgcgaccatcagcgcggtgcagaaacctcccaacggagccgcccacagattgcccgcgaatgaccaatccggattgaccagcacttgcaacccgtcaatcagaacaatcatcgctatcgacaatacggaaatcaccaatccaaccacatatcgcgcggccacctgactcttcctcgaagccggaataatgccacgaagtcgatatccgttctgtaagtcagcaaccgccatggttagcacccacatggcgcaggtgaataccgtcatgatgacacccatgcgatagccgaagccatcaccataagcttcaccttgaaagatgacggagaacaacggtgccaacaacaacgagaacacagtccgttcgccgacgcacaggtaggccatatcgacgcgcaatgcagtggccaatgcatgttgccgagaccgcgacaccctcagtattgcctccatggccgctcacctcccgctcaagtcacgattggaatcatgggcattggtcagtcgaatgatgtcatcaatggaagccgattcaacgacaagccccgaaaccaccgacgcaacagcatcaagcctgtctgaccggaccagcgcatcgaatccggtggcatacgtatgtgagcccagcaccacgtccgcaggcagttgtgccagttcgtctggaccgcccttaatcaggcggaacgattcctcaaactcgtctttcggaccggtgtagtagagacggccatcggtgatgtaggtaatgaagtcagcagcacgttcgaggtcggcagtgatatgggtgctgaacagtaccgaatgttcgccatcctcaatgtaggcatgcaggatatccatgagttcgtcgcgggcaagcacatcgagtccgctggtcggctcgtcgagaatcagcagtttggcgtcatggctcaatgcgatggcgagcatcagcttcatctgcatgccgcgggaaagatccttgatatgtttcttgccgttctgtgcaccaccaagaccgaaagtatccagatacttgcgatagcatccaccgtcccatgatggatacagtggcgcgacaatacgttcaatgttcttgacttgccactgttcatgcatgtagctgaagtcgaacaccacgccgagttgttctttgacgggctcctcgttggcgatgttgtcgaggccgagcacgtgaatcgaaccggcgtcgcggtggatcatgttgaggatgagtttgatgagggtggatttgccggcgccgttcgggccgatcagtcccatgatgtagcccttgggcaggtcgaaggtcacgtcgtccagcgtgaagccggaatcatagtgtttggtgacgtcggtgacctgcaacgccatcgcgtcggattcggatatggcggtcatggccatggtcctttcttgaggttatttcttgcggtattcctcttcgagcatgcggtccaatgcgtccagcggaatgccggcggctttggcgccccggcttgcctcggccaggctttcacgaatctgggtttcgagctgacgttgcatcagttcgttgcccttgtccatcacgaaagtgcctttgccttgaatgttctgcaccacgccctcatcggccagttcgttgtacgccctggtgacggtgagtacggagatgcgcagctccttggcgagtttcctcaaggaaggcagggcctcgcccgccttcaactcgccactgagcaccgccgaatggatttgggttttgatttgctcgtagatgggttcaccggacacggatgagatgatcagtttcacctatgcccctttcgattgtggttgactagcaccccagctgtttagctgttatacaacacagtataactgttctgcttaactgtcaaggtgtgttacataacagctaaacagtgaacaaacaccttgccaacatacagtgtcgaaacatgggccgcgcctacaatggcctcgggaaggggcacctatgccaaacaacgccgttacgccgacagccccgccagcgggggtgtaacttttttatcacagcacgcgcggggcgtcatggaagtcgaagagaacaccgtcggccaggtggcagatttcgggccagtcggaggcggaggagtcgtcgtgcatggcccagaccttcatgccgactgatttggccgacttcatgccgaccagcaggtcttcgaacaccgtgcagtcggccggtgcagcacccaggcgcttggcggcgagcaggtagacgtcgggctggtccttgccgacgtcgttcgcgtcatcgacggagacgatatcgttgaacagatcgaacatgccgacgtggcgtagcgccggctcacgcagatgcgggggcagcgaggtggcgacacccagtttgacaccggaggctttcagatcgcgcagatagtcaagcgcgccgggtttggcttcgaccgtggtggaataggcgacgctggccatgtcgtcccattcctgcatgagctcttcgggcgtgtctgtaaggccgaagcgtgcgatggtgtattcggcgatctggcggaattgcatggcggagactttggtcatgtagtcgggcggcacttcgattccgcgcttgttcaggaagtcgatgtcgacttggtcccagactcccatggagtctaggagggtgccatcgaggtcgaatatggcggctttggtcataggacactttccttcaacagttctcgggcgtggtctagtgaggcttcggattcgctgccggagagcatgcgggcgatttcgtggacgcgggtttcgccgttgacttcggcgatggtggtgaccacgcccaaatcgtcgtcatcggcatccggcggctccttggtgaccacgaactgcgcgtccgcccacgaggcgacctgcgccaagtgggtgacgacgatgacctgcgcgctgcgggccagccgtgccagacgtttgcccagttcgaccgcggccttgccacccacgccggcgtcaacctcgtcgaagatgaaggtctggtcggcaccgccgcgcgtgtcggcggccaccagctccaaggccagcatcagtcggctcagttcaccgcccgaagcgcttttgcccatcggcaactgcggcgacccctcgaacggcgtaaacaggaacgcgatatcgtcgcgaccatacgggccgagcggatcatcggccttgtctcgcggcgtgacgcgcacttccaaggaggcgcccagcatggcgagcgagccgagttcttcagtgacgcgcgcgcccaagtcggcagcggcagccacgcgcgcggcgctcagcacgtcggcggcggcgagggccgcatcgtacagcgtctgccgttcggattcgagttcggcgaccttttccggcgaggcgtccagatcctccaaatcgaacgccgccttgtcccgccaagcgagcacgtcggccaaggtggggccccaccgacgggtgaggtcgccaagctcgtggatacggccgttgatctggtccagatcctccacgctgccttcgtcgcccagctcctggctcagggcgaacaccacgtcgcccaaatcggcattgatggattcaagccgatcggcctgctcggcgaacgtgccgccgacgcgaatcgcgcgcaacgaggccaccgcatgattgatgagttccacggccgaagcgccgtcggcggcatccacatccacctgcgaggcatccagcgcgcccagcgccgaacccacgccttgggcgatgtcggccgcgttttcgatgcgttcgcggcacgctttcagctcctcgtcctcacccggctgcgggtcggttcggttgatgcggtcgatggattcgcgcaggtagtcggcctgttggcgggcagaggattcctgcgagcgcaggcgttccagccgctcatccatggcggccagcgcatcccacgccttgcggtaggcggccagttcggcttcgtctccggccacccggtccagaaactcgcgttgccgtgcggcggccgcgattttcagctgatcggtctggccatgaatggtaaccagttcgccggcgatggcccccagcaccgaacgcggtacggacttgccgccgagcacggcccgcgaacgtccggaagcgcgtacggtgcgggaaaggaacagttcgccgtcttcggggtcgacgcccgcgtcatgggccttggccacggccacggcagcaccggtgaacccgctgtcggcatcgtcaccggcatcgttggtgtcgccggaatgttcagatgcgacggcatcatccgagagcgcgaaaatcgcctgggcccaagcctcgtccgccccggccgagacgcgcgaggattcggcggccccaccggagaccagtcggatcgcggagagcagcatggatttgccggcgccggtctcaccggtgatggcggtcatgcctgcggccggcgcaatggcggcttctcgaatcggtcccagattgcggatatcgagttcttcgagcatcaggctcctgccttgccgtcgcgttcgcccggcttgtcgggctcggtaccagcgacgccagcgtcaccggcaacgccagccgcatacgcggccgccgggaacgtgtgcccgtgatgcagcggctggctcgaggcctcgttgcgcgcatgctcgcgccaaccgaccacgggcagatcgaacttggagaccagacggttggtgaacggcatgccggagagtcgagcgaggcgcaaggtatcgcgcgattcgcgcaccatgacgcgcgtaccctgcggcagggcgcgctggcggcgtccatcgcagcaaatccagccttcggacatggattcgttcagaatatcgatggtgaaggtcgagccggagccgatgatcagcggcctggcgaacagggcgtgcgcggccaacggaatcaactgcagggccttgacgttcggccacatgaccggaccgcccgcggagaaggcgtaggcggtggaaccggtgggcgtggatacgatgacgccgtccgcgccgaacgagttcatctccacatcgtccacgcggatggacagttcgaccatcttgcctcggtcggcgcgttccagcgtgatatcgttcagcgcccaatcctcgatgggcttggtggcaccgggcagccagacgtccacatgggcgatcatgcgttcgtcgatcgaatagtcgtgggtggcgacccggcggatcgcctcgtcgatctggaagctttcgaattcggccaggaagccgacatgccccatgttcacgccgagaatcggcacctgggtgcagtggacgagttcggcggcgcgcagtatcgtgccgtcgccgcccaggaccacgacgatttcggtgtcgtccgacacgcacggcggctgcacaccgaaatcgggggcctcggtgttgtcgatgatggtgacttcgaaaccggccactcgcagctggctcaccgcctcggccactacggttccggtctgcctgagcctggtatgcgtcaccaccaccgcgttgcgcttggccatggcatcctcctgtcgattcggtcgcactgctcattattctagccgcagacaccgtcatcactcgtacaggtgttcgaaaaatgccgcttcgtggcgcgtcgccgacaacgttccgcagagtcgattaacgtaaggcttcggcatacaatggcatacagtcgcgcgatcaccgtacgcgtgccgtgcgcagcgcgatggcatgccgtatgaccatacagcagtatcagttgaggagcttgaggacccatggccaatgacttcgacgaatcctccgccaatgaggaggcctcgaagggcctgtcatggtggtattcggccgatgtactgagccgagacaaaagcgataaaaccgccaagcgcattcgccgcatcagcatcaccgaccgtctgctcaggcacccgggccgtgtgtccatggtgtatttcggcgcactgatcatcatcgtcaccggcttgctgctgctgccgatctccacatcggacatcatcttcaccaacttcccggtcgcgttcttcaccgccgtctcggccctgtccacctgcggcattccggtggtgaacaccggcgaatactggtcgacgttcggccaagttgtcatcctattctccatccagttcggcggcctgggcgtcatgaccttcgcctcgatggtggctcttggcgcttcccgcagactcaaggtctcccagcgcatgcttaccgcgaacgaactgggcaccacgaagctttccgaggtcaaaggcgtactcaccgtggtattgggcacctccatcatcgccgaggtgcttaccttcgtgctgctgctgcccgacctgttccgcgtgaaccacggcaatatgggacgtacattgtggcaggcgctgttctacgcggtatcggcctacaacaacaccggtttcacgcctgacgccaccggcctgcatgtgaaccgttggggcgtgggactgccgattctcatcagcgcattcataggaacgctcggcttccccgtggtgctgaatctggtgcagtgcgcacgccgacatctcagcccgaaacgttggacgttgcacaccaaactcactttggtgaccaccgctgtgctggtggccacctcactggcttggttcctgctggtcgagtggggcaataccggcctgttccccgcagacggtcccggcatgaagatgcgccgtgcgatgagcgccgccgtcatgccccgctccgccggtttcgatatttcctgggtgcccgaagtcacgaatgagaccaaggtgttcatgagcatactcatgttcatcggcgcaggctcctcatccaccgccggcggcatccgtgtcaccacgttcgcggtgattctcttgatttgccgcgccgcattcaccggccatcgcgatgtcaccgtgttccgccgccgtatcccccgccgcgtccagatgaccgccgtgtccgtgaccacggcctgctttgcgctggttatggtcggtgcgatgatgctgatgttcaccaccggctgcgcattcgtggacgccgtgttcgaggcctgctcggccttctcgttgggcggttattcggtgggcgtggcaagcgccggcaatccggccagcctgtttattctgtccgccgagatgattgtcggacgacttggcccgttgaccatcgcctactccatcagcagaccgatggctcccgaacctattcgttatccgcaggaaaacattatcgttggctgatcgtccattcaatcggcacacagaaatccggcatagagaggaccatcatcatggcagcaaaaccgagcggcaacaaaagcgtgctggtcatcggcctgggccgtttcggcgggtccgtggccgccaccctcgaccagatgggtcaggatgtgctcgccgtggataagaacccggagcttgtggcccgttggtccgcgcatctgcccaccattcaggccgacatgaccgatgtgctggccatcgagcagatcgacgcctcccagttcgacacggccgtcgtggccatcggcgacagcatcgaggcttcggtgatcatcaccggcaacctgctggatgccggcgtttccgatctgtgggccaagtccgtgtcccaggagcatgcgcgcattctgcagcgcatcggcgcccgtcacatcatcaatgcggagaccgatgccggcaagcgcgtgggtcatctggtggccggcaattatctggattacatcgaaatcgacggcccgtacaccgtcgtcaagatccacacgcccctatacgcggtgggtcgcagcatcgaggacgtgcaggtgcacgacaaatacggcgtgaccgtggtgggcctcaaggccccaggcaaggagttccagtacggctccaaggaactggtcatgcatcgcaacgacgaactcatcctcatgggcaagcaggatcagatcgaccacttcatccaaggctaacccccccctaactgcgctcgctataccccctatctgctcacatcgtgaccgatataacccccctcaacatggatgcgctcattattggggcaataagccataaagctgtacgtccatattgagggggctttatcatcatggacaagcatacgcagaattgcacgttgataggcaaaggagtctacggcaccataggagtggaccaacgttcccgtcttgccgatggcgcgcattttcacaccatgattgtgaccagcaccctcgaggcctcagttatagaaggggacaaactggtcatcaagagtggcattgtgcggtgtgatggtgatattcgcgtatccagcatcagcggcagcggcgacatcgaagtcggcggcgacattatttgcgatgaaataacctttaccggcaaactgcgatgcaacagcgatatcgtttgttccggaaatctgtccgtcaatggctccctaggcacccgtcatattagcggtcagacagtccgcttgaacggcgtgttgaagggtcatgacgtcaacagcagggctctggaagttcatccactgcgcagtacgatgttttctcgttttgatatggatgggtatgaggatggcagcatggttcgccatatcacagccgtcacggttgaagccaaccatctgcaatgccggactttgacggcggactccgccatgctacgcaacggcagtgcggtggaaagcgccacgtgtgccaccgcaataggcatcgaccgtacctccagcgtgctgctggtgaacggagactgccgacgcattcatctcaagacagcgtaaagcaggtattcctcattaccgtgggtgccgatgatgggactatcggcagtggccaccacgtcaagtccgtgctgttcagcacaggcgaccacgtcgtgcaatgcccgctcccgcaatgccggatcttccacgatgccgtttttgccgagtcctgcccgcccgacctcgaactgcggtttgaccagtaacacaatctgcgcaccgggagccgcgatgcgcgcgattaccggaatcacataggtcagggaaataaaggagacgtcggagacgatcatcgccggccggtaaggcaggtcgtcggcctctacttcgcgaatgttgacgccgctcatttcgatgacgtgctcgtcattggcgatgcgcgggtcgagctggccgtggccgacgtcgagcgccacgactttggccgctcccccgcgcaacagtacatcggtgaagccaccggtggaggcaccgatatccagacattccaagctttccggcccggtaaggccattgccggcaaaggtctcgaacgcgcccaagagtttgtaagcgcctcgggagacgtagtcgtcgcccttatccacggcgagttcgctgtgcccggctttgaccatgaacgatggcttggtgatggtctcgccgtccacgcgcacatgcccggctttgatgagtcgctgcgctttggcccgcgattcgaccagtcccgaagccacgagcatcatgtcgaggcgatcaagtggggtcgcgggatcgatatgttgctcggtcatataccttcctttcgacccaccatccaccaacggggtggctcggcatggacccaccatccagcacttcacgtcatcttccgctggcgggagaatgaatctcctctgctagctgcggctgttatcaagctcgtgttgtaacgattccagcacgttgcgataggtctcaagcttgcggtcgttgtcttgttcatcaatatccgcaagttcggggtatcgctcggtgaccggcgcgtgttcgctatccgtaggcataggactatgcctcgatggcgaacaccggtaccgtggcctcgctgagctgtgcgccttggtcggcggcttcccatgcggcgcatacggcggcacgcaggccgtccatactggtggggtcgctgacgtgtacctggccgttttcaaaccaagcgctagccttgcggcattcccaagtaccgctctcgtcgcggaccggctccggttgggctttgccgagttcacgcagatcaagggcgatgaatgtgggcctcaggtgtgccggagccagcatcagttcggtcgggttggtgacaccggtcagcaccgccagcgaatcatagtcaccgcggttaccggcctcgatatcagtgtcgagtcggtcgccaatggcgatggacgcctccttgggcaccagatcgtggccttcggcggcgttcagttcgcgggcctcatcgtacatgtacgcttccggcttgccagcggaggcgaccggttcgacgccagtggccgtgatcacggcgcgaatcatcgatccgcaaccgggggcgatgcccagttcacgaggaatcgtcaggtcgcggttggtcacgaaatacgtggctccggcctcgaccgcgaacgcggcatcggccatcacctgccaagtcatatccggataccaaccctgaataacggcctgcgggcggtcctgaggaccgtccacgatggtcaggccgttgcgggtgacctcatcgcgcaaatgctcggcgcccaatacctgtacgcgcgcgccggcgggcaacgccttggccaccacacgggcggccaccaccgaagaggtgatgacctgccacggctccacgtccaagccgaagcccttgagctggtcggccaccacgtgctggaagcgcgaggagttgttcgtggtgtattcgatggtcatgccggcggcttcggccgcacgaatggaatcggctgcgtattcgaccggattcttgccgcgatacaccacgccgtcgaggtccagcagcgcaagctgataggcctcggcgagcgggcgatcggtgcctttgaggaaacgggtcattacgccgctcattcctcggtttcggtctcggtctcgtcggactcagccggttcaacggcatcgtcagcggactcggaagactcctcggcttcagattcctcagattcttccgatgcctcctcggactcagcattttcgacatcggcctcatcagactcggcatcgccgtcttcagcctcgtcgtcctcatcgccgtattcctgctccggatccggggcgtactgcgcctcgtccggatcgatgccgagcttctcgagcacgtcggagtcgtcggtgatgtcttcgagatcgtggtcaatcaccacgtcgtcgctgttttcgtcaatctcctcgtcggcatactgatcctcaagacggtccagcaggtcattaagctgctcggcttccttgctgcggccggcctcttcaaggaagtactgctcggcctgcacggcacgcatacggtactcacccggaagaccctgagagcggccgacggtatgaaccacttcaatggccttgtcccacatctccaaatcgccaagggcaccggcatacaccaggaacatctcgaccttgggagcgccatgcagctgcttgccctcatcggacagcgccagttccacggccttcttcggttcaccgacaccacgctcgcagtcagcgatgaacggcaggtagtcgaggaagccgttcatacggtaggcggtacggaactcacgcagggacagcttgtagtcgccctgacggtaggccacgaacgcgagcgtctcgcgggcaaagtcgatgcgggaggcctgacgggccacccacttggcgtgctccaaggcaagttcgggatcgctctcctccagcgcgaaagcggcgaggatgtgcagaccaatgttctccgcatgctccttggacaggccgcgcagacgttcgcgctcatccttggacagcatcgaccattccatgcccttgggcatcttgggctcgtcgggacgacggtcggtgtacgggttctgcgaggggaagctcatcgtgccgtcggagttacggcgcggacgcctcatgtattcagagcgcttctcctcacggtactggcgcttctcttcctgcgaaaactcgcggaattcgccgtcacgacggttgttgtcgcggcggtcgtccctgcggaagttgcggcgatcgccatcacggcgatcgtcgtcgcggcggaagttgcgacgctcaccatcacgatggaaatcacggcgatcgttatcccttcggtcatcgcggcggaagtcacgacgatcattgtcacgacggaagtcacgacgctcaccatcgcggtggaagtcacggcgatcatcgcgacggaaatcacgacgatcgttgtcacggtgctggtagcgcgggttctcgccgttctcgccttcgtgggaacggtagccgccttcgcggcgcggcttgaaaccttcaccgtcacggcgcggaccactgccgcggtaaccacccttgtggaagccaccggacttgccgtacgacttacggtagccgccgtggccctcgccatcaccatcacggcgcggcgcgtaaccctcaccatcctcacggcggcgcggcttgaagccctcgccatcgcggtcgcggtgcggacggaagccgtcgccatcgcggcgcggaccgttgccgcgatagccgcccttgccaccgaaaccagagcggccgcccttgtggaagtcgccacccttgccgtacgacttgcggtagccgccgtggccctcgccgtcaccatcacggcgcggcgcgtagccttcgccatcctcacgacggcgcggcttgaaaccttcaccgtcatgacgcggcttgaaaccgcccttgccgcgcggcttgaaacccttgccgccgcggttgcccggtcggcgatcgccataccccttatggccgccgccgtaggacttgccggaacgctcgttaccttctgccattacttgttttccttaattcgttgttgattaacggttttccacggcgccgagcgccttcttgccacgacggatgagcgcgaagcggcctgccaggaagtcggcttcggccagcacctgctcctcatcctcgatacggttgttgttgagatacacgccaccggacttgatggcgcggcgtgcctcggaagcggacttgaacagtccggcagcctgggcggcgtcgattacgcgatcgcccggcttggagacggggaaggcgtgctcgccgttctcgtcgaccaccttgaagccgtcgagcacggattccagcgtttcctcgtcgatgtcttcgaggttgccaccgcggccgaacagcgcaccggaagcatcgatggcagcctgggtagcggcctcgccatgcacgaagctggtgacctcccaggcgagggtcttctgggcctcgcgcttgccggggttggtcttggattcctcgaccagtcgttcgatttcggccttgggcaggaaggtgaacgccttcagcaggctttccatctccacgtccgggcggttgatccagaactggtagaacttgtacgggctgagcatcgtggcgtcgagccagacggcgttgccctcggacttgccgaacttcttgccggaagcatcagtgatgatcgggctggtgaacacgttgacgtccacaccgcgcaccttgtggatcaggtccaggccggaggtgaggttgccccactggtcggagccgccgagttccagcgtgcagtggtattcgtcaaacaggtggagaaagtcgttgccctgcagcacctggtagctgaactcggtgaaggagatgccttcctcagagttcaggcggcgggcgaccgtgtccttggcgagcatggtgcccagacggaagttcttgccgacgtcacgcaggaagtcgatgacggtcatcgaggcggtccaatcgtaattggacacgaaacgtacggcgttcgcgccttcggtgtccagaatgccgccgatctggttcttcagacgatcggcccagccggccaccacgtccttcgggttgagcgtgcgttcgccggactggcgcgggtcgccgatgagtccggtggcgccgccgaccagggcgattggatgatggcccgcaagctgcaggtgacgcatgttgatgagctgcacgaggttgccgatatgcaacgatgcagcagtggggtcgaagccgcaataataggtgatgggctcgccgttcagtgcttctgcgagtcgatcccggtccgtggactgggaaatcaacccgcgccattccagttcctcaagcagggtgttgaaacccgcttccttgaagtcggtgacgtgagccatagcttgtcgcttctccctatcgaattgtgaatgagactgcccaattgggcacagtcaagtttcgcagaacatggcgacagtgccgaacaccagccgagccgcgcgattcagtaaaacaccttattctagcggcgcgggcccataagttcgcgcaaagagtcgatgatatcctgacgatccggcacctggaacttcgggaaggacttgagcatacgcttctgctgtgcgttgatgacgccattgacggcccagcgcagacgctcaaccgtatcctgcgaaaactcacgcatcctgtcggataccgcactggagccccgctgccacgtgccaccggcgcgtgccgccacatcctgcaccacctgag

SEQ ID NO: 1179 - DNA, 8614 bp, Unknown
  R81_24m  MAG No. k141_14693
accatcgaggcccttgtcgtcaccaaggaagacaaggaaggccgtctgattctgtccaagaagcgtgctcagtacgagcgtgcttggggcgacattgagaagatcaaggaagctgacggcgtcgttgagggcaccgtcatcgaagccgtcaagggcggcctcatcgtcgacatcggtctgcgtggcttcctgcctgcctccctcgtcgaaatgcgtcgcgttcgcgacctctccccgtacatcggccagaagatcaaggccaagatcctggagctcgacaagaaccgcaacaacgtggtcctgtcccgccgccagtacctcgaggagacccagtccgaggtccgcgagaccttcctgtcccagctcaagaagggccagattcgtgagggtgtggtgtcctccatcgtcaacttcggcgctttcgtcgatctgggcggtgttgacggcctgatccacgtttccgagctgtcttggaagcacatcgaccacccgtctgaggtcgtcaaggtcggcgacaaggtcaccgtcgaggtgctcgacgtcgatctcgaccgtgagcgtatctccctgtccctgaaggcgactcaggaggatccgtggcagcgcttcgctcgcacccacgttcccggccagatcgtcaagggcaaggtcaccaagatcgtccagttcggtgtcttcatctccgtcgaggacggcatcgagggcctggtgcacatctccgagctcgccaaccgtcacgtcgagaacccggagaccgtggtcaagccgggcgaggccgtgttcgtcaaggtgatcgacgtcgacctcgatcgtcgccgcatctccctgtccctcaagcaggccaacgactccgtcgacccggcttccgaggacttcgatccggccatctacggcatgccggccgagtacgacgagcagggcaactacaagtaccccgaaggtttcgacccgaacaccaacgagtggatcgctggttacgagaagcagcgcgaggagtgggagtcccagtacgccgccgctcacgagctgtgggaggagcacaaggagttcgtggccaaggagctggagaacgctgccgaatccgcagccgccgacggccagggcccgaaggaagagaagccggtcgaggagacctccaactactcttccgctgctccggctaccggtaccctcgccgactccgatcagctcgccgccctgcgcgaccagctgctcggcaagtgagttcgccatcgggcgactgacgcctggcatatagtcaaaacccggtctcgcttcggcgggccgggttttgccgttgtgtgcatgaacctcgaaacatggccatgatgggggagcatgattcgaataggattgaccggtggtattgcggcgggcaaaagcacggtgtccgcaagactgcgggagctcggcgcggcgcttatcgactatgacgagctcgcgcgccgagtggtggaaccgggcggcgtcggtcttcgtcgtatagcggaatgtttcggccccgacgcgctgaccgatcaggggcggctcaaccggcgatggatcgccgagcacgtgttcgccgggcccgactcggaacggttgcggaagaaactggacgatatcgagcatccgttgatctatgatcttgcgctgtctcgggagcggcaggcggtcgcggacaatccggatgccatggtcgtgcatgatgttccgctgttggcggaagtcctggacgccatgcccatgcgattcgaccatatcgtcaccgtcgaagcgcccgaacaagtacgggtcgacagaatggtgtcgacccgcggcatgacgcgagatgatgcgcttgcgcgcattcgccaccagtccagcccggaacaacgccgtgtcatagccgacgcggtgatcgattccacgcagccgatgggtcgaatgctcgaagccgtcgatgcgctgtacgaacagtggctggcggaatcataatgcgatgatgcggtcggcgagggccgcggtctcctcgttgtgcgtcgtgtagatcacgatcgctccgttgtcggcgaaatcacgcaggtgacgcatgaccatggtgcggttgtcggcatcgagggccgctgttggctcgtccgccagtatgacgcgcagcgattgacggatgagaagcctcgcgattgcgactcgttgttgttcgcctccactgagtgtgtagataggtctattgccgtagcccgtcagattcacggcccgcaatgcgcgtctgatgagccgacttctatctgccgatggtattccgacgctgcgcagagccagaatcagatttctgttcaccgtccattgctccaccagggcgtaattctggaacatgaatcccatgacgttgcggtgcatgagccgtcggccctttctggaggcaattgtttgcccatcataggtaattgttcctgaacttggctcttccaaaagacctaggacattcaacaaagtggttttgccacatccgctttctccggtcagggcaaccatgtcaccgggactgaatgtcaggttcagtccttcccataaggtgcggtcgtcgattcgatatgtcagattatgcgtgatcaataaggcgctcatgcttgatgttccttacgtggtaagcggttgctgatacaggtttgtggatggcgatcagggatgtttgatactgtcggcgcgcagccgcgaatcgtaaagcactgtggttgccagcgaaacgacgatgaatagtaaggaaaccgaggtcgtggaaacggcgttgtaacctcctatgagcaactggatcggaagagatgcactgcataacgccgctgctaggaacagtatcgattgaaaacggagatatgacggcgctccatgcatatattccacgaacataatttgacgtcggagtgtgcatagtgtcaaagccaccatgattgcgccgcccagcagacatgttatggatatgcaagctgtgatggaaaaatagttcatttcctgagttgttcgtgccaaacgagtttgtatctcgtcgtgccgattgacgaccgaagccaccaaagagtccacgcccttttcccgtaggatttcgagcagctgatggcgggagctgtaatcgaaggtcatgccgccggtggacaccatcgatgtagtggtatcgccagagagcagtgacgggtcaatgacaacaacaggaacagaggaaaggccatcggtgttggaaggggtgtcaaatgccgataagacagcatctcttggtctggattcaatggagatgctcgtgcgattgatggcgggcagactctttccctcttctgccgccaaactttgctcgaatgagtatgcgcgaagcacattgttcgtaatggattcgctgttccattgttcattctcgggcataatcacactgattcgtgcaagtgtcgtgttgtttcgtataagatgatgaagccttgccgtacgggaatccatgaggatgcagggctgtgggtcttgcgagctatccacccacgtgcatcctagccggaatgaggcgaatcgcgtatgttctgattgggaagtttgttcgacgaagtcgttccatgagggcatggaacgagctcggttttgatcgctgctataccacagttgcaattggaatccgtcgttggatgacaattgatgctccaatgttgttttcagtgtttgggattgccgccatttgaagttcgtaacgttcaaactggcagagctgagagcgagaacgatgattgccatgatgcagccggaagccatgagaaaacgtaaagggcgctttccttggattaatttgagtgcgttcggcaccagaacccttactagagcaatcgacaatgacaaggcaaccaatgccatgcacgttgtggcgatgatgatggagaggaatacctgaccggcgaatcctaagggagaagcgaaaggccagaagatcgcaccaatggaaatccaagtcatccatccgatgcagacgcagatgatgaaaaagaacgcatgccgcaggaattgcctcataataatgccggttgttctcatgccatgcaaggcttgtatcgcgcaaacgcgtgaagctgtcgacacggaaagcgcgccggacacaaatactacagcaagtccggcgaatatgacttgggcgatggaattggagaagaattgtttggtgatttgtgtgatgccgatgggggttgctctgttaagttcgaatccttggcgccgtatggatttggctactgaagcggtatcccgtggtgatccatagagaagccatcttcccaatgggtcggtgaatctgtctccgcgttgcacacgtgtgcgcggcccgaacccataatccgggtatggcgaattcgcatgcatgccgttgccgtctaatgcgccgaaaatagaaattacgcgtctgttggtaccgtgaccgtccggctcataggagactctcgcgagtacgacatgatgggtcgctgcgagaccggtcaatgtcgatagaggctgcccgtgcgcgtcggaaattccaatatcgtagctagggccggagggataggtttcttcgttattctgcgcatagaatcctgctgcgagagtgatgagagccacggccaatatactggcgattttataagtccagtgcatgatacaccttattcccggtaacaatgtgtttgtgcggcggacgataggaagttcgctcgccgcacattattgcgcggctgttttgccgcatataacacggtaagacgccaatgaggagcgaacgaagtctgtgtgacgggaatcgtcacagtgttacgatttcgtttgacggaggcgattcggggagggggtacttatgaagaacgggcgcctgattcggcttgccttggtggacaacgatcgttgctctgcggagatgatggctttgcttattggcaggacgattcccgaggcgcatatgctatgggttacggataatcccagtcttgccttggaacgttgtctgttcgatccgcggaagccggacatccttatttgcgatctcatgatggacgggctgaacggagtgcggctgacggaacgtattcgacagcggaacgtgcaggttggcgtcatcgtagtcacttcgtatgacctggcaacctatggtgaggatatcgcgtgttgcggagcccaagcgttgatttcgaaaagagatttcgcagcgaccatacgcgagacggtcaaattggtgtttgacgggggaacataccctcatggttggggtttgcatagccttgaagagacattgcatacggtggatgccgcacagccggaagcggatggtgccaggctcttctccgatcgagagctggcggtgttgcgtctctatgcacatcatgtaccgaccgttgaaattgcgcgccgcttgggaatcggtgtcgaaactgtgtacagctatgtgaaacgagccatgcgcaaggtcggggtgacgaggcgcggcgaactccttgattactgtgagcgataccatgttctgtgacggcagccgttttcttagacgtcgcttccgcgatttcgggaagtcttggcatggcgagaagatcgcggcgctagcctgcgccttgtgcatagccgctgatacggtcatcgaatcgtgtatcaatccggtttgggatgcgtgggccctgtgggtgggtctgttgttcgtcatcctgtcgttgctctgcgtggcattcccgttcggcggcaatatcgcgttggcgatctcatggtgcgtggtgttccccttgccggtggatctgtccatgtcggtgagcgtggtgatagccgagccattaatcgtcctctcctatcaacgcatatggtgcggcgtggtgttggcggtgactgtgaccgtatctcgcgtggcgcagctgatatggcagtatgggttgccgatgggttgggatgccggggcgttggtgtccgttgtgccttggaccgtcatgccggcgttggcgtgcgttggaatcggtctgctgctgaattggcatcatcgtgagggggagagggagtcggaagcgcgtggcagggccgaatcgttggatttggcggcaaggctgcatgatgcgacgaccaatgatctctcatatctcatcatgagcatcgacaggatcatgtcggaacacccttcgcaaggagagtcgatggacttgccactgttgcgcgaagtggctcaacgggcgctcgatcagacgcatgatgtcatagcggttctcgcaaagcacaatgtcggtactgcgcgaatcccgcgatgccatgcgcgtcgctccggagaagccattgttccgatcggtgcaggtcgattcgaggccgagatcgaacggcgccggcgggaactcgcaacgcttggtttccaaggcgaggtggttgtgtccgatcccttcgatctcctgagtcggtttgacgagaagactatccagttgacgcggtcgttgctggaagagacgtttgccaatatcgccaagcacgcggatcgcgaacaagggtatgtactcgccatacaagtgcggcaagacggactgtacgtatcggtggctgacgttcccgccaagatggcggatggagcattggcggaatctccgagaacattgggcatgggatttggaatgtctcatctgtgtcaatcaattacgcggagcggtggttggctgcgcgtccaagaggaagacgggtattggagttgcctagcgtatattccgatatatcatcgggatacagcgtgaatcggaaggaaacagcgcatgggattcaacatcgaacgtgtggacaagccgtttgtggtcaaatcgccgtaccgaccatccggagaccagccgaaggccatcgaggaactggccacgcgcatcgagaacggcgagaacgacgtggtgctcatgggcgccaccggcaccggcaaaaccgccaccaccgcatggctgatcgaacggctgcaacgtcccacgctcatcatcgagccgaacaagacgctcgccgcgcagctgtgcgccgaattccgcgagctcatgcccgacaacgcggtgagctatttcgtttcctactacgactactatcagccggaggcctacataccgcagaccgacacctatatcgagaaagactccaacatcaacgacgatgtggaacgtttgcgccatcaggccacggccaacctgctgaccagacgcgactgcgtggtcgtggccaccgtctcctgcatctacggcctgggcactcctgaggaatacgccgggcgtatgctgtttctcaaggaaggccagcagatcaatcgcgacgacctgctgcgccggttcgtggccatgcagtacaagcgcaacgacatcgccttcacgcgcggcaccttccgcgtgcgcggcgatacggtcgaaatcatccccgtctacgaggaactggccgtgcgcatcgaattcttcggcgacgagatcgaccgcatctccacgctgcacccgctgaccggcgacgagatcgacgaggaaaacgaaatccacatcttcccggcctcccattacgtggccggccccgaacgcatggaacgcgcgctcaaaaccattcgcgaggaactcgacgaacgcctggcagaactgcgtaagcaaggcaaggagctggaagcgcagcgcctcaacatgcgcaccacctacgatctggaaatgctcacccaggtgggcgtgtgctcgggcgtcgaaaactattcgcgccacttcgacggccgcgccgccggcaccccaccgcacacgctgctcgacttcttccccgatgacttcctgctggtcattgacgaatcacacgtcaccgtgccgcagatcggcgcgatgtacgagggagacgcctcccgcaagcgcacgttggtcgaacacgggttccgcctgccctccgcgatggataaccgaccgctcaaatggccggagttcctgcagcgcgtcggccagaccgtgtatctgtccgccacgcccggcgactacgagttgggcttgtccgacggggtggtcgaacagatcatccgtccgaccggcctgctcgatccgaagatcgacgtgcgcccggtcaaggggcagatcgacgatctgctcgccgagatcaaggcccgtgtggccaggaacgagcgtgcgctggtgaccaccctgaccaagaagatggccgaggacctgaccgactatctgctggaacgcggcatcaaggtcgaatacctgcattccgacgtggacacgctgcgccgcgtcgaactgctgcgcatgttgcgcgaaggcaagatcgatgtgatcgtcggcatcaacctgctgcgtgagggcctcgatttgccggaagtatcgctggtggcgatcctcgacgccgacaaggaaggattcctgcgctcctatcgttcgctcatccagaccatcggccgtgcggcccgaaacgtgtccggcacggtgatcatgtacgccgacgaaaccaccgaagccatgcggcaagccatcgacgagaccgaccgacgccgcgccaagcagatcgcctacaaccaggagcacggcatcgatcccaagcccctgatcaagaagatcagcgatgtcaacgacatgctcgccaaggaggatgtggacacccagaccttgcttgaaggtggctaccgcaacgcgggcaaggccggcaacacacacctgggcgt

SEQ ID NO: 1180 - DNA, 11426 bp, Unknown
  R81_24m  MAG No. k141_14725
ggtagatcatcatggagaacgcatgggtgttctgccaatcgtccatatccatgatggaaccggtgtggtcaaaccattcgacctgcggaatcgtgttggagtcgtcgcccggttcgcggccggtgaagaaacgacgacggtgcagcaccggatgttccaaacgcaaatgaatgagcttggagacgaacgcaagaagctcttcctggttcttgtcgagattccaatcggtccacgaaatctcattatcctggcagtacgcgttattgttgccctgctgggtgcgggccacttcgtcgccaccgcaaatcatcgggataccctggctgaacagcaacgtggcgaacatgttgcgcatctgacgctgacgcaagtcgttgacgtccggaatattggtcgggccttcaacgccgcaattccaagagcgattgttgctctcgccgtcgcgattgccctcgccattggcttcgttgtgcttttcgttgtagctgaccaagtcgttcatcgtgaaaccgtcatgcgcggtgatgaagttcacggacgccaccggtcgacggccgttgacctgatacagatcggaactgcccatcaggcgcgaggcgaattcgggcagcgtggagggctgcgagcgccagaagtcacgcacggtgtcgcggtagcggccattccattcggaccagctggacgggaagccgcccacctgatagccgccggagcccagatcccacggttcggcaatcagcttcacgcgcgagatgatcgggtcctgctccacgatgtcgaagaacgcggacagcttgtcgacctcctggaactggcgtgccagcgtggcggccagatcgaagcggaagccgtcgacgtgcatttcggtaacccagtagcgcagcgaatcggtaatcaactgcagcgcgtgcggcgagcgcataagcagcgagttgccggtaccggtggtgtcgaagtagtgctgctggtcgccttccaccagtcggtagtaggaggcgttgtcgatgcccttgaagctcagggtggggcccatatggttgccttcggcggtgtggttgtacaccacgtcgaggatgacctccatgccggcgtgatggtaggccttgaccatggacttgaattcgttgacctgctcgccgcgttccccggaggaggagtaggcgttgtgcggcgcgaagaagccgatggtgttgtagccccagtagttcgacaggcccttctcctgcaggaaggagtcgttgacgaactggtggatcggcatgagttcgatggcggtgacgccgagcttcttcaggtattcgatgacgctcggataggccaggccggcgtaggtgccgcggatgtccggcggcacgtccatgttgaggttggtcatgccgcgcacatgcgcctcgtagatcaccgaatcgtggtacgagatgtaggggtgctggtcgttgccccagtcgaaatacggattgatgacggccgacttcatggtgtgggcggccgagtcaaggtcgttcatcgccgaggtgtcgtccgggcttttgaaccagtaggagaacaggctttcgtcgccgtcgatgttgccttcgatggccttggcatacgggtcgagcagcagtttgttggggttgcatctgaggccgtgcatcgggtcatagggaccgtagacgcggtagccgtagcgttggccgggctggaggccggggatgtagttatgccatacgtatgagttctgttcggtcatttcgatgcgcgtttccgcatcgtgctcgtcgaacaggcatagctcgactttctgcgcaacctgtgagtacagcgcgaagttcacaccggcgccgtcatagctggcgcccagcggatacattgatccaggtctgatctgcatagttttcagtatcccactttcttgtgtcactgatgtgccggggagttgaacgtcaggagaacagcgacggcttgtctttgtcggagttcctggcgatgagtctgcgtaacgcctcatgctggatggcgatcatcgaattggatgaggtgatgcgcgtggcggcaaggtcgctccacggaatccacgcggattccacgtgctcgtccgcgtcgaaatggcgctgctcccgtctgaacgggcccaaatgcaacaccatgatgtgggccagttcgtcggtcatgccttcggacgagtagaaatcgcccacgaagtcaacacccatggtgtcacggtccggcaccacgccggtttcctcggccagttccctcagggccgcgtccatgatgtcctcgccctcgtccatgagaccggcgggaagcccgtaggcgaacatgtccgatccggcacggtattcgcgttcgatgaggtaacggtcggtggacatgtcgtgcacgagcatgaccacacagggggcatgacgcagcacctggcggccgatctcgtgttccttgccctgcttgtcggtcagagcgatgcgcatgtcgtccacgtggaagatgcgcccggtataaacggtttcgctactgatcactttggcgggcacgtccatgtcgatgccgtccgaggaggcgttcagcttatggtcgagccgatgctccagttgttcctgcttgcttcccccaaacatgtcatctcctcggaaaaaacgttttcgccacgtcactatagcgccttaatcccgatgcgcggtaatggacagcgtccatggatcggtcgtgtcgtggaaccactcgacttcaggccttgctccggtcgcttgttcgatggcggccggcacatcatcgatcgcgtagttgaaccacatggattcgatggcggcatgaggggtgttgatgaagcagggacgcacatggctctcccccgccattccatggccgagcatgatgccttgggccctcatacgggcttcataccgggcttgttcgatggcgtcggtcaccgggtggtgacgcaaatcgctggttacgtacacgtccgcaccggtggcacgcacctcgttgaacagggagtcaccggagccaggcagaatggccacatactgaacaaaagtgtccgaatcgccgcatacctggatgccgagcgcggtggtcatgccatgatcggacacttcgtcgaatacacgctgagcgaaatccttcagggcaacaggcttcggcaaacgacccacacgccccaagccgaccggatgagaggcgttggcatcgtcaatcggcacgagtggtttctggtcgatgagtccgaagtagtcggccgccgcctgccccacgccgcgatacgcagcgtcggcattggtgtgccctacccacagcccgcagccgtgctggtagagcctgcggacgatgtcgccccggaaaccgagtccgctcgtctcgtgtacggaacggaagaacaacgggtgatgggtgatgagcaggtccgcgccggtggcgatggccttgtcaatgatggcggaggtcgggtcggcggcgaacacgatgcggtgcacgtcgtggctcagatcgccgacgatgagacccggctcatcccattcctcggcgtagcgcaatgggtacagggtctcgagaacgtcgatgacttgcttgagattcggcatatgtcccattgtagtgggctattgcggcaagggactcattctgcaattgcggacaagccatgctcgtgctcttcattgctcgactatcggctcgccttcgcctacaaacaatccactggactgtttgctcaacggctcagcctcctcacccgaggggagctagaaattgtcagtgtgcggcgagctgccagtcggaaccgataccgcacgatacgtccagcggcacggcaaggtcgacggcgtgttccatggcgttgcgcaccagttcggtgacctggtcgccttctcccggcgcgatttccactaccagttcatcgtgaatctgcagaatgatacggctcttgacgtgggcctctgccaaggtctgctcggcgcgaatcatcgcgatcttcatgatgtcggcggcagatccctgaatcggtgcgttgagtgccgcacgttcggcggcctcacgcgcaacacgattggtcgaatgcagggccgggaagtagcgacgccgtccgaaaatggtttccgtataccccttctctcgggcattggccaccagcgattcaaggtaatcgtgcaccttgccgaaggtatcgaaataccggtttttcaacgcttccgcttcacgtggcgcgatcttgagctgctgggcgagaccatacgtgctcagaccataggccaatccgtagctcatggcttttacgtggctgcgctggtcgccggtgatctggtcgaccggcagcttgtagaccatcgaggccacgtatttgtggaagtcggctccggagcggaacgcttcgatcagcgcctcatcaccggacagatcggccatgatgcgcagctcgacctgtgagtaatcgcagctcatcagggcctcgtacccctcccccggcacgaacacgccgcgaatctcacggccggcggcgttccgattggggatgttctgcaggttcgggtccacggagctcaatcggccggtggccgcgacggtttgctcgaaagtggtgtggatgcgctcatctgatgtattggtggcatcgatcagcgtttggacgatctgcttgagcttgttgatctctcggtggcgcagcaacgccccgaggaaaccgttggcccgctcattgtccactgatttgacatacagatcctgcaatgcggccgcattcgtggtgtatgagccggacttggtgcgtttggtgggcttcaaacccatatcttcgaacagcaccttctgcagctgcttgggactttgcaggttgatttcggtgccggcatactcccaagccatttcctgcgcctgacgagcctcggcggcaaactggtcacgcatggaaacgagtcgaacgctatcgactttggctcctgtgtgctccatgccgtgcagcacgcgggaaacaggaagttcaatcgcgcgcatcagccagcattgttcacgctcgtcgataatcggcccgagcgtgacggcgaggctgcggataatggccaaatcgcgcagacgatgttcgttcggatcttcttcgacctgatcgtcatcgaagtccaacgtgccttgcgaaggctgttcggtttcggtgaagtggatgtcgaggaagtgctcggccgcctgcttgaggctatcggcgtggaaatccggttgggccagatacccggcaagcttggtgtcgaacatcggcaggtccatgtcaagatctaccgcgcccagaagatgcagcaattctttatacccatgcacgatggtgcgggagtgttcgcttttcaggaaccgcgcaagctgtgctcgcagggtatcggtgattggaaggggcactatggccgctgatgttgccgtggcaacggcaatggcttgtgccgtggcacgccccggcctttcgtcgccccatgcggccacggtccaagcgtggccgaccgcgtcgccgcagacggtatgccgctgcgatccatcgccatagtcggaaaccgtgaaatcggcgatttcaccgggaactttgacctcggcgcgatgggccttgacccattcgtcgaactgctccgaagaggtgatgctcgtgggttccggcaggttcagatcgagactgttatcctgctcgtcctgttcattattcgtagactcgccggctccgtatgtgttggaaaccttggcaccggtattgaaggttttcagtacacgactcctggtacgcggtccgaattcaagctccttgaacagggcgtcgatttgtgccacgtccacggtgccgaatgtcagatcctcaatatcgacgccaagatcgacgtctcgtaccagtgcgttgactttgcgattgagcttgacctggtcgatattggccctcagcgattcgccttttttgccgccgatttcatcggcgtgctcgcaaatgccgtcgagggaaccgaattggttgatccacttggccgcaaagccatcgcctacaccgggcacaccgggaatattgtcggcggtttcgccgcggagcgccgccagatccggatattgtgcgggagtgactttgtatttgtcgacgatggactgcggcgtcatatgcttcaggtctttgaagtgatggcccgggtacaacacggtgacgttgtcatccaccagttggaaggcgtctcggtctccggacaataccagtgtgtggtagccggccttgtctcccatggtggcgagggtggcgatcacatcgtcgccttcgaatcccggcttctcgatgtaggtgacgccgagggccgtgagcatgcgttgaatcaatggcagctgggtgagcagctcttcgggagccgcctcacgggtgcctttgtattgcggaagcatctcattgcggaatgtgccgcccttcacatcgaaggcgacgcccagatggtcggggttctccgcatcgatcacctgcgcgagcatggtggcaaaaccccagacggcgttggtggcctggccgctggaagtgctgaagttgtcgaccggcagggcgaaaaatgcacggaaggccagcgagtggccgtccaccaccagcaatgtttcattggtgggtacggtcacgctggcctctcccatagtgtgtttgtgttgctttacgactcagcacggtgatgccgataatcagcgttcgcccgaatcagaaggcttcggatcgccgtacttggcgatgatggcctgagccaggcgcttcttggggatgcgctggtccatggaggtcttctgaatccaacggaaggcaccctgctcggagaagtcagccttgtccatcagcagacccttggcgcggtcgacgagcttgcgctcctcaagcgtgtcttcggccttcttgagcttctcttcggtttccttgagctggtcggtggtttccttgagcttgcgttcgctgcgctccacgttgtccagcagatcgttgatctcggcgaaacggcccatggccacctcgagggtcggcagcaacttggattcctcgtacggcttggtgacgtatgccatggcgccggcaccggtggccttcttcaccagatcggtctgggagaatgcggtgagcatgacgacaggggcgatgttctcatcgcagataatgccggcagcggcgatgccgtccatacgcggcatcttgacatccatgcacaccacatcagggcgatacttgcgggtcagttccacggcttcttcgccgttggcggcctgaccaacgacctcataaccgttgtcttccagcatggcgaccagatccatgcggttcacggcttcatcctcggccacgacgacggtacgcggaccatcctcggccacggccttgcgctcagcaggttcgctttcatcggctacggccttgagttcttcgtcggtcagcacctcatcgacgttgatactcggttcttcggacttcttccttgcagccatgccaacctctttcttgaattacccaacaatggggttcgtaataatttcagcgaactcctagctaaagtgccctcggtgggactcgaacccacactgcgcagattttgaggctgcttcctctaccaattgggatacgagggcgtgcctaagcactctgaagagagtagcataccgattcgactcctgcgacacaagacacgcgccagtcctccatttccccccggtaaaacaggcgaaacacgtcgatatcgtggacggcgtacccgtgtgttgcccgttcttctgcgtggtttcaccgcttacaatgggctgtagtttcgatgtatcgcttttgttaggagggcttatgagcaacgaaacttaccgtcagttcgatccctggcgcccctctccggtcaaggagatttcccgtagacagattgtggagacgcattatttcaatgtcgatcacgtctcctatgagtcgaatcagatcggttcgtttgaacgctactttgttcaggagaacaatggcgacactgtggctgtgctggccgtcaccgatgacggcatgattccgctggtcgagcagtatcgcatcgccaaccatcgttggacgttggagattccggcaggccacgccaacaacccgtccgaacgcccgaccgatgtggctaagcgcaagctggccgaagaggctggtttcgatgcctccaagcttacgcagttcacccgttttatgaacacgccgagctattccacccagcacaccgcaatcttcttcgccaccggacttaccccggcttcccgtcaggaaatcggcccggagactccgcgttccgacgtgcgtatggtgtcggtggacgatgcctatgagatggtggtcaatggcacgattgtggatgccaagaccatggtcgccattctgcgtctgaagagcggcacgctcgatcatctcaacgactagtcaccacgctcgatcatcgcggtgactacgtgccattgcaatcaccgcacaatcgcaacataacggataacgaaagccccccatccactttctggatgggggggctttcgcgtgctatgtgctagctgtcagcagctaccagcggcctgaaatcagtcgcaagcgccaacggtgtgcacgtagatggagtcggtgcggcccggctggtgatcgccctgagcagagctcaggatgacgatcttgtcgccgtcagcaaccttgccggcgtccttgaggatcttgtccgtgtagatcatcagatccttgcgggacttgtcgtggtagtcctccttgagcaggaaggcttcggtgccccaggacagagccagccagtggtaggtgtgctcgttgctggtcaggccgtagatcggggcggccggacgctcacgggagacgcggtgcacggtggcgccggtctgggtgtaagcaacgatggccttggcgttgagcttgtcggccaggtccacggcggcggaggagacggcgccggtggaggacatgtcgaggttcttgagctccgggatgcggtcgaagccgtggtcggtggcgtagccggagatgcgcgacatggtggccacggtcacatccgggtacttgccgacggcggtctcgttggaggtcatggtggcgtcggagccgtcgaggacggcgttggcgcagtcggaggcctctgcacgggtcgggaccggggagttcaccatggagccgaggacttcggtggccacgatgaccggcttggcatactggcgggccagctcgatgatgcgcttggtggccagcgggacctcttccagcgggcactcaacggccatgtcgccacgggcggccatgacaccgtcgaaggtcttgacgatctcttcgaggttctccagagcctgcggcttctcgatcttggcaacgatcgggatgcgacggccttcctcgtccatgatctcgtgggcgcggtcgatgtcggtggcgaaacgcacgaaggacatggcgatgatgtcggcaccggtgcggatggcccaacgcaggtcagcctcatccttctcggtcagagccggcagggagacggcgacgcccggcaggttgatgcccttgtgggaggacacaggaccggccacgacgaccttggtgtacacgttgttgccctcgaccttggtgacctcaagacgaaccttaccgtcatcgatcaggatcgggtcgcccgggtggcaatcgcccggcaggcccttgaaggtggtggaggtgatgtgctcgtcgccctcgacgtcatcagtggtgatgacgaattcctggccgagctgcagctgaaccttgtcttcgccatcggcgttcttcttgaaccaaccgcagcgaatcttcgggccctgcaaatcaacaagcgcggcaacgttgcgaccagtggcttcgctggccttgcgcacgttgttgtagaccttgaggtgatcctcgggggtgccgtgggagcggttcagacgagcaacgtccataccagcttcaacgagcttcaggaggttgtcgtaatcctcggtggaaggaccgatggtgtctacgatcttggctttacgcatgaatgcctgcctattcttgttcaatttggttcgaggcacgattgccccatttgccgaaacccagtctactagcgcgagccgactcatgacaagttttcttcacggtgtgttgtgagcgctcacattgttgtgttgactgggtttaagggttgtattctctaacgatttcaggccttctcggcgctttccatgctcttcatcttgatcacggaagccacggatgcgccgccaattgcgaccacaatcacagccagcgacagccatgtgggcacttccggcacccaatggatgccttcgccgccgttgatgaacggcaaggtattgccgtgcagggcctccatgatgagcttgacgccgatgaagcccagcaccacggacaggccggcaggcaggtagacgagcttgtcgagcagagcacccagcaggaagtacagctgctgcagaccgagcagggcgaacacgttggaggtgaacaccaggaacggatccttggtcaggccgaagatcgcgggaatcgagtcgaaggcaaacatgacgtcggtggtgccgatggtcaggaacacgatgagcatcggggtccagtaacgcacgccgttcttggtggtgcgcagcttctcgccgtcgtagtcgtcggtgatcttgatgatcttgcgcagattacggatgatgccgttctcgtggtattcctcatcctcgtcgccgccgagcaccagtttgacggcggtgtagatcaggaaggcgccgaacaggaagaacacccatgtgaagcgtgtgatcagggccgcgccgatcagaatgaaaatgccacggaagatcaaagcaatggtgatgccgattgacagcacatacttctgaatctgcttgggcaccgcgaagttcgacatgataatgacgaacacgaacagattgtcgatggacaacgagtattcggtgagccagccggaatagaactcgatggcgggcttggagccggcgaagaaccagatgcatccgccgaagatcagcgccatgaccacgaagaaggcgatatgctgcacgcattccttggtggagggcacatgcggtcggcgcccgatgacgaacaggtcgacgatgaagaacagcgcgagcaccacgaaggtgatgatttcaaatgcgagtggggtttctgccatgattccctacactaacccatgtatgtgacgggtcatcgccccgcctcggtcatctgccggagctccttcttgagatcacggatctcgtcgcgcagacgggccgcgagttcgaactggagttgttcggcggcggtgtgcatctgttcggacagctggcgaatcaggtcggcgaggtcctgcgcgggcaggccggccttcaggatctcctcgtggcgtttgtctgcctcgttgggatcgagtaccggcacgcccaggtgtgtgttgccggcctggcccgcgttgcggtagccaccttca

SEQ ID NO: 1181 - DNA, 3217 bp, Unknown
  R81_24m  MAG No. k141_14795
gccggcacccacgccgagggcgggcttgccggaggagtaagcggccttgaccatgcccggaccaccggtggcgaggatcgtggccacgcccgggtgctgcatcagcgcgccggtggcctggatggacgggtgctcgatccactggatacagttctcgggagcaccggcctcgatggcggcgtcgcgcacgatcttggcggcctcgacggagcacttctgcgcgccggggtggaagccgaagacgatcgggcagcgtgtcttcagggcgatgagggacttgaagatggctgtggaggtcgggttggtaaccggagtgacaccggcgaccacgccgacgggctcggcgacctcatcgatgcccatcacgtcgtcttcgcggatgatgccgacggtcttctggccggccaggtagttggtgacgtgctcacaggcgaagatgttcttggtggccttgtcttccacgagaccacggccggtctcgtcgacggccatcttggcgagaacgaggtgcttgttcagagcggcgatggaggccttggcgacgatacgatcaacttgcttctggtcgaggttctcgaattcgtcgagagccttcttggcgcgggcaaccagcgcgtcaacttcggcctcagctgcggcctgcttctcttctggggtcggattggcagcttcgactttcttctttgcttctgccacttggggtcctcctcgatcttcttggggtatatggcaaagttctgggccatcgcctcgtcacctcagttgcaccagcgggataccgcctcagtaaccgaaaatgaccggtgatgcgttgtcacattgcatatgtgacttgagtcacaatataccgaacggtccggcgcgatgcatacgcacaaaatcgacggcgtttcacgtgcgatattgaacagtttttgttaagagttgtgcgaaatatcgaacaaatcctcactttattcggcgatttggtactttttgttcactttttaccgaaaatcacatgcttgcaaacaacgcaatccgacaactttcttaaatcaagtttccaaaagtactcattttccccacatttctagaaaattggtttaaaaaagtgcccaaaatcgcctacaaatatacgattgttgcctcataatctccgcgtcgaggcacatgaaagccactttcataaagtatacttacatatatctcatcgtacaaaggggtaaatatgagggcaatgccatcgaccgcagtgaaagcgcacaaccgcagtgccatgacccagtatctgtatggccatagccatgtcaccaagcaggaactggaacgcgaactcggcctcagcctgcccaccatcacccaaaatctgcgcgccctagaagatgacggactcatccgcaaaggcgaactgcaggattccaccggcgggcgcaaggcgcaaaattatgagttcaatcccgatcatcgcactgccatcggcgtagtgatgcggtccaacgaactgcgcctgtgcgcgattaacctgtacggcaacgtcatcgaaaaacgcaacgatgccctgccttaccgcaacaccaacgtttactaccagcgtatcggcggcatcatcaacaacttcgcctccgacgtcgaaaagaagcacggcaaagtgctcggcgtctcgttcgccatccaaggcatcctctcccccgacgccaccaccatcaccttcggcaccattatgggcaacacggggcttacgctcgaaaccatcagccagtcggtccattacccgtgcatgatgatccacgattccgatgcctccgccatggtcgagctatggttcgactccacgctcaccgatgcggtgtgcgtctatctggagcgacgcccgggcggcgcggtgatcgtgggcggcaagctgtatcagggtccgaatatgtgcaatggcgccatcgaacacatgacgctggtgccgggcggccgcgaatgctactgcggccagcgcggttgcatggacacctactgctcgccggagaccttgcccgaggattacgaaagtattcccggcttcttcagcgtgcttgagcagggtgaacggcatcatcgcgagcgcatggacgaatggctggattacgtggcgcaggccatcgtcaacgcgcgatccatcatcgcgggcgacgtgattgtcggcggtgaagcagcccagcatcttgaagacagtgacatcgaggatctgaaggcgcgcgtcatcgcacgcagtccgttcggcaccgaccatttcaatctgcgcaagagctactgcgccgaagaccagaacatcatcggtgccgcattgcgattcgccgagaattatctcgacgatatctgtggtgctgcggaacgcggcaggaaatcaagggcttccaccagaagtgacaacacgtctacaatggaggtatgaaaaacccaccgttgcatcgttacgccactcgcccagggctgtacttcactgacgacggtggggctgacgtcgttgttcgttccgaaactgccgatcaggtttggctgtgtgtgctggagcccattgacgagcccggcgccttcttccaagacgccatccgcctgttcgaagacccgaacgcctcgttcatccagcagatccatgagtttccggtgtgcacgcgcattatcgaacatttgtatctgcgcgagaccctgttccgcatgaccggaccgaactacggcctgtggtacgtgcacctgcccaaagcatgggacggcatgcgttatggctaccgcgtggacggcgcatgggacccgaaacacggcgtgcgcttcaatccatacaaattcctgcttgacccgtatggcaagggcatcgacggctccatggagctcacccccgccgccttctcctatgaatgcgatgtcgtggatcgcaaggtaaccggctcggcatacggtgccatgagcaccgtagactcgctcggccatgtgccggtgtccgtggccatcgacgatcgcgatatccataagcatgagggcgacccgcagcacccgcatgtgccgtggcgcaaaaccgtcatctacgagatgcatgtcaaaggcttcaccgccaacgcgccgtggctgcccgaagcgttgcgtggcacctacgccggactcgcccaccccacaacgctcgcctatctgcagggattgggcatcacctccatcgaactgctgccgattatggccaagcaggacgagctcttcctgcaagaacacggccaca

SEQ ID NO: 1182 - DNA, 16723 bp, Unknown
  R81_24m  MAG No. k141_14990
cgaagcgccaccggtccagtcataggccacgaaatcaggacgagacagccagtcgaacgccagtaagccggcggcccattcagccgcaccattcttgctcagcttcgccggccagctcagctgaccgcggcacacctcaggatgatgttctttgtaccagttcacggcgcccgggtggaaggattcgatgacgtatggaccgtcatacgcctcaagcagggcgtggcccttctccatcagctcctcggtacgagcatcccaagcgctattgtcgctgaacttgtattccacaatcagcggagcctggccggccaccacgtccagcacatcggagaacagcggcacatgctggtagtaccccttcggcgcggcggacggcgtgaccaccagcggcggattcgcgtcggcaccgggcagcggcttggccttcagatcgccgggcttgctgccggggaacagcgggatgcgggtgagctcgtcatatgtcaggtcttcgacgcggcgcgggtcgccggccacgcgcagcaaatcggcgtcatggaccacgaccacttgaccgtcgagcgtaagctgcacgtcgagttcgatgccatagccagcctcgcaggcggcggcgaatgcggccagcgagttttcaggagcgatcggaccggtcatatccgcactgccgtagccggccttgacagccatgcgacgggcaagcgacacataatcatcgttttcggcgatggatcgctcagtggtatcggcttgggcgctgaccgaattatccccaccataatcagcgatatcggtatagccgaccaaaccagaacccgcatcgtgcaagccacgatgggcataccataccttcggaatggagggcacgaaattacgacgcttgtcattgaacgtgcgcggggccacggcccacacggcagcaccggcggcggccacgcctgccagcgccacgtttctccagagcttcgacgacattggaatccttcctgttgggctgcctctagcctaacgcttctgccagccattgtggagtggttggatcgtccagcttcagcgcgcggtccaggtggttggcacgcagcggctcccagctgaaatctgccagcagatcggcgggtttgcaagggattggagtgggttgcagacgcagcaaccaggcgcagtatccgatgatttgctcgggggttacgttgcgggcgcgcaaggctcccatatccagcgaacgttcgcgcttggctaaacgccgaccggccgcattgtcgatgagcggcaggtgcgcatactcggggtgctcggcgagaggcttttccgtgttgccgcattccggctcaaagccgccagccaacagacactggcgaatccacatttgcagcgcggtggagcgcagcagatcacggccgcgcacgatatcatcaacatccatatcgaggtcatccacgaccacgaccagttgatagccgaacagtccatcggctcggcgaatcacggaatcgcctacctcgcgggccaaatcgtagtgctgtggactatagacacggtcgttaaagcatgcgacaccatcaacgattccggcatcgccctgctgttccggcggcacggctcccgacagcgcagcggaatcgtcaggcactgtacgttgcttttctcccgctgccggtttcggcatggcgatacggatggaatgctggtcgccgcgagacagacgggcacggacctcgtcgggatggtcgtgcagcaggcggcggcacgtgccggggtacaccatgaagccgtcgccctcgttgggggccgaggcggcgcgaatgtcggcacgcgagcagaaacaggggtacagcacaccttgcgagcgcaggcattcgagagcgtattcgtagcgctcagtgcgctgggattggaacatcggttcgccatcccagtcgaggccgagccaatgcaggtcgtccatcatgagctggtccgcaccggcaaccacgcgcggcttgtccacgtcttcgatacgcatcagcatgcggtcgccacgcgaacgggccgaaagccatgcacccaacatggcgtacacgttgccgatatgcatgcgccccgacggcgtcggcgccaatcgtccggtcactggctctcccttcgtccgttaacactcactttcctaccatatgcgacagtgaacaccttgatgccacggttcttccactcttggggaacacaattgagacggatcggacagatacttccgtttcaaggggctgatttcgatgttgcaggaggtctacttccatttcaaggggctggtagccaagtagacacggcgcaacaatggcggaatggcgttgccataaagccgctgatactcgcggttcggcagaagagcagcccctcgaaacggaagtagacctccgaaagggggcaaatcagcccctcgaaatcgagatagacccacaaagacgaaaaagtgggtatgactgctaccatacccacctgtttaagagattttgcagagaaaaatcactgttgcgaaaccgcccgaactcccctcagtcagcttcgctgacagctcccctcagagaggggagccagtgattgtcacttatcttcggtgacgttgtccacgctcacatccgggtcgtcggagacgatctggtcgctggcccaggcggtgaggtcaagatgctcaccaccggtctggtcgaccagcacggtgtcgccatcgtggaccttgccggccagcagcatgcgggccagctggtcgcccacttcggtctgtaccaggcggcgcagcggacgagcgccataagccgggtcgtaaccggtgttggccagccattcgcgagccgagtcggtgacgtccagcgtgatgcggcgatcggtcagacgctgggccaccccggccacctggatatccacgatgccaccaagctcctcacgcgtgagcgggtggaacatgacgatgtcgtccagacggttcaggaactccggcttgaagttcatgtggacggcgtccatcacggccttcttcttggcgtcggcgtccatgtcctcgttcacaaggaactgcgagccgaggttggaggtcatgatcaggatcgtgttcttgaagtccacggtcctgccctggccatcggtcaggcggccatcgtcgagcacctgcagcagcacgtcgaagatctccggattggccttctcgacctcgtcgaacagcaccacggaatacgggcggcggcgcacggcctcggtcagctggccgccctgctcgtagcccacgtagcccggagccgcaccgatcaggcgcgagactgaagccttctccatgtattcggacatgtcgatgcggaccatggccttctcgtcgtcgaacaggaagtcggcgagcgccttggccagttcggtcttgcccacaccggtgggaccgaggaacaggaacgatccggtcggacggttcgggtcggagatgccggcacgcgaacggcgcaccgcgtcggacacggcggcgatggcttccttctggccgatcacacgcttgcccaggtagtcctccatatgcagcagcttctcgttctcgccctgcatcaggcggccaacgggaatgccggtccagtcggagacgatctcggccaccgagtcggcgtccacacggtccgggaccatcggctcatcggccgggttggccgcgccggcatcggcagattcggcatccgcgctttccgcggcggcgagttccttctgaatagccggaatctctccgtacagaatcttcgaggcctcagccagatttccctcacgggtgaacttgtccgcctgcacacgcaggtcatcgagcttggcacgcaggtcaccgaccttgttgtggccggcttgctccgcatcccaacgcgccttgaggccgctgagcttctcacgggtgtccgcgagttcggcttgcagcttgcccagacgctccttggatgcaggatcctcagccttcttgagctgcatttcctccatttcaagacgggtcaccttgcgctgcagttcatcgatctcctcaggcgaggagtcgagctccatacgcaggtgggcggccgcctcatcgaccaggtcgatggccttgtccggcagctgacggcccggaatataacggttcgagagggtcgcggcggcaaccagcgcgtcatcgccgattgtcaccttgtggtgcgcctcgtaacgctgcttcaggccacgcaggatggcgatggtgtcttccacgctcggctcgcccacgaacacctgttggaaacggcgttccaatgccggatccttttcgatgttctcgcggtactcgtccagcgtggtcgcgccgatcaggcgcagctcgccacgggccagcataggcttcagcatattgccggcgtccatcgagccttcggccgcacccgcgccgacgatggtgtgaatctcgtcgatgaaggtgatgatctggccgtccgcgttcttgatttcgttgaggacgctcttcaggcgctcctcgaactcgccacggtacttcgagccggccaccatggagcctaagtcaagggagatgagcttcttgccttgcagggtggtgggcacgtcgcccgccacgatacgctgggccaggccttccacgacggcggtcttgccgacgccgggctcgccgatcagcaccgggttgttcttggtacgacgggagaggatctgaatcacgcggcggatttcctgatcacggccgatcaccggatcgagcttgccttccttggcggcggccgtcaggtcggtggagtacttctccagggccttgtacgagccttccgcgtccgggctggtgatcttcgcgccgccacgcacgccgggtacggccttgcgcagggaggctgcggtgacgccgttcttctccaggatttcggccgactggttcggcttgctggccgcgatgccgataagcaggtgctcggtggagacgtattcgtcgcccatctgctgcatttccttctcagcctgggcgatggcggcggtcagctggcggctggcttgcggctgcgaagtgctggagccggatgcgctcggcagtgcgaccaaagcgttacgcacggcggcgccgatggcctgtgggtctccgcccgcggcctcgatgagggagcgcaccacgccgttttcctgacgcagcaacgcatccatgacgtgcagggtctcaacctgcgcgtttcctgcggcggacgcactctgaatcgcgtcgccgacggcctcctgggccatagtggtgaacttctgttccatatcgtattcctccatatcatgcggcccgcgcggagcggctcgcgggcttcgaaagccccgcaagcgccaccgcagaccgcaacttgtcgttgtctgatatggtcaaccgacctggaacccattctattcccaaaacttgagtgcaggtgactcaagttttggattttggtggggagggtgaacagtagccccctctgatgagggagctcacatctatttcaggaggccgacggcagcttcggcggcggataggatttcgccggagaggatggcgttggctacgccttcgatttgcggggtggtccaggtatcgcgtacgtcggggccgatttcgttggcgtactggcgcaccacgcggtatacggcggcgcccgccgcacccggacggtacggcttgcggaagtcgaaggagcggcaggagcacagcagttccacggccagcacgcgcgcaaaggccggaatcgaccggcgcagcttgcgggcggcggcccagcccatcgacacgtgatcttcctgcatggcggagctcggaatcgaatcgaccgaggcgggcacggcgttgcgcttcatttcggagacgatgccggcggcggtgtactgggcgatcatgaaaccggagtccacgcccgggtcaccagccaggaacgccggcaggccgcggttgcgcgccacgtcaaggaagcggtcggtacgacgctcggagatagaggctacgtcggcagtcggaatcgccaggaaatcgagcacataggccagcggcgcgccatggaagttgccgttggactccacacggccgtccagcgtgacgcacgggttgtcgatggcggaggcgagttccacgcccgccacggaggccgcgtattccacggtgtcgcgggcggcgccgtgcacctgcggggtgcagcgcagcgagtaggcgtcctgcacacgcacggtggagcccgggcggccggcctcgatcagactggagcccttgagcatgcggacgatgttcgcggcggaatcgccttggccgcgatgcggacgcagcgcctgcaagtcggcggcgaacacgcggtcgttgccgagcatgccttccacgctcatcgcggcggcgatgtccgccgtcttgagtagcaggcgcagatcggtgatggccatacacaacatgccgagcatgccgtcggtgccgttgaccagcgccaagccttccttctctttcaaatcgacgggcgtgatgccggccgcacgcagcgcttcgtcgccgccgatcttgcggccgtcagcgttgcgggcctcgccttcgcccatcgccaccaaagcgcaggcggcgagcggcgccaaatcaccggagcatccgagcgaaccgtattcgtagaccaccggggtgatgccggcgttcagcatatcggcgtagacctgcgcggtttccgggcgcacaccggtgcgtccggtgcacagggtgctcaggcgcagcaccagcaggccgcgcaccacctcacgctccacttccggtccggcaccggcggcatgtgagcggatcagacttttctgcagctgcgcgcgctgttccttggggatggaagtggaggccagcgcgccgaatccggtggagataccgtaatgcggcacggtgtcgtcggccaaatgatcgataaccgcgcgacttagcgccatctcatgcttcgattcgtccgaaatcgccactttggcaccgccgcgcgctacggcgataacgtcctcgatgctcaatgccccaacgcctacggtgaccgtctgctctgccatgttttcctacctctctatcgtgccgagctccacttggtattggatatattcatctcgccagcatggcatatcaacgttacgggactgtccacaatatgcaccgccccgcgccagcgccgcgcgaacgctcctatactcacggctggtttgttatgcgcctgaccgccgccggtgctgcggcgggtgcttgtgggataagagaagaacatgatttttcaggccggttcgctgctgctcgttatcatcggtgtctacatactcaaacatgtccacattttcggcgagcgtgattacaaaatcgtgcagggtctggtattcaatctgacgcttccttgtgcgattatcctgtcgttcgccacgaacaagcacgacatgcgcatgctgtggatcgtgttgttcggcttcttcgcctgcgcgattccgctgttcatcgtgtatttcggttctcgcggcgacgagaagaactaccgcgccttccagatgctcaacgcctcgggcctgaacctgggcgcgttctgcctgcctgtggttcagacgttcatgggcccgtccgccggtctgccgatcatcatgctcgatatcggcaacgccaccgtggccacggccgggtcactgaccatcacacgcacgctgctgcatatggatgacaatttcaagtcgctaccgctcatcctgcgtctgcgcaatattgccagggacttcctaagctcgatttccttcgacatctacatgctgatgctggtgttcatgttcctgcacatcacgatcccacagcccatcgttacgctcatcaccccgttcgccaatgcgaacgccttctgcgcgatggccatgatcggactgatgatggagattccgaacaatcgcaaggacaaggtggagttgggcaaggtgattgtctggcgcatggtattcggcgcgattatcgccgtggccgcctggttcctactgccattcgacatgaggattcgcgagatcatcgtgttgggctcgttcgcccctatcacgatcttctcaaccaagttcaccgattcgctaaccggcaacgccaagctcgccggcttctcgctgacagtgacggccatcatcagcttggtggtgatgaccgccctgcacgcacttctgccgggagcgtaaggcgcgttcttggttcccctcagtcagcttctccgcctggacggctcccctcagagaggggatccagaacgagtcacgcccgaacgattacgttgcgcagatcgccgatgccctcgacgtgcacgatggtctcgtcgcctgggtcgaggtggccggaggcgttcggggtgccggtcatgatgacgtcaccaggcagcagcgtggagaacgacgaaatcgcggcaatctgctcggggatgccgtgaatcaggttcgcggtggtgccagacgccatcggcacatcctcgccgttcagcgtgaaggaaatcttggcgtccttccagtcgaggtcgtcacgcatcacaatccacgggccaagcgggcaggaggtatcgaagcccttggcgcgcgtccacgtggggtcgatgccctgcagatcgcgcaacgtcacgtcgttcacgcaggtgaagccgagcacgtaatccatcgcgttctcgacggtcacgttcttggcgatgcgtcccatcaccacggccacttccggctcgaagttcatgtccttggagcaggccgggtacacgatcggatcgtcggggccgatcaccgaggtggacggcttggtgaagatcaccatgtcctccggcgcgtgggcgatttcggagtggccggcctcgtgcatgaactgggcgtgcgcctcatagttcttggccaggccgtagaccttggaggggatgaccggggagagcaggcggatgccgtcgccgtcgaccgggtaccggttgccggtaggcttgacctggtcgccggccagcggatgaccgtcaagttcgatgaggtagtccttgccgtccgtttcatccttttgtacgaaggcgtagcgcggcgaatcattcaaagaaaaacgtgcgagtctcatgcctgtaagcctactccttggcggttccttccgcagaagcatccgtccaaggagcaagcagaccggccttcaatcgaccaaaacgcacgttcgctgggattgctacttttcggtccaggttttgtcgtacagcgactggccgctttgcgtgtgcatgatgacgcgcaatgatgccttgccgctggaggtcttgcacatcgagcccagcagattcgcggtggattgataggtgctgtccatagcatccagtgaggaagcgacggtatcgcctagcgaggcgtagctgtcgtcgagcacgtactcgtacaccaaggtgtcaccgtcgacacggtagttgaaggtgatgccggtatctgcaaacgtatccgcttcggattcaatggagtccttgaattccgaatagtcgacgaaatcctgaattgaatcgtacagcccataatcgccgtcggttagatcgtcatgggtttcgtccaacgtgtcgtccagcgcatcgtcaagattatcttgagctttgctcttatcgctgctatcaccgttgcccgaagaggactgactatagaaggaatcggttttcgcctcatctatagccttgctggtgtacgagacaccgccgacgatcagcgcgatgaccagtattacctgtatcaccatgcccgccgcactgatgatgatgccggcgatggccaagcccttgcccttgccgccctgtttcttaatctggttgaggcccacgatgctcaggatcagaccggggagtgagacaaggaacgagcagataaaaccggcaatagccaggccgttgtacttctggttcgcttcaggcggcacactgccgtaagaaccagaccatcccggctggccgttcggttggccgccttgcatatacgggttatagggcgtttgcggaggcacggccccgccgcccggataccgagcactgacgctgccgtagaccggaggaaccgatccgcctgccggagccgtccccggatagggcgaattgggtgctgccggtgtgggcgcgggcgcagcggcaggagtcactggtggcaaagcctgcgtaggcggtaccggctgattgaccggcgcaagaggctgggtggactgctcggcaggtgtaaacgcctgcgtaggctgctcaacaggagtgaacgcctgagtgggctgttcgcccgctgcgagtgcttgggttggagcattgttggcggcggttcctgcttcccccgtcatcgcatttaacggctcagtcggattggcgtcagctcgctgccccggcacctggccgttcggattggcattcggatcagtcatgacatgcactccttcaactgcatcgcaccccacttgcgagatacgcccctcgtcttacgcgccacattgtgcgttacagacaactgtactcctcgtggcgagccttaagtaccccaggaaatttggcttcccaaaaaacacagaagcctgaaaccggctattgcctcagcaatattcagtcggtttcaagctaaatcgttaatcctctggtgaaacgacggtctacttcttcagcagcggcgcgacttgttcctcgtaggcggtcagggcggtgtcgatcacctggtgcatgtcatagtacttgtaggtgcccaagcggccgccgaacacggtgttcggctcggccgcggccttggcctcgtaccgcgcgtacagggccttgtccgcgtccgtgttcaccgggtagtacggttcgtcgccgcgctcggcgaaacggctgtactcctcccacaccacggtcttgtccgggttctgggcatcgcggcgctccgggttgaagttcttgaactcgatcgcgcgcgtgtacggcacgtcagcgtcggagaagttcatcaccgggcaaccgaagtggtcgccctcgtcgtaacggacctccttgaagtccaccgtgcgccacttcaggtcgccaagctcgtaaccgaagtaacggtccaccggacccgtgtacaccaccggcacgcccgcggccttcagcgcctccttgttgtacggctgggactcgtcgaagaagtccacgcccagcgaaaccgtgatgcgcgggtcatcgatcatgcgctccatccacttggtgtagccgtccgcgggcaggccctcccacgtgtccttgaagtagcggttgtcgtagttgaagcgcaccggcaggcgcttgatgatggccgccggcagctcggcagggtcggtctgccactgcttgcccgtgtagttcttgatgaacgcctcgtacaggggacggccgatgagctggatgcccttgtcgttgaggttctgcggatcggtgccggccagctcacccgcctgcccggcgataagcttctgcgcctcggccggcgtgtaacgcgcgtggaagaactggttgatggtgcccaggttgatcggcagcggatagacctcgccgtcatgcgtggcatacacgcgatgcacatagttcgtgaagctcgtgaaacgattgacgtagtcccacacacgcttattggacgtgtggaacaggtgcgcgccatacttgtggatctccgcgccggtctcctcatcgaagtacgagtacgcgttgccgccgatgtgatcacgcacgtcgatgatatgcacacgggcacccgcatgctccaccgcctgctgcgccaccgtcagaccaaacaggcccgcgccgacaatgactaggtctgggtattgagtagtttccggcatgcgcgcattccctttcataaagtcaatatatcaattattatgttcgatttccgagaaaatatcttactcacccaattgcaaatcggcaatcttcctagacttaccagcagactggacacaatccaagaccagacgacagactcaaggcaatgcatggcatgttcttacatttctgcgtctttgcccggacccattcgccgccacaaagacagagcacagaacaacgcaaccaccaatacaagcccccgcactcaggcaagtctcaggttacgattggtagatatgagcaattccgaacaggccctcgactcaaccaacgaagcagtcaacaaagcatccaaagaagcacccaacccaccattcgcgccgcaacacattctggttaccggtggcgcagggttcatcggcgcgaacttcgtgcactgggtggcgcgcaaccatccgcaggtccacatgactgttctggatgcgctcacgtatgccggcaaacgcgagaatctcgatggcgtgccggccgcgaacctgacctttgtgcatggcaatatttgcgatgccgagcttgtggaatccctgttttctgggctgaaccaacgctctgcagccgcagtacccccgattgacgccattgtgcacttcgccgccgaatcgcataacgataattcgattctcgacgcctccccattcctcaacacgaacgtgaccggcacgtacgtgttgctcgaggccgcccgccgccacgatattcgattccaccacatcagcacgacgaagtgtatggcgatttggctctggacgaaccgcgcaaattcaccgagctcagcccttacaaaccatccagcccgtattcggcgtccaaggccgccagcgaccacttggtgcgcgcctggcaccgcacgcacggactcaagaccaccatcagcaattgcagcaataactacggcccctatcagcacgtggagaagttcattccccgccagatcacgaacattcttgccggcattcgcccgaaactctacgggcaaggtctggctgtgcgcgactggatcagcgtggaagatcactgcagtgccatctggacgattctcacccgaggccgcatcggggaaacctacctcgtgggagccaatggcgaatacaacaacattgatgtgctgcgcatgattttgaagctcatgggccgcgacgccaacgacttcgaccatgtgaacgaccgccccggtggcgataagcgctatgccatcgacgccaccaaacttcagaccgagctcggctgggtgccaaagtacaccgatttcgaggaaggtctggccgcgaccatcgactggtaccgagcacacgaaaactggtggatgcctgataaagccgggactgaggaaaagtaccggaagcaagggcactgatagccattgacaggccgccgataggtcactgacagcgcaatcaatgaataccgattgcgagatttggtggcgaaaatatatcttatgttgtacaataatcatgtatttcaattataaattgattattatgacttttaaagaacggtaatgcgatgattcgtttacaaagacttgttctagacaacatgaggaacatatcgcacggcgtcttggattttgacgatctgcccgctggcggcagcgtaacgggtatctatggacagaatggatcaggcaagaccaccgttatcgatgccatcgggatactgcgcgcgctgctatccgggaatatgctgccggacaccgccggcgatgccattagcgtcagcaccggtcttgcaaccttgacggcgacgctcctcatcggaggaaaacagaagcccagctaccttgaatacaaggtgtccctgcgtaaagcgaacccggattcgacgcgagcgcgcgtcgtttccgagtcggttcgcatcggcgacgatctctcacgcctaggcagggaggcgttggggcatcggatggaggattctgagaccgatggtttcgtgtcaactccggtatatgtgtggcgctccatcgaggcggtaacctcggtgaaaaccgtggtctcacgcaccgctgatcgtgcgtacatggaggggcgctcattcctgttctcgcggtgtgccacgcttgaagaccgacccgatgccgagttcctcatcgactgggcggtctcccgcgtacgggaagcgaatggtgtgtccgccagatcactgacatacatcaacgaacgtttcgatgagttcgtacgcctacgcaaggccttatgcgattacgcgaccaatgatgtcttcgtatccactacccgtcgtggctcctatgccgcatatgcgttcatccccatcatggaggaggattccgcaggtcgcaacacagagtttctgttcgacctgttgcaaccgaaaccgctgaccccgggccaggcgaaacgacttggacagaccgtggagtccttcgaccgcatcctgcccaccctcgtgcctggtctgcatgtcctgctgaagatcggaaccgcgccttccggcaaagatggcgaggaccgggtcaccgcggagctgttctcgcgtcgtggcgatatcacggtcccattccgctgtgagagcgaaggcatcatacgcatcaccgcgctgcttggctatctcaagcacgcgtataacgacgagaacgcgctggttgccgtggatgagttcgactccggcgtgttcgagttgctgctcggtgacatgctgtaccagttggcggacgggtgcgcagggcagctggtgttcaccgcccataacctgcgtgcgttggaagtgctgccgaacggctgcattcgcactacagtgaccgatcccaataaccggttcgcgatcatcccccgcaagtcctccacgaacaaccagcgccgacggtacctgacggccagcgagctcggatggagcggccccgacatctatgattcgcccataccacgcatgttcggcaacagtctctatgccgccggccatcccgatgaggacgatgacatcgacgacgatctggcagcactcaacacctccggaacgaaggtgaaccgtggctaaacgcaagatcgtcctgctggtcgtagaaggagcaagcgacgccagcctgctcgtgccggcattctcgtcgttaatcgagaaccgcctattccaagggcaggaattccactgcgacgtgttgactgcgccaaaccaccgtgaggagttccggcgtcgtaacgggttctatccagcggacaatcctgtccagacggtgcgcgaactcgtggagtactacctcagagaccacgaccgcacctggggccagctcggccatgtcatccagatctgcgacctagacggggcgttcacatctgacgaccgagtgcgggaagacccattggtggatggaacgcaatattcaacgaccgacatcatcacgccaaaccgcactatcctgattgcggatcgcacgaccaagcgaaacggcgtggatgccttactgaaactcgatgggttcaggaagaagaacggccgcgccacgctcatggtcccgtaccgcctgttctacgtcagccgcaacctcgaacacgcatttcgcggtaggattgacaatctagacgcacagcacaagcagagcagcgccatcaaactagcagacctctttacccgcaacccgaacctgttctctacaacccttcaatctcttcggcgaatacacggcaatccgacaacgtgggaggaatcttggcaatatgccatgcaagacctccactcactcgaacgcggtagcaacctcgcattcgtggagccatacttggcaggcgaactgcggtaaatccatcagaatagtttcagaaccatagctggttcgagctcagctagacaccaaagttggaaaacgtagcccagtgcaccttattctggttataaaacgtaagaacagggctcaaatttggttggaaaacgtaaattatggcgctattactgttttcgtgggtggggtttctccgttgagttgttgagggagtaagagaagagcgctttccgggtaggatgttttcgaccaagataaacaaacaaccgcaaagcgcctgatgaacagcatattcaaccaacttctcaacgtccccgggttctaggtagaagtgcaacgcctgtctatggttggaagtgttcaagtccacaaccgaagagaaagcgttgcactcgatatgaaagcctattcccacctgtcggcacaggaacgcatccggatcgacgagctgaggaaccgcgaggggctcggcgtgtgccagatcgcgttgaggatcggccgcgacaagtccaccgtcagccgcgagccgggacgcggcccgtggttcgcgtccgacgagaacgagtcctaccggccctacaggccgaaacggctgaaggctgtatttcgtcaaattgaggtggacgtgttcggcacttaatctgaacaccgtcggcggttggttccttgttttgttgtttgtctggtttatttcatgagggagtgttcgttccggtaggattcgccatggaagcggaggatcccgccgtggtggacgatgcggtcgatgaccgcggcggccatgtccccgtcgccgaacacgtcgccccatctgccggactcgaggttcgaggcggagacgacgccgcgggtctcgtagctgtccgggcagccgccgccgtttggattcggcccggctcgcgttctccttctcgaacaggttggccaggaagccgagctggccgggcgtggcgtcctccagggccttcccgggcacgccgtgcgtcaacggcaggttgcgggcgaggcccatgacctgttccggcgtggccttgtcaagaacgcggccgccgcgctgccgcggtttttgccggctcattcggcctccttcatgtatttgtcgtaacgcttcaaatcctgcccgccttcggttcccgcaccctcgaggatgcgtttggcacatgtgccgatcgccgcgcggtcgacggtc

SEQ ID NO: 1183 - DNA, 6332 bp, Unknown
  R81_24m  MAG No. k141_15085
cgcaaaacacaacatcggccgaaggccgattccgcttcctaccgcacaacggccataatcgctccggcctgttgcagctccataaccttggccgcggcctccggcggcattgcgaacgacaccagtcggtcgttgcttcccaatgcgccagtcgtatccggtttgtcgacattcatcaccgtggcgttctcggccagcgtgcaatcggcaccttcgcaaccgacggcggaaaccagtctcacctgatcgccggccaatacatcgtcgacgctactggccaagcggacttcaatcaccgtagtgccggtcggtgctacgggcgcatctctggccatatgcgtggaaatgggatcggctgcttcgatatcgatttgcgccaccttgcccaccacatcctcaatattgcacgcccaagatgggcctatcgcagataccggcatatcagccaactgaacgtcggcggccagaataatgtcaccccgtcgaatcgagcgagcggccaccaccatcggctcggtctccaccacggccaatacggcttcaagcccaaacaacactgcgagtcccacgcacaacgcagcagtgagtcggcgcaaggcatccgccatgcgccgtcgccgcaatgagccgcgcgcaggcggcttaataaacgaaaaggtcaccatgcaaccatggtggcctgaagtttttcgtaagcgcaagctgaatcgacctatgtggttctagcttgccaagttatccacaacgcttcaaacccgtgcaacagacagtgcccgtagtgccaatatccgcggcataccgccgtcgacaccgtcgtttacagaggaaaaacggggagccgaccttacttgccggatttgtcggtgcggtagaatccgtgacccttgaactcaatcggcacggcggaatacaccttgcgcacctgctcctgcgagcacttggggcacacggtaatcgggtcgtcattgaacgactgctgttcggtgaagtcatagccgcagttcttgcaacggtaatgataggtaggcaacggattcctccaacaaagtcatatttctcgcgcatggcgtgcaacaccatgccgtgcaaccgttcatatcctagtcgccgccctgacacattggcgttacggtcttactagccagcctgcttttgccactctggttccatcggccagtgtgcgtggctggttggtcagtctggcttgcgccgagtatcttggccggccggtcaactcagccggcccgattcgccaagccgccggtatccccccggcgtcagcactccgtcggccggcacatcatgtggttcggccggcaaatcggtgtccaacacctcccacggccagcacaccgcaatcagggggcacgcgggcttgcgtcgagccaaggcccggtcataccagccggctccacgccccagacgattgccttgcgggtccactgccaaagccggggcgatgaccagatcggccttctccaacgcttcgggcggtagaactgcgccagttggctcatcgggtctgtgatggacggtgctgggagagctgcagctaccggcattgttcgcgccacccactgcatccatcgagcgcaaggattccaatgaatccagcacactccagccaatttccaacccagatcccaatcgtggcaccaacacgtggcagccatgagccaacagccatcgcaacagtggccgggtttcgatttccgaacccatcgacacatatgccgccactgtggaaccatcctgaatcatgtgtgccgggaaccgtcgcaccagcaattcaccggccgctccacgttcttccgctggaatgcgcttgcgccgagacagtatatggtggcgcagcgtcgctttatccatcttttctgttttctccgtgccgctgtggtcgctgccgatattcatgccattgtccgcttcgctcataccgcacaatctagtgtttccaccgtaaaacgaaagtggccgaggcgaaggcgcaagcccttcatatggctacaataaaggccgtgtcagttttccagtcgattaaagaggcgttcaagctggaccaccagatccgtccgccgcgcctcacccatcccggtttcccgataatcctgcgccccctgaccatggacgatgaggacggctggaacgaagtgcgctggcgcaacaacgactggctggcgccttgggaatccggcgacccgatgcatggcggctccatcaccttcaatcaatgggtgcagcgacagcgccgtaatgagcagcatggcgtcggcgtgattttcgccatcgaataccagatgcgtatcgtcggccagatttcgttgggagccatcgcgtatggtgccatgcgcaccggtgtggtcggatattgggttgaccaacggtacgccggccacggatttgcgccgatggcactggccatgcttgccgattgggcactcggagacccattcgggcccgcgttgcatcggctggaaatcgccattcttccggataacgcgcgctctttggctgtagtgcgtaaggtcggagcccatcatgagggactgcgcgagcggtatatgtatgtcaatggccagtggcgcgaccacgtaacatttgcgctgttggctgaagatatggggcaagggttctctgccagactcgccgccaccggttccagataagcgtcgaccggaagaattccgctccgacacgcccggacggaaagccccagttcgtcggtacgtctcctatccttgactctatgggttatgagtcactgagcactgtcgtcgtgctggtgattgtggcgattattatcgttgtatggctgcccgtacgtacggccaacggcatgaaacgtgtggacgagcaccggcaggatcgttattcgccttccctgcatatcgttgatgcagagaacggcagacgattcggagacatcaagccgcataaggcgaaaggggcagcaatgccagcatcaacaccgtcagcgaggctgacacctgagcacatcgcccatgtgcgggaactgcgccgcgcggccatccgccgccggcagattctcgccgtatgcctgcttgccataaccgtgttggtgtttgccgtatcgttccccctgcatttcagcccgctgcttgctcttattccgttcgtgctgttactgctggtgctggtgctgggagccaatgcctcacgccaggcccggcaatgggaacgcaaggtggtccgctacgagcggactcatagcggtacgggctggtccaagaaaccgtctgccgagtccaaggacagcaagcgtgtgaacaaggccgaaccggttgcggccgtaactgcgcctgccaaggagctttccgagcatgttgaggatgctgccaccgaggtcatggaacagcggcagattcgccgcgcgttacgcgatgccgagattgagcaggccaaggccaaggcgttgcgtcagtccgccgccgcatatcaggccgcggcggagcacgccaaacagtctgagaagtctgatactgcacagtccgccgccgataagcctgccgccgaaccgtctgctatggtcgatgaatccgctgaccgtaagtccgctgccgaaaccagtgaatcttccgccgcgcccgatgcctccgctcgcacggataagtcgactaagtcggataagtccgtcgcccctcgagttgaaccatcgcttacggtgcgtgatgagcgtgatgagcgcgacgatgccgctgccgacgctacgtcggaactggtcagcgtacgccctgcccgagcactggatgtcttcgatatggccacctcgcaggatctcatctccttcactttgggcggggaacataacgccgacaacgctccggaaagcttggagatcaagtcgacccgtcaggtgtccaaggcggaacctgtcgaacccgcagtggcggaaaagttgattgacgaggcccgagccgtcaaggccgcggacgatgccaaggccgccgatgcgggcaaggctgtcagtgccggaaacgctgtagacactgagtcggagcagcgcgatgatgccgatacgaacgccgctacggacgccgatgacgaggctgcaaacgccgcccagcgagccgcattccacgaatccgaggagcgtgccgacgtcgaagcgccagcggcgaccaccgattcgttgggcgcaggcctggactccattcttgcccgccgcggcaactgagcgttgcgattcgccgattttctctcacagcgttagcactcgagttggcagagtgctaataatcgcgctacgatgtgtcctagcgcaaagggacaacgcaagtgatcgtcagcctcttgaggcgttctggcgcggcattatcgaactacaagtagatacgaggtgacccacagtgtcgattaagctcacaccgttggaagacaagatcatcgtcaagcaggccgaggcccagacccagaccgcttccggtctgtatattccggacaacgccaaggagaagccgcagcagggtgaagtcctggccgttggcccgggccgtcgtgacgacaagggcgagcgcatcccgatggatgtcaaggtcggcgacaaggtgctgtactccaagtacggcggcaccgaagtccactacgagggtgaggactacctcatcgtcggcgcgcgcgacattctcgccatcctcggctgattagtcgcctagcgaacttcaacaaccccgactgttcccacgaacagtcggggttttctcttgtcaggcggaaaggggctcccctcagagaggggagccgaaaaccgctcccgccaaacgcccagccatgcctgctatgcataaaggtgcatgcgcgcaacgtagttgagttcggcgttgcaccgcatctacactgggtaacggattggggtccctatggaagaggctcagtcggcgacttggccgagcggcttaagacattttgcacaagacggcagtagatcgacggtatgttgtttttttccgtgtcgcaggttcgtggtgtcgtcgctgtgccaatggttgtctctctaccgacgctgagtgccgtggcatgaggccagcgtcggcagtgggccacgaaatggcgatgtgccgatgctgagccgcgttggcgtcgttatagggccagtttttggaccattgccgacggcaaatcggcgttttgtgtcggcgacggtccaaaaactggcggtctgccgacgataagtgccgtcatcgtcggcagaccgccaggtattgtccctgtgccgacgtaaaaagccctgccatcgtcgtcaccgagccatcttgtgactcactgacggcggcagcagggcggaagaggccgaaatcatgcgcgcggtgcggtctcacacctcgaatccggcctccaccagcgcgtgatcgatgtcgcgaatcaaatcgtccgtatcctccagacccacggccagacggaagaagccgcggtggaactcaggcgggtacaggtactggcgctcgtcatcctcaccgaggaacacgatcagcgattagtcatggccgagcgagacggcagacgtaatcacattgagcttggaaacgaatcggttgtgcccgtcgtggtcggtgtcgaggccgaacgacagcacgccgccgaacccggagtccgggcgggccagctggctggccgccacctcgtggtgcaggtgcgattccagaccggggtacgccacgaaacgcaccacatccagcgattcgagatgcttggcaatcgccaaggccgaggcgtcgtaggacagcgcgtaggtgttcgccagcgtgatggggcgacggatcgcgccggtttcggcgtcgaccccgttgccgaggtgaatggccagcgtgccgaatccgagcggctggtcgtcgaatgattgtccgtgatgtacaagatcagaagccatgcgcccagcatgccggcatgcgctgtgccgccgcaagcaggcgacgccactcgaaaaccgcgccattgcaaggttctggaacaccatataagaaaaatgattggtagaagtgcggggtgcagccttggtcggggctgtttgcagggccgaagcggaccctgaaaccacgctgtgagacacgccgataaaaccgcagaattccgcggtaaaacaaggttcgcgtagaggtcgatttgcgtacttggaaaatatgtggttatatagccaagttgcctgttgaggtcaaacaccgcggcgggaaacagactggcggatttcccaagcggtcaaagggagctgactgtaaatcagccgcttcgtgcttcagtggttcgaatccactatccgccacgccccgatagctcagtggtagagcacttccttggtaaggaagaggtcgtgagtccaa

SEQ ID NO: 1184 - DNA, 52890 bp, Unknown
  R81_24m  MAG No. k141_15243
gaggcgcttgccaatgcgggcattacccacatcaccggcatcatcgcctctggcaactacttcgtggacacgccccaaaaggtcgaggaggtcatccgactcaccggggctgacgccgtggagatggaaggcgccgccgtggcacaggtcgccgcccgcaatgacgtgccggcactggtgattcgtgccctttccgacaacgccgacaccgattacgaggtattcaaggagttcgacatctccgagtacgccgataccgccgcccgtctggctgtcgacatcgtcaagcgcctgtagtcggcgggctggcccatctcaccatccacgttttgggtatgatgaccacaatatgagcgttttcaaactattgcttataacctgagccatactcggtgttcggcacagcgatgtgcggggttcatcgctggggccacaagccgtaccagttcttctcccgcatgccggtcgctgtgctcaattcgttaagcgacgacaacaccgtcgcgaagcattgaatacacaatgcgcacgctgcactggggtttatctgcagcatgaggagagaaaaaatgactgcaagcgcaaccgcggctgtgaccaaaccggtgaagaaggattcggttcctgagatcatcgccgcttccatggtcggtacggccatcgaattctacgataactactgctattccattgccgctgctagctacttcggcatgatcttcttcacggacgtcgccaagtccaaccagaccctcgccacgctgatggccttcgtgaccttcgccgtttcgttcctcgcccgtccgttcggctccatgctgttcggtcacttcggtgacaagctcggccgtaagaagacgctggttatcgccctgatgaccatgggtatcgccaccttcctggtcggctgcctgcccggttatgagcagattggcgcatggtccgtcgtgattctgtgcatctgccgtgcctgccagggcgtgggcctcgccggcgaatggtccggtgccgcgctggtcgccactgaaaacgctccggccgacaagcgcgccctgtacggttccttcccgaaccttggcgccccgattggcttcttctgcgcttacggcctgaacctgctactcgaatccaacctgagcaaggaacagatgattgccttcggctggcgtatcccgttcctgtgctccgccgtgctggtgatcattggcctgtacgtgcgtgcccgcatgtctgagaccccagtgttccagaaggccactgaagagaagcgcacctccaagcacccgctgcgcgacctgctgccgtactggaaggaagtcgtgctcggcaccgtagccatgggtatcacctataccctgttctacgtactcggcacttggtcgctggcctacggcgtcaagggcttgggcttccagcagggcgagtacctgctcatgcagatgtgctccgtggtgttcttcgccatcttcatcgtggtctcctgcgtgtacgccgacaaggtgggccgcaagaaggtcatgattgccgtgaccgccgccgccttggtgttcagcttcttcgtgccgatgctgctcgtgcactccgccgcccatatcatgatcttcctgtgcgtcggcttcatgatcatgggtggtttgttcggcccctgcggcgcctacctgcctgagctgttcccggtgcacgtgcgttactccggcgccggcctgagctacaacctcgccgccatcttcggtggcgcattcgctccgaccatcgcccaggccctggtcgcctccaagttcggcgttgccggtgtgggctggtacatggccatcatggccgccctcgctctgctcgctctgttcctgattaaggagagcaaggacaaggactacgagctgtaaatagagctccccatattatgctcccgctggcgggagctgtccacgaaagcggactgaggatggccaatgggatttcggttctttgaccaccctcagtctcactgcgttcgacagctcccgccagcgggagcattttgttatgtcgtcccaccaaaaatgaacaatagacgaacttacgtagtttgggcatctcactacgccttgcacgttttactctggaaatcatggatatctggcagatcgtcgtgattgtggtgctcgccgcgctgatactggcgtgggttgccgtcatcgcctacaacaaaggccgcgtttcaggtcggctcgccgccgaacaggacctgtccggcgacgaggatacgcgttctctattcggtgatgatgcgcccgtgcgccccaccgagcgtcgcctgattgaagtcctgcccgaagccctgattgttaccgaccgcaacggcttggtccaatattcaagccccggctcagtgccattcggcctggtctccggcgaccgactcaactcgcgcgaagtcgaggacatcctcactcaggccgccgccgacggtggcgtgcgtgagcgtgaggttcagctgccggtcaatcgcaattcctatccgtcctctaatggccgaggactggaggccggccagtcacgcccgtccaacatgctgtatttgcgtgtgcgcattggcgatatcggcgatgacctgtacgccatcttcatcaacgacatgtccgagcagcgccgtttcgaggccgttcgccgtgactttgtgaccaacgtttcgcacgaactcaagactccggccggtgccatctcgctactggccgaaaccgtgaccgacgccgccgatgatccggacgccgtacggtatttttccggccgtatctccaaggaatccgcgcgcctgaccgaactggtacatcatcttatcgacttgcagaaagcccaaagcccgcaaagtgtgattgatgcgcggcgcatttccgcgctggatgtggcacgcgctgccatcgccgccaatcagacccaagccgactcccgccatgtggatattcgactgagtgtcaacggacagtcagtgcccacgaaggtcgaggagctggccgatggcgaaggttccttggaagaatcaggcagcccggccacgagcggtccgatgatcaaggccgacaaagaggccatgcaaaccgccgtcaagaacctcgtagagaacgccatccattactcgcccgaacacaccactgtggcggtcggcgtgggggagcgcgatggcaaagtcaccattcgcgtggtcgatcagggcatcggcatccccgccaaatcactggaccgcattttcgagcggttctaccgggtcgacccggcccgttcgcgcgagaccggcggttcgggactcggcttggccatcaccaagcactgcgtgcaggagaacggcggtcggatttcggtctggtcgcgtacgggggaggggtcgacgttcaccatcgagctgccggccgccccggatgaggatgacgacgaggcccggccggacgagtcgacacaagcgtagggccttggttggtgcccgatatggtgccattccattgccgcacaatcacacagtgggcgaggtgcgcacaccgtgcgtagcacgattgcgcaattacgtactttcaggaaacagcaggctaacggagaacaaatggttacgatagtatcggaaaactttgcgcctatgcgcacgggaacatacccaagaaaggctactatggcacgcattcttatcgtcgaagacgaggaatcctatcgcgagccgctggtataccagctcacacgcgaggggtacgacgtgtccgccgccgccactggcgaggaaggtctggaactgttcaccaagggcggcatcgatttggtgctgcttgatttgatgctgccgggcattgacggcactgcactgtgccgtcgcattcgtgagcagagccgtgtgccgattattatgctcaccgccaagagcgccgaaatcgataaggtcgttggccttgagattggtgcggacgattatgtgaccaagccgtactctttccgtgagctgctggcccgcatccgtgccgtgatgcgtcgcaatcaggccacggcccaggcttccggcactgtggatgacgatattccgctggtgtgcggcgatatcgccatgcaggtaggccagcatcaggtcaccgtacgcggcgaaaccgtgttcttcccgctcaaggaattcgaactgctcgaatacctgatgcagaacaagggccgtgtgatgacgcgtcaccagctgatcgaccgcatctggggttcggattatgtgggcgacaccaagacgctcgacgtgcatgtcaagcgcgtgcgctccaagatcgaggaagatccggcgcaccccaagtatctgactaccgtgcgcggtctcggatacaagatcgatactcccgcggagtaaatggaaggcggccttcgggccgccttttttgttgtggattgtgggctcgccgcaggcgagtccactccaaaaactacgtagcctcaacgtagcccacaaacatccaagtgttcatcttctgtttactgatttcggttttgggcccttgaaaccaccaatacgcttgtagttgtcatgaattgaccgggcagcgctgagccgcccgcgaatagttgatagagggattaagtaataatcatgcagaagaacatcctcattcgctccattgccgctctgtccggcattgtgatgctcgcttccgtggccgcctgcggcgataacaccgccaccacgaccgacaacagctcctcctccgattccacttccaagtccaccccggtctccggcaacttctcgggcgccggcgcctcctctcagcaggccgccgttgaagcctggatcgccggcttccagggcaccaaccctgaagccaagatcgcctacaacccgtccggttccggcgctggcgtgcagaccttcctgaccggtgccaccgcttgggccggctccgataaggcccttgccgatgacgaagttgagcagtccaagtccgtgtgcactgaaggcaccgccttcgatgtcccggtctacatctccccgatcgccgtggtcttcaacctcaagggtgtttccgatgccggcaagcacatcaacatggacgctgccaccatcgccaagatcttcgacggcaagatcaccaagtggaacgatccggccatcgccgatcagaacaaggacctgaagctgcccgacaccgccatcaccgtcgtgcaccgctccgataagtccggcaccacccagaacttcgtctcctacttcaaggacgtcacccctgacaactggacctacgacctctccgagaactggccgaacgaggttggccagggcgccaagggcacttccggcgtgatctccaccgtcaagcaggccgacggcaccatcggctacgctgacttctcccaggtcggcgacctgggcaccgtggccgtcaaggtcggcgacaagtacaacgagatttccgccgaggccggctccaaggtcatcgaggactccaagcaggacgacaccgttaagggcgacaaccgcatcgtcatcaagatcaaccacgccaccgaggccgagggtgcctacccgatcgtcttggtctcctacgacatcgtctgcccggcctacaaggacaccaagcaggctgagttcgccaaggcttggctgacctacgtgacctccgacgagggccagaaggccgctcaggatgccgccggcaccgctccgctgccctcctccctgaagtctaagatcaccaagtccatcgaggccatcaagaccaagtgatgacgtcggcccgcaagggtcgtgtggactggacctgacaactgaacgatagactgtagtagtaagagcagtcgccgccaactttaagccgcagtcgtaaaccatacggctgcggcttaaagcgggtcaggacccgaacggtttggcaaagtcacagacgaaaaccgcaccatttgaatacttgataaccaccctatataaggagaatccgtgagttcgcaagacaaaacggctgtgcagccagttggaggcaagaccgccgacaaggtgtttcgcggtgtggcatacgcctgcggcatcctgatcctggttgtacttgccgctgtgttcctgttcctgtttttccgcgcctggccactcatcggtggcgatcaggccgccaacagcgacaccgtgtccagctttaccggcggcaaggccagcagcttctggggctacgtgctcccgctgttgttcggtactgtgctcgtgtctttgctggcactgctgattgccttcttcgtgtccatcggcattgcgctgttcatttcgcactatgcacctaagaagctcgccaccgcgctgagctatgtggtcgatctgctggctgccatcccgtccgttatctacggtttgtggggcggcctgattctggtgccggccatctacccgttctggaactgggttgccaaccacttgggcttcattccactgttcgagggcccggccgccaacccgtcgcgcaccgtcgccaccgtggctgtggtgctcgccgttatgattttgccgattatcacctccatgtcccgcgatatcttcatgcagaccccgcgcctgcacgaagaggccgcgctggcgctcggcgccaccaagtgggagatgattcgtctggccgtgctgcctttcggcaagtccggtattgtgtccgcctccatgctggctctcggccgcgcgcttggtgagacgatggccgtgttgatgatcctgtccccgggcctcaactactccatcaagctgctgcaggcctcgcagaaccagaccatcgccgcgaatattgccgcacagtaccctgaagccaacgatctgggcgtctccacgctgattggaaccggtctgattctgttcctgatcacgttcgtggtcaacttcatcgcccgtaagcttaccgagaaagcgactgcgtgatgactgctgctgagaacactgaaaagactccgatggacggcacgcccgaaatcgacttcgatcgtttccgcccgacccgttccgccatccagcgccgtaatatcatggaccgcttcatgtgggccctgatcgcggtggcgtttgtgatcgcctgcatcccgctgatctccctgctgtggaccactatcgtcaacggcatcaagcgcctgaacctgaacttcctgagctacaacatgaccggtgtggtcggtggtagccagaccccgtccggtggttacggcggtgtgctgcacgccatcatcggtactctcgaaatcaccgctggcgctatggttatctccatcccgatcggtttgatgtgcgccgtgtacctggtcgaatactcgaaccgcggcaagctcgccaccacgatctccctgctcgtcgacgtgatgagcggcatcccgtccatcgtggccggcctgttcgccttctcgatgttcacgattctgctgggccccggtaccatcaacggtttcgaaggctccgtggctctctccctgctgatgctgcccaccgtggtcaagtccagcgaggaaatgctgaagatcgtgccgaacgatttgcgtgaggcttccttggctctgggcgttaccaagcagcgcacgattaccaagatcgtgctgcgcaccgctctgccgggcatcgtctccggtgccattctggccatcgcccgcgtgattggtgagaccgcaccgttgctgatgaccgccggctacatctccagcaccaacgtgaacctgttctccggccagatgaccaccctgccggtgttcgtctaccaggagtactcgaagctcagcgcgaactgcccgcccaacgccgacgccacctgcgtgaccacgattccgatggaacgtgcgtgggctgcggctctcgtgctgatcgtcatcgtgctgctgctgaacctcattggccgaatcgtggcgaaggtcttcgccgtcaagaccgagcgctaagccagtcgctaagcctaagccttaagaacacaaggaaatataaggaaacatcatgggacaacgtattgacgtcaaccacgagaacatctattacggcgactttctggccgtggaagatgtgaacatcaacatcgagccgaacaaggtcaccgccttcatcggcccgtccggctgcggcaagtccaccgtgctgcgcaccttggaccgtatgcacgagatcatccccggcgctcacgtcgagggcgaggtgctgctcgaaggcaagaacctgtacgacaaggacgtggatccggtggccgtgcgccgcgacgtcggcatggtcttccagcgcccgaacccgttcccgaccatgtccatccgtgagaacgtgctggccggtgtgcgcctgaacaaccaccacctggccaagtccgacgccgacgatctggtcgagtgggctctgcgcggtgccaacctctgggaagaggtcaaggaccgtcttgacaaccctggcatcggcctgtccggtggccagcagcagcgtctgtgcatcgcccgcgccgtggccgtccacccgcaggtgctgctcatggatgagccctgctccgccttggacccgatttcgaccttggctgtcgaggatctgatcaacgagctcaagagcgactacaccatcgtgatcgtgacccacaacatgcagcaggccgcccgtatcgccgactacaccgccttcttcaacctgaaggcagtgggccagcccggtcacctcgagtacttcgcggacaccatcacgatgttcaacaacccgcaaaacgaagaagccgagcgctacatctccggtcgcttcggctgatcgtttcctgcgcgcagcgtaatgatttgtgcgtaggagaaacggcaaagtccgccgcaaggcgggctttcgcatattcaacgcgagtattgccgagtattatcgttctcgcaacggagcgagctggaatactttgtcggactgggcggcgacttcccgcttcggtcgatcgacgggagaacggcgggtaaagcggtacaagacaagtccgcacgatgaatactctgtgatgaatcttctgtttacggtgcgagtgtggaagaatggtcacagcaaggtccagcaaaggagcataggtgagtactggtctgatcgtcagcatcgtcgttgtcgttattatcgttgtcttgattggttggggcgtcagcgcctataacaacctggtgacgctgaagaaccgtgtgaagaacggttgggcgcaaatcgacgtgcagttgaagcagcgcgccgacctcatcccgaacctggtgaataccgtcaaggggtacgcatcccacgagtctgaagtcttcactcaggtgaccgccgcccgcgccggcgtagtggctgcggccagcaacccgagcacgaccactgctcagcgcgccgccgccgaaaaccagctgtcccgcgccctgttcaacctgcaagccacggctgaggcatatccgcagctgcaagccaaccagaacttcatggatctgcagaaccagctcaaggaactggagaacaagatcgcctacgcccgtcagttctacaacgacgtggtcctgaagctcaacaccgccatcgaaaccgtgccgacgaacatcatcgccggtctgttccactttgagcaggcgcaatacttcgaggccgatgacgcttcccgtcaggtgccacaggtccagttctgacccgcttcaggcccgtccggtaagccgccggccgggcccgtattgtcttaagagagggaagatatgcggatacgattcattcgcgccggaatcatcagcattgttgccacggtggtgttggcagttatcaccttggcgataatcgggacttccgcgttcggcgattcggccgacctcagctaccgcacgctggactatgacgtgaccgccaccgcgaacggtgatttgaaggtcacgcagcatatcgacgtcaagatgcgtgagcgtaccgacagtgacgacaacaccaagccgtggaagcagctgttccagcaatacacgctgaactccggcaccttgactgatatcagcgatatcagcgtgcgcaacgtcaccgacggcatcgactacgcacaacagagcgagcccaagctgcccagtgacgtctcttccgacaaggaatggaacagcgactacgccaaccattggtatgtcgccgatgtgagcgatggcagcgaccatccaaaggcatacacgcccggtaccgatggcctcaagcccagcgcctccgccaccgaagatgacacaaccgtggagatcggctggaatattccggtcaccaccgaggccgacagcatgaagttcgatgtaagcttcaccatgcacgatgtggccaccaaatggaaagacgtggcctccttccaatgggagccgttcggcaagaagaaccaagtgcctatcggcacggtcaccggcaccgtccatttccccaacggcatcaccggcaaaacctcatggacatggctgcacaccgagcgcacctcggaaaccaagcgcaacagcgacggcagctacacgttcacggcctacaacatccacaatggcgactacctcgatgtggtcgcggcgttcgatgccgccaaagccaagggcatcgcccgcaagggaaccggcaatcatctcaaggacctgaaacaggacgaatataagcaacagcagcgctggctcgacaagcaacgattcgctgccagagctcgtctcgtgttctggattgtcagcatcgtgctcggcatcgcgttgtgcgcgtggggtatctgggctgtgatctccagcaaccggcgtgcgcaatacagtggcaacgtcgaatactggcgcgaccagcccggcatcagtccggcttccgcagcccgtctgattcgcgtggtcgatccgtcgacgcgccaatccgatgaagaccgccagctgaccgccaccatgctgtcgctcgccgtcaagaaggccatcgccatttatccggggccgtcggacatgtatcgcggcatcgacatgagccaggccacgccggtgggcttgagccaaatgattgccgccgaccaaggcaagcagtatgcggcaggcatcaccagcaccatcgtgattctgccgctcgccattgatgaggcacccaacgcgcaacagttgggattgagcgaatcggaagatgcgctgctgaacctgctcatcgtcatttctcagcgcgtgggcagcccggtattcgacctgaaccagatgaaggcgacctgccagaactggcaagacggctatattgagctcggcaaattcaccggtgcatgcagcatggaataccagcggctgggtgccacgcgctctgtgggctggcaatggatcctacccggcgtattggccgccgtgctgggatttggttcgctgctggccaacagctttatcggatacccggtggctggtcttatcgggctgccgatattcctggtcggactgttctgctcgatggccggcgcgatgaccgtgctcactgatcaagggcaggatatcgccggccggactctgggccttaagcgttatatggaagacttctccaacttcaccgaccggggtaccgccgatttggccttgtgggattggtatatggtctacgccgccgcgtttggcatttccgatcgcgtgatgcgtgaactggccaaagcatatcctcaggtcaacgatccggcttggctggatgccaacgcctccaactcgttgttctactggaactaccgcccgtatggctggtacagccaccgtcataatggtccattcgaccacgatgctgccgggcagatggacctaggcgttggcggcccagctccggcttacggaggcacgtcgtttgccggcggattctccgacctcggctcgcagctgaactccggtctggcggacatcagctcgaccatcagcgcggcagcaccatccgccgattccggtggcgatttctccagcttcggttcgggcggcggctccggtttcggcggctcgttcggtggctcaggtggcggctcgttcggcgggcggtagcgcatgcctatgtcgaaacgcattgttcgtgccctgggcttaagccttgtcggtgcgctgattcttgccgcactctgtgccggtgccttgattctcggcacagatggtgccgacctgagctaccgcacgcttgattacgatgtgaccgccaccgccgacggcgatcttaaagtcacggagcatatcgatatcaagttgcgcaaacgcaaggatgacgatggcaagaccaaaccgtggagatcggctggaatattcccaccaccgtaaaaccaacagcatcaagttcacggtgagcttcaccatgcatgacgtggccaccaagtggaaggacgtggcgacctgccaatgggagccattcggtgagaacaatcaggtgccgattggtacggtcaccggcacggtgcatttccccaaaggtgtgaccgcgagcaactcgcggacttggctgcacactgaacaaacctcggaaaccggccgaaccaaggatggcagcttcaccttcaccgtaaatgatgtgaaaagcggcgagtacctagacgtggtggccgctttcgacgcggccaaggcgggagatatggctcgtgtcgagaccgacgatcatctgcaggagttgaaggaagacgaagccgacgacgaacggttctggcgcaatctggaacgccaacgcgccacaaggcgcctgaacaactggatgaccaccatatcggccggcctgatattcgggattattggtgttgttgcagccttacgctcctccggacgttcacgttaccgtggctccatcgaatattggcgcgatcgccccgagctgagccccgcatcggcggccaaactcatcgatatcgtgacttccggcgacaaacccgacatttccgagcgccaactcgtcgcgaccttgctttctctggccgtgaagaaagtcattgctgtgttccccggttcggcggacctgtatatcggcgtggatctgaaacaagtttctccggtggagctcagtcagcgaatcgggtccgatccatacaagcgcaataatgcgcgtaccaatagcacgattgtgatgctgtggcagtccgattacggcgtatctgagggatttgatgaatcagtattcgtcgaatccgtatttgatggatctggatctggcggatctggatctgccgcatctagcgtgtccgatgcacaccagcccgatctcagtgcttctgagcgggcattgctctatctgctcaccgtgatttccgagcgcgtaggtcgtacggcatttgacatggatgacatcaaagacgcctgcaaggattggaaagacggctacaaggaactcgaaaagttcaccaatgcgtgcaagaccgaattcgcggcggcggatatcgcgccgaaaaccgagaacggatggctcattcccggggcaatcaccgtgctgatcggtgacgccagcatattcatcaacggtttggccggatatctggtggccggggccctcatcggcattcccctgatgacggtcggcatattctgcttcctgatggggaattcctacgtgctgaccgatcatggtcagcagatggccgggcaatgcttgggtctcaaacgatatatgcaaggcttctcgaacttcaagtaccgtggagtcgcggatttgacgctgtgggattggtatatggtctacgctgccgcatttggcatatccgaccgggtgatgcgggagctggccatggcctatccgcaagtatccgatccggaatggcttgatgccaatgcctccgacacggtgttctattggaattatcgtccgtacgactggtatgggttgcgtttctacaatggctcggcgttcgcggattccgtggctgacagcggattggccggagcggtgccagcgttcgggggcacgtcgttcgcggctgggttctctgacctcggcacgcaattgtcgtacggatttgcggatatcaccgcgacaatcaatgcggcctcgccatccggtggctcaggcggctttggcggtagcagcggcggttccggcggcggttcgttcggtgggcggtaagcgatgtgcttctgaaagtccctatagctttgaaagtaaaaggcccggtgtcataagacatcgggcctttctctcaaaatcgaggtgaggagacctcaacagtcaggtccaacggggcgaaagtctgtggcgccgccgagaagattgcctcgaagctagcgtgacctttctgctacaacacagcataccagcctccaccgaagctcaccagtacactggactgaccaaaccaaggtctactagcgtgccactttggcgcggtgtcgttgtgtcaaccggcataatgacgtctcaaaattcaagaggaggttctcatggtaggcaacgaccatgacaaccgtccgagacaagaccggcaataccgggaaggtctgatgaccggcctgttgatcgccctggccaatcaagttggacagtggtggtcgacggccatcatcattgccgcactggtattgctgggaatgagtctcagacgaggccactgatctatcagcggaacagccggaatccatggggttccggctcctcgttttcgctgaactgggtatgagtaagttgcgttttctattccgtgaagttgcggaaatttcatagattgattgtgcgggcaggccgagagtgtgaaatccaacgggatgcttaggcttgattgtggatatcgagtttccataagtttcacgaagggaatcaccatggcattgttccgtaacctcggaccgttctccaccaccgccatcggccacggcgaaatgccgctgaccatcgaaaacaaccgcggccatgaggtcggcatcgaaaccctgcatgcctcgctggacgccggctgccgccacatcgacaccgcttgggcctactactgctccggcggcgaggagcagaccggtgaaaagctggtgcgcgaggcccttgagacctggaaggggccgaaggacgaggtgctggtggccaccaaggtgggccacttccgcaacttcaccgacggccgccccacgtgggatgtggacggtcgcccggagaacctgattcggcgcggcaaggagagcgcactggcgctcggcgtggacaccatcgacctgctgtacttccaccgcccggacccgaaggtgccgtacaacgagtccgtcgaagccatcaagcagctggtggacgcgggcgtggcgcaggaggccggtatctccaacgcctccatcgagcaaatcgacattgcgcgcggcattctgggcgacaagctcgtggccgtgcagaaccagtactcgccgattcacctggagacccaggacacgctcgactactgcgccaaggtcggtctggccttcgtgtgctggagcccgctcggcggctaccgtcacccctatgatgagaccaagttcgacccgttccgcgaggtcgcggcggcccacggcgtgagctaccagcaggtcgtgctggcatgggagctcgccaagggcgaccacatgttcgtgattcccggcgcccaccaccccgagaccatcctcgactccctgaaggccgaccagctcgaactcacccccgaagaactcgccaagctcggctgattgcccattccccatcctcccgaatttgtgccgctgacgttggcttaacgtcacaaattcgggaggattgattcgtcttgaaggaaccgccatgcgcaaaaaactcatcctcgacctcgataccggcatcgatgacgcgctcgccatcgcatatgccctaggcagtgccgacgagatcgatctgatcggtatcacggccacctacggcaatgtcgcggtgcccctggccgcgcacaacgcgctggcggtactgcacttgttcggccgtgacgacgttccggtctatcccggagtcgaccatcccatcgccccggcaacattgccgaaaatgcgtggcaccacaccagacgagcggacccaggcctacgcgcgctggcagaacggcggcgcggacggctggcaaacggacgcttcgtgggcaccaactcccggctcggtggcggtccaccatcccaacggcatcggcggcgcaatcatccccgactccccgcgcgctccggaagcaccaggctcggcggtcgatttcatcatcaccgccgcgcacgaatacggcccggatctgaccatcgtacctacgggcgcgatgaccaccatggccaccgtattccgcaacgctccggacctgaaggattccggcgtgaacgtgacgttgatgggcggtgccctcacattgcccggcaatgtgagcccggccgccgaagcgaacatctcccaagacccagagtcagcagactatctgttcaagtgtggcgcacgcaccaccatgatcggcctcgacgtgacccaccagaccgcgctcacccgtgagaaagcccatgaatgggcgtctctggggacgccggccggcgacttcctcgtcaccatgaccgactactacatcgacttctacctgaagaaccagccggagatccgcggatgtggactgcacgacccgctggccgtggccgccgcgctcgacccatcgctggtcaccacgttcggcttcaacttacaggtcgatttggagggctcgttccgtggccgcaccattggtgaccgctcgcggctgcaagatttcgacaagcacactcaggttgcgctcggcgtcggcgtgtcggaattcctcgaccgctttatggctcgcgtcaccgccgcggctcgtgggtaaacgcttatgctttggcggtcgtgtcggttgctgaagcgtcggttagtagtgcggacaatgcggttctagcttccggggtgatccacatggtgtgtggataaccctgtggataactagcggtacgattcgtcgtcgtgtatatgcgggatggcatcggtcggtgtgcatatggatgagaataccgatttggccgagcttcgcccgtttctggtggtaatcatggaggaggcgagaaagcgggggtctagtgtgatgctcgttccggccgacgaggggattgagggactgtgccgtatggtgcgtcaaggcttctctgcgctctgagcccagcggcgctctattcggggcacgccattgcagcggtggcgtgcccttttggggatgctcgaatagggaagtaggcaaggatttttcatttggtgccgtccgagctaattggctataaacgtatcgaacgtgcctgtaaccgatggagaaaacgtaaggaaagaattctcggaactttgtcatctgcctgaactgacctttagcagtcggatgccaatcagctgccgtatgacgtgtcggccatgcagtcatcgcaatcgttgctctccggtgtgaggaccgccgcgactttttaagcgataccagagacataccgaggccggagccacgagacgagtaacagtttgcggtagatccccatcgctctactgcagagcatgaaccgccttatcaaaacgttcggccatcagattgatggaatgcatgtcaatgcggcgcatcgcggctcgagataatgcctgagataaggctgatcgcaatgttggcaaccaatgatccgcatatttacggcttacaccgaacaaagacagactctcatcggacatcaatttatctatatcgacttcggtgtcacctaataatgacatctggtgtgagtcgggtagcgacggatcgaatggttcaggattcatgtcaaaagcgggtgccaattgccaggaattattcttacgcaaatacccgtggtttcgtagatggtcatcagtgttgccgatggccgcgccgaacattgctctccgccacagctctatggtgtctcctcctgccctacgcgtaaattctgctagatccaaccagtctccgccgtccccatctcttgcttccagcgcggtcattgcggatatataaggtaatcgctccattcgctcaactgatggtgcagacacgcgatcaaaacggtgagtcaatagcacggtccggcttctctcctccgaatcctttattgcaatgacgcgatgttcgggcactttgatgccggccatgttcgcgatttccaaggtgacggcttcccagccgataacatcccaatcatcgccgttcggtttcggaaatttggccagccacagcgcattacgatccgacaccgaagctttaggtcgtgcgcctccgagtgagccggttgcccgatacaacctgcgtaaggagacatcacttacctcgcggttctgttccaccgcatccgcagtgtccaataactccggcagctttgacagtacgggtactccttcatctcctgccgctggcttgccatcaacaatgaatcgaatggcaccctgtcttgtcagatcgttgacgccgaacaaatattccgactcgctgacacgcgtccgtttaagactgcgggaaaacacctttctgccccaacggtctggggcggaatccgaaaatggaccaagtccagagaagaagaatggggccagcgagcggggcatagatgggaagaggtcgaaggaatcgctgctgattgtgtacgtcgaatcatagcggaacgatagttcgtcgccagtcgcatacaatgtgccggcaggagcttccattccaggccctagcgtaatcagtacagttgattcgatagtttttgccatcagggattcacctccgaacgcgcttcgggagttgttggccagcgcggagacgcccaagatcggtggaataggggtcgcatgcggctacgagtgtgtcagcaagttgcaacacgcgcgcgatggttaacagcgaatctgaccggacagccttgccttgctccagatttgacactgtggtcgggctgacaccagagcggtgtgctacatccgcaaccgtcaacatcagtagtttgcgctgttgcgagaactgttcgcctaggatgcgtaaatcgcgtttggcggtggtgggcacatacttcattgcgatactccgagtgttataacatatagttttccatgaatagaatcatttattcactagtatactattgattatctgctatgcgataccggaatgaggaaggtttagcgtctcgatgcttctgctcatacgcaaaaggactttctgccagcaaatagccagaaagtcctttggtctcacgtgtatatgaggtttacaatcccggaatcaaaccaccgggcggatcgagcgtgaggtattgctcctccagatcgatgtcgggcaccagttcctccacgaacggcaccaacgcggtcttctcgaccacatcctcgcccttggaattctggccggttaccaccggctcggtcaaacgaatcttgagcagggactgagcgggggagtcgaccacatccaccactttgccgaccacttggccggcgggcagtcccagaccgttgccctcgactagacgggcctcaaggccaataagatccttgggataccattcgtcggcttcgagcatatcttctgcgtcgtcggcctcgccatagagttcgacaccgtttagggcctcggcggcattgcggtcgtcgacgccctcaagcttgagaatccaacgatccttgaacgtgcgcgagccctcgacgatgtactcggtctcgccatcctggctgtagagcacggagtccggctcgaagcgccactcgggatcatcggtgtacaggcgcacggtgacttcgcccttcaggccctgtgcgcggccaatacgagcgaccctcagcaactcgagctgctgagggtcgccgtgcatgtcttgctgtgccatgctgtgaatcgttccttatcggttatcgacggacgtccatgatgtcaacgcggaccttgtggtcagacagtgcctgaatcacggtgcgaatcgcgttggcggtgcggccgccacggccgatcacacggccgatgtcttccgggttcacgcgtacacgaagcagttcgccgcgcgcgttctcatgggacttgacggaaacatcgtcgggaaaatcaacgatgttcttgatgaggtgttccacagcctgtgcaagcatagctagcctttcgtttccgctcaggcctcagccggagcttcttcggcggcctcttcagccggggcttcctcagcggcggcagcggcttcggcttcagccttggccttggcggcagcttcggccttggcggccttcagcttctgagcctggttctcgacggccgcgatgcgggcctcggcgtccgggccagcctcaacggtcttcagggtgccttcggcaccttcaaggcccttgtacttctgccagtcgccggtgatgttcagcagcttgaagacgggctcggacggctgagcgccgacgccgagccagtactgagcgcggtcagacttgatctggatggtcgagggctgggtgttggggttgtaggtaccgatctcctcgatgaccttgccgtcacgcttcttgcgggaatcgacgaccaccacacggtagaaggcgtagaacttcttgccctgtcgcttcagacgaatcttggttgccaaaatggctctccttgtaatgctaggtgtgcgggttctcggtttgccatgtggggcatgaccggccggaatccacgtgtcctcgcggctcggggtgtagagggcgccacgcgcgcgcgaataaccgtactagtgtaacgcggaagccggatattgcgcatcggtccggtcgtgacgcacggaatcgccggacggacggcgtgtcggcggcgcacctaccgtcttcatgactgatagcctgattgatggcagtgcgagacgggaaagggggcgctgatcgatgggtgagtgcgtgatcggccccggtgcccgggcgcgtgtggatgcggacgacggattcttcttcggcatgggggccttcgagaccatcgcggtatccggcggcgcgcccttgttgttggacgaccatctgacgcgtttgggtgagacgttgcgatacctcggcatcgaggcgcgtcgcgccgatctggagacgatggttctccgcgcatgcgccggactcggcgcatcggacgattcggccctcaagctcacggtcaccgagcgcaaccgcgtcgtctcgttgagacgcaacccgtatgccgcgccgggggcgaagcgcgtcttccgctgcgacttcgccgatgtgcgcaggaatgaatcctcccccctcgcgcgcatgaagacgctggcgtatgccgaaaacatcatggagaagcgtcgcgcccgtgaccgcgccgtcgacgagccgttgttcctcaatacgcggggcgaggtcgccgaaggggccgtctccaatatcttcgccgtcatcgggggagacgtcgtgacgcctcccgtctcctgcggtctgctgcccggggtcatgcgccatgccgtgatcgggttcacgggggccgtcgaacgcccgatcatgcccgacgagctgcttcgggccgacgaggtgttcctcaccaactccctgatgggcgccatgcccgtggccggtatcggcggcgtggaattcgaaccggggagcgtgtcgcgcgacgtgaacgacacctacgcccgcatggtggcgcggacgcgggcccgggtgcagacgaaggagttccggtgagtgcgcaggtgttcaagctcaggacgttccgaccgcttgccgacatcgtggagcgcgtgcgcggcgaggaacgcttcgcgttcctggactcctcgatgccggggacgcaggggcgctactcgatcctgggactcttcccctatcttgtgatcgaacatgggcggggcggatgcctcgtcgacggcgttgccgtggagggtgatttcctcgatgtcgtgaagaagcggcttggaccctgcgatggcgcgcgcgatccgcgtctgcccctcacgggaggcgcgatcgggtatctgggatacgatttcggccgcgaatcgtgcggcgtgccgaccaggcacgatcccgtcgcggccacaccggaggcgagcatggtcttctacgacctgctactcatcgaggacgtccggtcgcgggcgttgttctgttgctgccaggggcggacgatgacggccgcccacgccctgacatgggcgcaggacctggtggattcatgcccgcccgcccctcatcccgcgcgccgacgttcgctcgccccatgctcctccgatttcacgcgagccgggtacggcgacgccctggcccgtctcgtcgatcatctgcgcgccggcgacgcctacgtcgtcaacatggcgcagcgcctgcgcctggagacgtccgagagcccctatgccatctaccgttatctgcgcacccacaacccggccccgttttccgcctatctgcgcgcaccgggtctcgacgtgtgctgttcgagcatggaacggttcatggagattcgctcgggacatgtggtgacgcgacccatcaaggggacccggccgcgcggcggcacaccggacgaggatcgggcgaaccgcgaggaactcgcccgcagcgagaaggaccacagcgaactgctgatggtcgtggacctcgaacgcaacgacctgtcgatcgtctgcgaaccgggttccgtcggcacggaccccgactttgccatcgagacgtatccttccgtattccatctcgtcgcgaccgtcgaggggacgctgcgcaaggatcgttgcgccgtggacgcggttcgcgccgcgttccccaccggttcgatcaccggcgccccgaaggttcgcgccatgcagatcatcgacgagctcgaacgcgcgccccggggattgtacacgggcagcatcgggtatttctccgatacgggcgattgcgatttcaacgtcgtgatccgcaccatcgtgcgggagggaggcgagacgtcgctcggcgtgggcggaggcatcaccgcggaatccgatttcgacttcgagtacgacgagacgatgcagaaggcccgggcgctgcgggaggccgcttccgttgacagggggagcgtcggcgagtacaatcacgggcaaaacgaataactatcttcagggcagggtgcgattccctaccggtggtacagcccacgagccgcaaggcatgatttggtgagattccaaagccgacagtacagtctggatgagagaagatgaaagtacgttcatgctttgtcgtacgccctgaaatgatgccatatcatttcagggcgttttcgtgttcgcatgaaccttcttttgtatgccttggatagcgtatgggcgcaacatgcttggaggcgtacatggacgatgcgcagtacatgggactcgcgatcgagctggcgaagcgaggggccggatacgtgaaccccaatcccatggtcggcgcggtgatcgtcaaggacgatcggatcatcgggcaggggtatcacgagatgttcggcggattgcacgccgagaggaacgcgttgcggcattgcacgcagtcgcccgccggggcgacgttgtacgtcacgcttgagccgtgctgccattacggcaaaacgccgccatgcacggaggcgatcgtggaaagcggcatcgcaagggtcgtcgtcggaaccttggaccgcaatcccgtggtgtccggcaagggcgtgcgcatgctcgaggaccacggcatacgggtcgatgtgggggtgctggccgacgagtgccggcatctgatacgggtgttcagcaaatacatcaccacgcatacgccgtatgtcatcatgaaatacgccatgacgatggacgggaagatagcgacccataccaatcaatcacggtggatcagcggcgaggagtcgaggcgtcgggtccatcagctccgtcgatccgtcgcggcggtcatggtgggggtgaacacggtgatcgaggacgacccgttgctgacatgccgcatggcacacggaaggaacccggttcgcgtcgtctgcgatacgcgattgaggacgcccctcacctcgcggatcgtgcagacggcgaatgacgtcaggacctatatcgccaccgcctgcgatgacgaacgcaaggcggaggactaccggcggcacggctgcgaaatactcgccgtcggaaggaagggcgaccacgtcgatctggcggacgtggtgcggcgcctgggggatatgcagatggacagcgtgctgctggaaggcgggagcgcgatgaattggagcgccctcgaacagcggatcgtcgatgaggcgcacgtgtacatcgcgccgaagatattcggcggcaccgcgaaaagcccggtgggcggccaaggggtcgccctgccctccgacgccgtcatgctccggccccgcgcctgctcccgagtgggagaggattatctggtggaaagcgaggtggtgtattcatgttcacgggaatagtggaggaagtcggaacggtggcggacatacggaggagcgccgccaactgcacgctgtcggtcgatgccacgaacgtgatggaggacctccatatcggcgacagcatggcggtgaacggcatctgtctgacggtcgtcgatttcgaccggcgacgcttcaccgtcgacgtgatgaatgagacgtggcgcagaacctcgcttggcgtattgcgccgcgggaacggcgtcaacctggaacgggccctgccggtgaacggaaggttcggtggccatatcgtcaccgggcacatcgacggcacgggcagcatatcctccgtgcggcgcgaaggcaatgccgtgtggtaccggatcgcggcgcggaacgagatactcgaaggcatcgtcgagaaaggctcaatcgccgtcgacggcatcagcctgacggtcgcggaggtcacggaaagggacttctcggtatcgatcatcccgcacaccttggcgcagacggtgctgggcgagaaacgggtcggcggcgtggtcaatctcgaaaacgacgtattgggaaaatacgtgcggaacatgatgacgacccggacgggactgacgcaggatctgctgtcccggtgcgggttctgagaaaggatgcatgaatcatgaaccatcagtcggtgcaagcggcgttgcaggcgctgcgggaagggaagctcgttctggtcatcgatgacgaggaccgggagaacgagggggatctcatctgtgccgcgcagtcggccaccacatggaatgtcaatttcatggcaacccacgccaagggattgatctgcatgcccatgagcgagcaactggcccacaagctgatgcttccgcccatggtcgagcacaacaccgataaccatgaaaccgcttttacggtgtccatcgattaccgtggcaccacgaccggcatctccgccgaagagcggggattgacggctcgcatgtgcgtctccgatgacgtggaacccctcgatttccgcagaccggggcatatgtttcccctggtggcgaagaagggcggcgtcctggaacggaacgggcacacggaggcgaccgtcgacctcatgcggttggcgggattgcgtgaatgcggcctgtgctgcgagatcatggacgacgatggccggatgatgaggacccccgacctgacccggttcgcccaggagcatcagatcccgctcctgaccatcaaggaactgcaggaatacaggaaagcgcacgatacgctcgtcgaatgcgtctcgaccgtggcgatgcccacgcgatacggggaattcacggcgcactgctatgtgaacaggttgaacggcgagcatcatgtcgcgctggtcatggggaatctgggcgatgggaccgatgtgttgtgccgggtgcattcggaatgtctgaccggtgacgtcttcggctcgttgcgttgcgattgcggtcagcagttggacgcggcgatgcggacgatcgcggagcatggttcgggcgtgctgctgtacatgcgccaggaagggcggggcatcggtctggtcaacaagctgaaggcctaccgtctgcaggacgagggcatggacacgctcgacgccaatctcgcgttgggattccccggtgacgcgagggagtactacatcggagcgcagattctcagggatctggggatacggtctatgctcctgctgaccaacaatcccgacaaagtgtatcaattggaagactatggaatggagatccgcgacagaataccaatcgaaatcgaagccaatgcttacgacagtttctatctcaaaaccaagaaaaaccgcatgggacatatcctgaacatggaggaggaataaatgcacacgttcgaaggcgatctggtagccgaaaacatcacgataggcatcgttgtggcgaggttcaacgagttcatcacctcaaaactgctggcaggggcgctggacaccctgaaaagggagaatgtccgcgaacaggacatagcggtggcctgggtgccgggcgcctttgagatacccctgatcgcgtcgaagatggccaagagcaagcgctacgatgcgatcatctgcctgggcgcggtcattcggggcagcaccagccactacgattacgtgtgcaacgaggtctcgaagggaatcgcgcagaccagcctcgacaccggtgtgccggtgctgttcggcgtgctgacgacggattccatcgaacaggcgatcgaacgggccggcaccaaagcggggaacaagggttccgagtgcgcgcagggcgcgatcgaaatggtgaatctgatccgctccatggacctctgacggcgaaccacccggctgcgggcgggggtcttccagacgttcccgcccgcttcgcgccacacggccaaggcccgatcgatcgccgcgcccgctaccgcagggtgagcgttgcggccaaagccagatggtcggtgtccggcacttcgaaggacgtcacgccggacggtctgagcccttgggtgaacagaatatggtccagttcgatgcgtggccacttgagccagcgcgggaaggtgagattcgggccggcggcttgaatcagacttgcgtccttgaatccggacttgagcaacgcacggaagctcgggtgatcggtgctcgagttgagatcgcccataacgacgacgatgttgcgattgctgacggattttgcacgggcgagttctcgcagacccagaatgccggccgaccaatccgcgcagccgcgcatcggcgatttcgggtgagccgaacaaagcgtcaccgtgcgattaccggaggttttgagggtgatggcgggaacgtcggcggcagggatggagaccacgttgggcaccgctgcgctcggctcgtagcgggaatagatcacgttgaatccgccgttatcggtctctttggcgtctccgaactgatggtaggggaggagttcgttgatgtcggcttcggtaagacgtgtgatgaggtcgtcggtgacttcctgcaaggccaatacgctgatattgcgttcgcgaatattgcgaatgatttcagcggcgtcggcgcgtccgtatcgacaattcatcgtcataaccgagaactggggcgagagtgtttcacgcgttgtttcacggtgcccatcggggactgtttcgggtccttccttcggagtgtttgaggtgctcgatgtattgctgttatggctttttgacagcgtcggcgaagttgtttcacgggctgtttcgcggtgggattctctgcgtttgccggctgggtcgattgacgtaccccagtagttgatgcgctgtgagctggcaatcagcgcgaccacaataagcgacgacatcgcagtccattcatgttgccatgcggcgaccgcggccagaatcatcaaaggaacccacagcagcggagtcagggcaatcatgtacggaagcggcatacgggcctcgagaccggcgggcagcgcgcttaaggccgtccataacagtgcgatgattgccaccgcgctgaagattgtcgtcatggaagttcctttcgaaatataaattgaaccgagatataacttggctcccctctgcgaggggagccaagttgtgagatcagcggccgaacagtccgccaaggcctccgccgaggttcggtggcagttcagtgccaccgtcgacgttgcccatcatctgttcaaggccggcgggcagggccgggttctgcggcttcttggcgaaggcggaaccgccggtcgaaccggaggatttgccggccagcttgtcgcgcaatgccttctcctcggcctcgcgcttcatcggattgccggatttgccgcctttcttcttgttcttgcccttcttcttgccgccgcccatagccgggccgccgaagccggggatgccgccgcccatgccgccacgattggacatgcgcttcatcatctttgcggcctgctcgaaacgctgcagcaaagcgttcacctgagaaaccgtcacgccggaaccataggcgatacgggcgcggcgggaaccattgataatcgacggatcgcggcgctcggccggggtcatcgagcgaatgattgcctcggtgcggtcgatttccttctcatcgaactgctcgagttccttgcggtgctgggccatgcccggaatcatgccgagcagcgacttcatcgagcccagcttgcgtacctgctgcagctgatcgaggaagtcgtccaggccgaaggagccttcggagattttctcggcggccttgcgggcctcttcctcatcgaactgcttctgcgcctgctcgatgagcgtcatgatgtcgcccatgtcgaggatgcgcgaggccatgcggtccgggtggaagacctcgaaatccttcaggccctcaccgttggaggcgaacaggatcggcttgccggtcacggacgccacggacaacgcggcaccaccgcgggcgtcgccatcgagcttggagagcaccacgccggtgaagtccacgccctcgtcaaaggccttggcggtcttgacggcgtcctggccgatcatcgcgtcgatgacgaacaggatttcgttggggtgcacggcatcgcgaatgtcgcgagcctgcttcatcagctcctcgtccacgcccagacgaccggcggtatcgatgattaccgtgtcgtagagcttctgcttggcgagttcgatggaatcgcgggccaccttcaccgggtcgccggaggtctggcccggagctgcgacggcctcgccgccatcggattggacgcccttttcgggagcatagacgggcacgccggcgcgttcgccgaccacctgcagctgcgtcaccgcgttcggacgctgcaaatcggccgccaccagcagcggcgtgtggccggaatccttgagccagtagccgagcttgccggccagcgtggtcttaccggcaccctgaaggccggcgagcatgatgatcgtcggcgggttctttgcgaagttcagcggacgatcgaccccttggccgagcacgtcggtgagctcctcgttgacgatcttcaccacctgctgggcggggttgagcgcgtcggacacctcggtgcccagtgcacgctcacgcaccttgccggtgaaggaacgcaccacgtcgagcgccacgtcggcgtcgagcagcgcgcggcggatttcacggatcgtaccgtcgatatccgcctcggaaagcttgcccttgctcttcagatgcttgaacgcattcgagagtctgtctgtcaaagatgaaaaagctgccataatgggcaacagtctagccgccacgcgggaaattgcggtgttggggacgactctttccggggattgcgtcgcgtagtagtcagggatgttgggcattcagacggcaaatgccgtgccgtccgctcgtggcgaagccaatcgagtgcttccgataccatggaaaccgtaaagaatcctgtgttttttggaatgcttacgctgttttgaaaatcgctggacaccgcttatacgcagactgccgtgcgctccgaaccatgacgttcgggccaacgcagacatgccgtgcaataaggaaggcccactgatgcccacccaaaaactactcgaacgcaaagccctgatcgttggtatcgtcatcaacgtgctgcaggtcttagccggcatggccgtgttcttcatgaccggcctcaaggccatgttcctcgacttctccttcaccgcgatttccgtcctgtccggaatggtggcggtgtatctctcgtcgcgcacggtgcgaaccaccgagcgcttccccaatggcatgttcgcactggaacccatctacgcgatctgcaaggccattttcaccatgtcgttgttggtgtattcgctgattgacgtgtgccgagtagcgtacgactacttcgtgttcgggtccggcgaacgcattgaaaccggcccggtggtcatctacgagatcctgaccgtaatcgtgtgcttcagcctatacacgtattaccggcgttccaaccgctccatcggcgattccagcaccatgctcaccgccgagtgcaagagcacgttggtcgacggatcgatgtcgttcggcatcggcgtggttgccatcttcctgatgctgctaccggccggcggtccgcttgacttcctgcactacaccggcgatttcttcatcaccgtggctttggtggcattgaccatcaaggagccgttcagcgtgctcaaagaggcgttcgtggaattggtcggcggcgtgcatgacgacgatgagaccaacgcctacgtggaggccgaggcacagcgccatctgcctgccaacaccgactacgagcagacgctgatcttcaagaccggcatgaactacaccgttgacgtgtatctgagcggcatcggcgaaaccattgatgtagctgacctcatcgaatgcaagcgctcgctggagaaggagctcgccaagcgcctgcacatcgtggacgtggacttcgtgtttgactgattgatgggtttgaagcggctacttcaggctccaagtggaaccctgcgggccgtcttcgatggcgatgccggcctcggtcagggcgtcgcgaatctggtcggccttggcgaagtccttggccttgcgggcctcggcgcgggcgttgagctgctcggcaatcagtgcctccagcgccgcatgttcgggcgactcggccgtgccatcagcggcaccgccagcagacacccacggctcggccagcgggtcgagacccaaggtgtcgagcatggcacgcacggcgagcagcgcctcacgcacctcggccttggcggtttcggaatcggcgcggtcagccagctgtgaaagcaacgtattgccggaacggatggcggtgaagatcgcggcggttgcaccagacacattgacgtcgtcattcatggcggccacgaaatcggcgggcaaatcgtcggcggagacggcagcaacctcctcgcgagaaggctgaccgcccagtgccacaccggcgcgctcgatgaagttcgagacacggtcgtatgcggcctgcgcctcgaccaacgcctgatcggaccattcgagcatcgaccggtactgcacggagcccaaagcgtaacgcaccacccaagcggaatgctcggccagcacgctcggcacggacaggccggtgcccagcgacttcgacatcttctcgcccttggcggtcacccatgccgaatgcatccagcgcgcagcagaggggtagccggccgcgcaggtctgcgccatctcgttttcgtggtgggggaagcgcagatccaaaccgccgccgtgaatgtcgaagccatcgcccaggtaacggtgggacatggcggagcattcgatgtgccagccagggcgacccacgccgaacggcgtcgaccaacgggcatcctcgggatcggtgtccttgggggccttccacagggcgaaatcacgcgggtcgtgcttgtcgggggaggcgtcggccgggtcgaccggattgtacttgtcggcaccggtggcgtccacggacgggcccatgcggtcggccacggcagcggcctcatcgacttcggaggtctgcttctggtgggtgagttcgccgtaatgcggccaggatgccacatcgaagtacacgttgccggtgggcttgccgtccgcatccgtgaccacatagccgtggccgttgtcgagaatgcgctgaatcaggtcgatcatgtccgacatgtggccggtggcgcgaggttccacggtgggcggcagtacgccgagcgtgttgtacgcctcggtgaattcgcgctcgtagtaataggcgcgggcccaccaacgctggccggcggccgcggccttatcgaggatcttatcgtcgatatcggtcacattacgcacaaaagtgactttgtaaccgagcttcaaaaaccagcggcgcacgatgtcgaacgccacggcggcacggatatggccgatatgcggtgacgactgcacggtggcgccacacacataaatgccgacttcgcccggtttgagcggcacgaaatggctgacctggtgcgaggcggtgtcatacagattcaggccttctgcggccttggcgacatgcaccggcgtcaggcttgaaggcatgacggaaatgttgaaatcctgcggttcttggctgtttcccataacgctcaagcgtagggtccgaaccagacatgctgaatcgttactcgaagagtttgatgaacgcttcacaggcggggcccgaacgaggtgacagacggatgagaagcgggacaacagtctcgcgagaacacgcctttgaccgctgcggaaactgcgagattcatggatttgccctgctcgttacgcaaacggggaacgctcgtgccacaatagaagtcatggccacaccacaagtgctcattttgcaacatgtcccatgggaacgcccgggacgcatattgtcgaacctcgaggacatcggtcttgagacggtgacgatgaatatcgtcgacaaaaagaaaccggacttgcctgatttcggcgaactggctggcgtggtaatcatgggtgggcctatgggcgcgcttgattacgacaagtatccggggctgaaggcagaagccaagttggcgcgtgccgccgtggcttcaggcaagccgattctcggtgtatgcctggggcatcagattatcgccactgcgcttggtgcgcagctgcgtaagggcgatgcgccggagattgggttcgcgccgatcaagcgtgtggacaagcatgacttcttctccatgtgggataagcagctgacggtgctgcactggcataacgacgtggtgggcttgcccgagggaggccagctgctggcacgttcgtcttccaccaaggtgcaggcattccgactgggatccgcgctgggcatgcagttccatcttgaggtgtgcggctcgctgctggacgaatggctggatgagccgagcatggtcaaggatctcaaggccgcgggtgggtccaagtcccaattgcgcgagcagttcgcccaatacgatcagctactgcatccgctcgccgagcaagtgttctccggttttgcggcccgctgcaactcctacgctcagacgctgaacaaataacgtttgtgggccgccgctgggcaagcgtggcgctacattggtgagtcatgccgacttatgacattggactggaacacgtttcgctcgctttcgccaccaaaaccatcttcactgatgtgacgcagggtgttttcgagggcgaccgcatcggcatcgtcggcaagaacggcgacggcaaatccacgttgctgcacctgttccgcggcacccaggagccggattccggccgcgtgacgaagcgcggcggactcacgttcggcatgcttgaccagcgcgatccgctcgacgacaacgccaccatccgtcaggccgcgctcgaaggccgcgccgactacgaatgggcgtccgacaacacctcccgtgaaatcgtcgaggtattgctcggcggcatgagcctggatgccaaggtcggctccttgtccggcggccagcgtcgccgcgccgatttggcccgacttctgctcaaggattgggatattctcgcgcttgacgagcccaccaaccatctcgacgtggtcactatccactggctcgccgaacatctgaagaaccgctggtccaaaggccagggcgctctgttgctcgtgacccacgatcgctggttcttggacgaggtctgcgaatcgatgtgggaagtccacgatggcgtgatcgagccgttcgagggcgggtattcggcgtatatgctgcagcgcgtggaacgcgaccgccaggctgatgtgcgtgaaacgaagcgccgcaatctggcccgcaaggagctcgcatggctttcgcgcggtgcccgtgcccgttccaccaagcagaagttccacgtcaaggccgcgcgcgagcttattgccgacgtgccgccgatgcgtaacacacttgaactgaagcaaatggccacctcccgtctcggcaaacaggtggtcgatttggtcgacgtgacgcagattttcgaaaaaccgcagggaatggccgatatcgacccggatgtggcggcgctctccgcgtccgcttcccgcgtggatgtggtcaacgccatgtacgccgagccgcagctgcacggttccgttgaggtggcggtcaccgacatgactgacctgcgcctggtggacgccggcgtgccggaagccgtcgaggccgctgaggaagcgcgtaagaaggccgaggccgagagcggcaatccgcagcttgctgacgatcgcgaggttcgtcgcatgaacacgggtggtgaaaccatcggcggtgacactgctgcaacgaattcggatgatggcactgctgcagccggtgtcacctcggctgcacgcaaggtgatggtttccggccgcgagattcttgacgatgtgacttggctgattggccccggcgatcgtttcggcatcgtcggtgcgaacggtgccggcaagtccacattgctgaagttgattgacggttcgattactccgaccgtgggccatgtgaacatcggcaaaaccgtgaagttcgccgtactctcgcagcgcctcgatgagctggagaaactgggccagtacaagatcaaggaagtgctttcccgctataagccgagctacattgtggatggcaaggaagtaacgccgggacagttgatggagcgtctcggctttgaatccgcccagttgatgacgccgattcgcgacctctccggcggacagaagcgccgcatgcagttgctgctcatcctgctcgacgagccgaacgtgctcatcatggacgagcccggcaacgatctggacactgatatgctcgccgtcatggaggatttgctcgatacttggccgggtacgttgatcgtcgtatcccacgaccggtacctgctggagcgcgtcaccgatcagcagttcgcgctgattggcggcaaggtacgccatctgcccggtggtgtgcaggattacctcgatatggttgaggctattaagaacggcaagggattgccggctgacacgcctggcttcgcgggcaccggtagcagctcggcgaagtctggtaggggtaaggcggccgccgtcaatgttgctgcatctctccctcagtccgcttcgcggacagctccctcgtcagagggagccaataacggtgaggactccaccgcgaagctcaccggcaaggccttccacgaggcatccaagcgcgtgaatgccatcgagcgcaagcttgccaaactggaagagcggaagaccgaacttgaggcacagatggccgcccatgacccgagcgactacgagggtctcaacaagctcaatgaacaactcaccgccgtcaatactgaaagcgataatctcgaagccgaatggctcgaactctccgaacaattggagtagcgggagaaaccgtaacgttcacaaggcctcggtagtttgccggggcctaccgctatgcaaactcccacggattaatcaattccacgtcggtaccttcgaagtccttgatattgcgcgtggctatggccgcatcccaggaacaggcaattgccgcaatcatggcgtcttgaatactggtaggtgtgcccctgcgttcgcgttcgacaaggatatgggcataatccgcagctgcctgggtgtcaaatgcgaacgtcctgtcctctaatgtcataagcgccagcttgacggtcgtatctgtgtactttcgtcgtttgccttcaggcatgcgacatattccgaccaacaactcggcgacggtgatggcggtggttgccagattgcttgtatcttggttcctcagccaattggcaacgtgttcgtctggctgtttcttgatgatttcgctgatgacgttggtgtccagaataatcatggccgattcctattcaaaagatactggcggtcgggaatcggcggaatttcgctcggatagtgggagttcccccttgtcgagtccctcaaaatccatgttcttcatgaattcgcggatctcgtcgtagaaattggtctttcgtgtgatttcatgcgccaccgtgccggccagccattcttcaagaatggatcgcacctgagattccatggagcggttgtttttctcagccacttctttgagctgttgaatctgctcatcgggtatttttcggatggtcaatgttgccatgatgcacctccttgttgctgtcataatgctagcataaggtgctgtcattttgcttgcagcacgggtgatgaggtatgcacgcatgaaaaaggcggatatgcatcatgcacatccgccctttgagcttggactgggtctccccgcagtcgccgaatcagcgcccggtaacctcggaaccgacgaccttttcgctcagggcgcgcgggccgcgggtcacggccacggcaccggagcgcaccagctcaatcacaccgtaatgctccaaaagccccagcagcgcatcgatcttaccttcggcaccggtggcctcaatggtcagcgattccggattcacgtccaccacacgcacgcggaagaggcgcacgatctccagcacgtcggaacggttggattcgtcggcggccaccttgatgagcaccagttcgcgttccacggtggagttcgggtcgagctccacgatcttcagcacgtgcagcagcttgttgagctgcttgatgatctgctccagtggcacggcctccacgtcggcggtcaccgtgacgcgtgagatgtccggacgctcggtgggggagacggacagtgagttgatgttgaacgcacgacgggcgaacaggccggcgatacgcgccagcacgcctgggcggttctccaccagcacggacagcgtatgacgctgggaaccaggctgggatgcaggatagttagccatgagtgttctcctctcctcagtgctcgctcgcagcggcagcggcggtctcgtgctcgaacacgccggtcgcatgctcgtccggaccggttcccggagccggggtgccgccggtcagcggcttgatgccgggcttgtacgtcacctcgtcgttggaagcgccggcggctaccatcggccacaccatcgcatccttccacacgcggaaatcaatcagtaccgggcggtcgttgatctggttcgccttttcgatggcggcaatcgcctcttcctcggtgaacgcgcggatacccacgcagccgtatgcctcggccaacttgatgaaatcaggcacttcgagcggcgcatcgccgtcgaccagtgccgccgcaccatcggcaccgtgcgcctcgccatcgagcaggttggtctgcgagtagtggtgctcgtagaacagcgtctgccactgacggaccatgccgtacacggagttgttcagaatcgcgatcttcaccggagcgtggtccaggaacgcggcggccagctcctcagaggtcatctggaaggaaccgtcaccatcgatcagccacaccggcttcttgccctcgaactcgcgggccgagcccacggatgcgccgatggcggctggcagaccgtagcccatcgtgccgaggcctccggaggagatccaagcgtgctggttctcgaaatcgatgaactgcgaagcccacatctggtgctgtcccacaccggtcacccagatggtggacggatcggccatctcagagagctttttgatgacccactgcggggccattgatccgtcggtcggctcatcccacgtcatcgggtattcctcgcgccagccgtcgatcgccttccaccagggggccagattcggcttgccctgaatggcctgcgtgcgctggatttcgggaatcaagtcgtcgagcacggtagccgcatcgcccacgatcggcacgtcgggctgacggttcttgccgatttcagccgggtcgatgtcaatatgaatcacgcgggcggtcggtgcgaaggcgtcgagcttgccggtcacgcggtcgtcgaaacgtgcaccgatggccacaagcaggtcagcgcgctgcacggcaccggttgcggcaatcgtaccgtgcatgcccagcatgccgaggttcttcgggtcggagtcgggaatgatgccgcgtgcgggcagggtcgtgaccacgggggcgccggtcaggtcggccagagccttgacctgtgcgccggcgttggagcgggcggcgccgccacccacatacagcaccgggcggtacgactgagagaacagcttcgccgcgtcggacagcacacggccgtgcgccttggtggtggggttgtagccgggcagaatcatgcgctgcggccatgagtagtacatgtcgccggtctgtgcggtcttggtcagatccacgaccaccgggccggggcggccggtgttggcgatgtagtacgcctcggaaagcacgcgaggaatgtcctgcgcgcgggtcacgaggaaggagtgcttggacaccgggtaggtgatgcccacgatatccgcctcctggaaggcgtcagtgccgatggcctgcacgcccacctgaccggtaatcacgaccatgggcacggagtccatattcgcgtccgcaatggccgtgaccacgttcgtggcacccgggccggaagtcacgatgcacacgcccaccttgccagtggccagtgcgtagccttcggcggcgtggccggcggcctgctcgtggcgcataagcacgaagcggaacttcgtgttgtctttgatctcgtggtagacgggcagaatcgcgccgccaggaatgccgaagacgtcctcgacgccgagatcctccagcgaacgcaccagcgcttgggcgccagtcatcttctcgccatcgacgatggtctgcttatcgggggccgcgttgattttcggcacgccgctgaatgcctgcaaaggcgtgggtaaagccatgattcctctcacctcatagattttgccgcgaacctgcccgaccttgggatggggccgggtgcccgcgtgtctgattccagtcgcttctccgagacttgtggccccggcacgactcgtcgctcatgttggtatcagtctattcgcaaatctgacagcgggcttacttagtccgcgtcttgagcgagtccagtgacttccagcccgcttcggcggccgccagctgcgccttacgcttgctggagcccttaccgatgccgatgatgtcgccgttctcgcccaatgagacgcgcgcggtgaagatctgcgcgtactccgggccggagacctccatatggtagaccggctcatccttgccgaggccgtgcgccttgacggtcagcgaggtcttccagtcaagtgccgggccctcggtggccacttcggcgagcgtgtcgtcaataagccggtgaatcaccttgcgtgcctcgtcgatgccgtgttccaggaaggtcgcgccgatgagcgattccacgatgtcgcacagaatggagttcttctccgcgccgccctgctcggtttccccgtgacccagcagaatgtaggggcccaccttgagcttggttttggcgatggcactcagcgcgtcttcggagacggccttggcacgcatcttggccagttgcccctcggtcatatccgggtgaatggtgaacagcgtttcagtggagaccagttcgagcaccgcgtctcccaggaattcgaggcgttcgtaattggccacgccggggtgctcatgcgagaaggagcgctgggtgagtgcctgcacgagcagatccgggctgagagtggtgcccaacgcttcaagaagctcgttggccggcgtcggctgctgtggggtttcatcactcatgattgttgtatggtccttcacgcgatggtgttgtgttgtgttgtgttgtgttgtgttgtgtgcgatgcgatggtgtacgtaatggtgcacttatgcgaagaccccgccacccgtcgatggcagggccttcattcaagccgttatcgcaggactcacttggtgtgagccggctggatggcggagcggtaggtgcggccgcggtagttaccgcagctcgggcaagccatgtgcggcagggccggagcgccacagttcgggcagttcacggtcgcagcagcggtggccttccagttcgcgcgacgcgagtgcgtgttggcgcgcgaggtcttgtacttaggcagtgccatttgagtatcctctatttcgttcgaacaattgagcttaagcgtccgttatcttaacgcacggctcgtacaaactccgttcaggcgcgcgtcactcggcctgctcgccgttctgctcggcctcgagctgggctttgagccccgccaatccggcaaaacggatatccgtcacatcgtgatgatggtcgggatcctcgttcagatcggcaccgcactgcgagcacaggcccttgcaatccggtcggcacagtggctgcaacggcagcgattcgaccagcgtgtcgcggatcatcgcctcgatgtccgcgaatgcgccgttctccagcagcggatacgtgtcttccgactcgtcctcgccggcgatgatgtcgatctcgtcgtccttcttgttcttgccgcccttgccgttggccttgtcctgacccgactcatacgggaagaacaccgtcacatcaaccggccagtcctcgtcaatcggcttcaggcagcgcgtgcactcgctgacgaatggcgcgaccaggcggccggtgaagatcaggccgtccacaatcgaatcgaactgcccgctcacatgtacgggctcaccatccttgatgccgacgatgctgtcgccaatgccggaaggggccgggaaatcggcgtcaatcggcttggattgaccggcgcgcgaagcaatctgcgctaccggaatggcccacggggaatcttcaactcgtgccatggtatgttcttggtgcctttcgtatgttgactggagttattcgttactggcgttattcgcgttactgatgttgctggtgctgctggcgttactgggcttcgggatagtcgttcagcgtcaggtgcggcatctgttcgccggccgcacgctggcgctcttccagcacgttaagaccggcctgcacatcccgactgagtttgccgagctgctgggacagcccttccatcaccgtagtgcagtactggtccgcgccttgggtcagatggtcggctctggtctgtgcctggtcaagaatcgcgcgcgctttctgccgtgcaagctcggtgacgttctcttggccggccaggaactgtgcctgttcgttggcgtccttgatcatgtcggctgcgcggctttgtgcggaggcgacgatggcgttggactgggtctgtgccgattccagacggcgctcggcctcgcgcatgagggcggaggcgcgctccaactgcaccggcagcattttcttcaactcggaaagctggtcggtgaattcgtcgcggtcaaccttcaccatgccgggggcgaatatgctggacttcgcttcgcccagtgccgcctcgagctggtcgatgatgtcatacaccgtggtgaattcctcgcggctcttgaccgtggccgggtcgtcgtccgtggtttctcgcaggtcgggcatttcgttcatgaacgaggggcgagtgccggcggcctgagcggtctgagcttgtgcccgggtctgctgagctgcttgggcctgcgctttggcctgcatctgtgccggagtaggggtaggcgcggcgggcggcgatccggcgagaacatcggcctcttcggtgggtgccggcgcggcttgcgtagacgcgggcggttccggggcggacggctccggagtggacgatgcggcgtccgcattcggtttggtcagatcgacgtatccagtggggtggtcatcgctcatagtcattagtgcatcagtccttccgctgacgttcctcggccagggcatcggccagcatcggcacgacacaatcgggcaccatgccggtcacgtcgcctccatggcgggccacgtccttgacgatggaactggagatgtgttcaagaatcggatcggccggcaaaaacagggtttcgatgccggcgagcttgcgattgaccagcgccatgccgagctcggcttcatagtcgccgttctggcgcagacccttgacgataacggtggcgccgaccttcttgcagtagtcggtgatcaggccgtcggtggaagaaacagtgacgttcttgcaaccggctttgtcaagggcacggcggatcacgtcgactctggtggcttcggaaaacatcggtgttttcgcggcgttgacggccaccaccacatgcacctcgtcgaaaaaccgcgccgagcgctcgattacatccaagtgtccggcggtaacggggtcatacgagccggggcatactgcgatagtcatgccttatagcctaccgcgaatggtgtgcaatggtgcgcttcgtgcggccacatgttacatgcggagggtttcgcggtttgcgatgggaatctatgatgggatgcagttgaatcgtacagtacgaggaaagaagtgcactatgacttttgctgatctgttctccaatgacgccgaaccgctgcgcaaccccgaccagggtgccggaacctccgtgctggaacgtccggagaccaaggagtcgccggtgcgcgacgatggcggcgacgccgaccgctttgcacactatgtgtccaaggaccgtatcgcggaatcccgcgcgaccggccgtccggtggttgcgctgtgcggcaaggtctgggtgcccaagcacgatccgtccaaataccccgtctgccctgactgcaagcgcatctacgaggaaatgacgcgctgagctgctgcgggttattgcttggctcccctctctgaggggagctgtcgtcgtagacgactgaggggagtagcgggcgcgggtccactggatttcccgaatatgtgacactgaggttgcgctagtgttacatattcacaagcgggaaaatgatggtttgtgtttcagctgccgtatatggatatgtccattatgtggattttcgctgtcggaatcacgatgtgaccaaaggattcgctattttctgcggtttttgatcaccgatgatcagccgttataagtactctcttcatactttcgtaacacgttggccacgggggtagcaatagcgccatatttgttgtcttctcgaaaaggagtggcatatggcgtcttcacaaacgcaagttgccggcaatgaggattccgcaagcaagatatcccagacacagaatgagcccattcaggacagcggctacaccctgtctcgtgttccggccgaggccaagcagccgttctggaggattctggtaatccgtatcggcagcatatgctgcgtctttcagctggtgctcggtgcatccctcggctacggcatgagtttctggggcgcgttctgagcgacaatgctcggatcagtgctattgcaggtgattagctgggcgctgggtactgcggcggcgcgtgaaggcctgtccaccagtctgctgtcccgttggaccggattcggcaaaatgggttccgccatcttcggcggcgtgatggccatttccatggttggatggttcggcgtgcagaactcggtgttcggcgaaagcatggcgaacattctttcgttcactgacttcctcggcaagttcgagaccctgctgtgaagtgtcgggaccggatcattgtttttcccatcaaaagaggaggacgatgatccggccctcgtctcgtataaaaaccgtaaatatatcagtagttcaaggagtgtgccataaccatgacacagacaacggccgtcgcgccggcacaggagccggctttcgaatcagacagccttcatattccggatagcgacaggcgcggatggtggtccatcgcctgcatctggatcggtaattccatcaacgtgtccaccctgatgaccggtgcggtactcggcgcaggactgaccttgtgggatgcattctgggccgcattcatcggttttggcatcattctcgcctacatgtgtttcgtggccatggaagcaaccgacaccggccttcccacctccgccatgtccactgcagccttgggacgcaagggcggacgctacatcatctcaatcattctgggtatctcactgatcggatggttcggtgtgcaggcggcagtctgcggatcctcattctccctgatggtcggtaagctcgggctagacgtttcgccgcaaatctgctctatcgtgctgggcgcgctgatgctcgtcaccgccatcctcggtttcgacggcgtcaagtgggtcaactacatcgcggctcctttgctgttcatcatttgcgcctatggcctgtttgcctccctgtccaatacgggcatgggcacgttgacctcctacgtgcccaaggaaagcatggggctggtagccggtatcaatattgccgtgggcttcttcgccgtcggcggcgccactgtgggcgacttcacccgttacacgcgtgatcgaaaaggtgcagtgctgtccagcatcatcggcatctggccacccatggtcatcctgcttatgatgggtgcgatgctctccgtcgtcaagcccgaatcgggcggcgatgtttcccagatcatggcatccatgggtcttgccggagccgctttgatcgctcttgtgctatccacgtggtccgtcaacgtgggcaacgcctactctgcaggactcgctttcgccgtcatcgccgacaagggagataagggctatcgcgtttccaccaccatcgctggcattcttggcattatccttgccgtggctggcatcatggactacttccagatgttcctgaccgtactttccgcgatgattccagcgctcgcgggctcgacgatcgcagattactggtttgttcgcaaggcccgtccgcaaaacttcaagccacttgacgggttctccgtgcctggtctggtttcgttcatcgtgggatcgatcgtggctctgattaccggtggcacatttgcttcggtgccggcacttgcattccttgaccacccattcttccttggtccggtcaatggcatagtcgtgtccatcgtgctgtatgtggccgtgtgcaagctgatgaagctgccgagcttcgacggtcccattctgttgacgcggaaggggcatggttaccgagtcagaaaacgttttcacattgatggcagcggatgctaaaaaagtggtcatttggaacctgcgtgtcaaggatggcagcagaaattaggcaaaagaaatcacatagtttaataatttttttgtcaacatatgttgagcaagtgctgaaaccgtgtgtgatgatggctaagaaacggtggaattacagcgaaatacgtacttctgtggcatgtgctcagtgtgtgatgaaatgcggcgttcaatcaggcgaaacggcgatgaaaatttcacgagcgccgatttgctcaatgcaaacgaaagccataatctcgtatttaggtttgtggataactgaagtcgacgttccccaatgacgcggaaagctcaccgccgaaggggtgagaacggggatgatgacattcagtacatagagctatttgaggagcatgaaacgatgaggcatcaggtggaacggctgaagcacgcagcgctgaaacgagggataaaaccggcccgtgcactcaccgcaaccctcgtcgccgtcggcatgatggccacggccgccatctccttcgtcctgcccccccccagtgccaatgcggattcaggcaagcccgatggcagcctttgcacacctcagaccattgatttgggggacgatacaagtaaatccacggtcgattccggtgtggccacttatgttggcggcaatatgtacgtgggcgccaacacaggaaactattccgaactgaataaaaatcaggggcctgataaatcatatgccgtggaagccgaaggcctgacgcttgtcaacggcaagctcgccatcaactccgcgaagcaaagctggagtagcagaggcttccgttttggcgtggtcggcttcggtggtcagtaccgtccgaaaagcggtagcgatgtgttggtcgtcggcggcaatagcacgctgacgatgaaagataacaactataacggtgttcaagacgtatccgctctcggtggttgggtgaatggcagcaccgcgcgtggtttcgtgaatgttgatacggagagccagtactacaaagccaagattaagggcaatagcagtatcgccatcaataaccttaacggccaaaactattctcgatccgtttatgacgcaggcaagagtgcagaggacacgggcaacgtcacttataatgacagtgtttcactgggcagcgtcagtgttaatggtgaaaccaaggattattcgaagttcctcacggaaaacgtccagggtgtgtccagcaaactcctgaaggtcaaggcgactggaacggttactgcaggcactgcgtctgctggcacctattcgcgttaccactaccgctacggcgttcccggctatggagagaatacgaagtatgatttcaacttcgttgagggcgctcctgacgcaaaccagcagaaggaaaagctgattaccttcactggtacgcagaacccatcccttgaggtgttcgatgttaatgcctcaatgttggattctgaaggctacagtggtatctctttcgcctttacgaacatctctgatacggcatcagtggttatcaatgtcgatggtcaaaatccgatcatgttcaataatggttggcgcttctggtggaacggtcaggaaatctccaacggttatgtgacgactgacgtgaatggtgcagtcaccaaagagatgcgagacgcatacagcaaggccgcgcagaagatcatgtggaacttcgccgaaactcccaagctcactatcaagggcgggcaagcacttaacggggattatcataagcggggttacccgatggattccaccaagatcctgacctcccgggatgaccccgccgcagccatgcttggcagcattatggtgctgaacggcagcttcgaaagccacgtaaccaccaatggtcgtgtgtatgtcggcggcgacttctccatgtacaacccgaacaacatcggcgtggatatgggcgaaggcgcgacctcctccgtgatcgatatggatcaagaacgccacaaccttccctggaacggtcagctgacatcctcctgttccacgattcagtggtccaaggtcgacgctgatggcaaggtgttgggtggcaccacctggtcggtgtacggtaagaaagacaatgctgttactgcggctaccccgcttaccaccatcaccgataacggttggaacgatggcgatgaggatgatggcaagttctcgcttgctggtcttgctcccaatgccacgtattacatcaaggaaacgtcgaccggcagctatgattatgagctgaacgaaaacatctatcaaatcaatactggtaacgaagacacttcatccgcaaccgtcaccgccgtctatagcaagcaaggtaacgaagtgactgatgcttcggtgaagcttctgatgaatggcaagatcgtcaacaagaagaggggcgcttccctcgaatggtccaaggtcgattccgacgatacggatacaaggcttgccgggtccatgtggaacctgaccaagtacaccgatgaggagcgtgcggatgttgaatctggttggccgaagagcattcatgacaccacggtcgcggtgacaggcgtcagcattgtcggttcggatggcgcggcatacaccgatggccaggatctgggtaataaggcggtcaacaacgtattcacgctgtccgccaccgtcactccgagcggggctccgtccggcgtggtgtggacttcgtcgaacgattactatgccactgttgacgccggtagtggcatcgtgacaccgaagtccaacagcggcaatgattacgtcactattacggcatgctcgacatcaaatgccggtgtctgctcgtccgtgaagttcaaggtgaccggtgccaccgcagccaaggtgacggtttcccccagcgctgcgacggtggttgaaggtaagaccacgcagcttacggcgaccgtcaacccccagcagaatgtgacttggtcgtccaataatgaactggtcgccaaggttggccagaacggtttggtgaccggtgtttccgctggtactgccaccattacggcaagcaccgcggatggcgcatctgcttccgctgaaattaccgtgacatcggcgcagaagtatctcatcctgtactttgattcgaataatcagggaaagtggtacgccaacgacgtgcaggtgcactaccgcttgaacagtggcacttggaccgatcagaagatgactcagatgagcggttcctgcggccagtatgcgtatgcgcggattcctatggacaagatcagcgtggacagccagttcggcttccagcatctggacggtagtgattggtacggcccgggcaatgcgaatgtgccgaagagtgatggcaacttcaagttcaccagtgaagccacactccccgagaacgtgaccatttccgccggtccgagctacagcgccaccgcgccgaacggttgcgccgtgtccgccagcacgcggtcggccaagtccgctaaggcggttcgcaaggctgcgaagactgccacgcaggcgagtggaaccagtcgtgcggccaacgccgctcaggatgagctgaaggatgaagacaccgattcgggtgagttccgcatcagcaatcttgcggacggctactacgttctgaaagaaaccggcgagccgaacggcttcgatgtcggcggcgagtacaagatcaccatcaagaacggtcaggctacgtgggatcccgccaaggccggcaacaagctgccgaacaagcgcaagaccggcatggtcacgtggaacaaggtcgataagactgatggcaccaagctgctgggcggttccgaatggaagctgacccagacgaagggcttctcctgggtgaacggcaaggcatcgtacacggaagagaacaaggggctcgcaaccatcactgattgcgtggactctgactcttcgaaaacgcagtgcgccgcctctaccgaagcctatgcggatatcgacggcaaggccggacagttcagaatcaagggcttggcatggggcgagtatcagctcgtcgaaaccaaggctcctgacggattcaacctcgacagcacgccgcacacgttccgcattggccccgccgaaggctccgatgtgaccggcgactggtacacgtccaacggtttcaacgcgaacaccaccggcgcatacaacgcgaatacggcgttcaccgttgatggtggatccattaccaacacccctggtgtcgtcctgcctggcacgggcggcgaagggttgaacaagatgtacgctgcgggattcctcgcagtggcgattgccgtagccggtctggccttgagcctcaggaggcggcaatcatgattatcgactttgtgagaggggagggcggcccgtagctgttctatgaacgccctctcctaaaaggctgaaaacttaacatcagagaagatataaccaacaaagtaaaggaaaaagaatgaataaggtactcaaaggccttgttgccgtggtctccaccgcggccatggccatcgccggtttcgccggcgcagccagcgccactgcggctgacgccaactacgacatcaccgtgccgaccaccgatacgcacacctactccgtgtaccaggtcttcactggcgatctgagcaagggcacgctgagcaatattaaggccggcacgaacttcaacacgagcaatgctgctggtgacaacggtaaggatcttaacgccgcggaagccgctgagaaaatcgccaaggttagcggcactgctactgatacggagaagctggagaccatctccaagttcgttaacctgaacggtggggcattcggcaccgtttccaaggataagccgctttcggctgccccgggttactacctgttcaaggatcagaatgccgtgacgggcgatgatgcggcaacgctgttcatcgtccaggtcaacggcccggtgactgtgaaccgtaaggccgacaagccgaccctcgaaaagaaggtcaaggacgtcaacgactccaccggcgttgagaccgactggcaggattccgccgattacgatatgaacgacgaggtgccgttccagttgaccgccaccctgccgatgaacgacacggacttcgccgcctacaagacctacaagctggtcttccacgatcagcagtccgctggcctggccttcaagaaggattccgtggtcgtcaagtacaatggccatgttcacgaggaaaagactcttggcactgattcctacactgtcactgagaatcccgcagataaggacaccttcgacatcaccatcgctaacgcgaagtccatcaaggacgctggaggcaagccaatcaacgtcgccgccggcggcaagttcaccgtcgaatacaagtccacgctgaccgtaaacgctgtgatcggctctacgggcaacccgaatgaggcttcccttgagttctccaacaacccgaatgttggcggcgaaggcgaaaccggcaagaccccgaccgacaaggtcattgtgttcacctaccagctggacatcgacaagaccttcaacggtggcaccccagctgacggcgatctgccgaagttcaagctctacaagttcgatagcgccacgaacgattacaccattgaccgtggcgaggtgaccatcaccaaggccgagggcggcaagtacaccgctcccttcaagcgcgttgatgacggcaagtacaagctcgtggaaacccacaccccggcaggcttcaacaccgccgaccccacgctcttcgacattaccgctgaacatgacgtcgagtctgacaacccgcagcttacggtgctcaaaatcaacaccactgccggcaacaccactgccggtacggtcaccgccgatgttgtgaaccagaagggttccaacctgccgtccaccggtggcatgggcaccaccgtgctgtacgctgctggcgctgccatcgtcctggtggctgccttcggcatcgccttcgcggtccgtcgtcgcaacgctcgctgagcgtaacggcctcatcgaatcggctcacgccggtttgatggcaccgggttccggtgccggccacagtcgggcaaaacaacacaactcaatacgcaactggcccggatccgacctcatcgccggatccggccgccattgcccaaacaactgatcggccatcgatcacgcatccgaaacgccgtccttacgttacgaataatcggcaaccacgagccgcgcatcgtccgtgcgcatcgtgtttggcggctgtccgcatcctaaggaaccctgataggggcctgagggaaacccgattcaggaaacacaaaaacaccaacttccaacgaaggtaacacacatgacaagccagaatgagagggctgagatgaaaaacagaacggcaacgcaccgcatcatcgcggcgctgtgctgcatgttcgcactcgtgctcaccaccatcggcttgggcgcgccaacagccgtggcagccgactccacaacggacgccagcgccgcagccggcgcgaacggcagtatcaccgtaacctacgagtatcaggacgccgcactcaacctcgccaccatcaacctctactatctggccgactggtccgcccaaagcggctacactcccgcaggcgatttcgccgatcacagcaaatatccggtcgactgggatatcctcaacgccgaccagcaaaccctgcgcgacttcgccaacaccatggccgggtacatcgcagtgaacaagcccgccgcagacaacacgctcaaaaccgatagtgccggtgttgccaccttcaaccagctgaaagacggcctttacctcgcggtcgtcgctccctacgaaggcaacgtgctcacctgccagaccgccgccatgctcgtcgccctaccgaacgtgcacaagaacgccgacgaacagcgcaccctcagcatcgaaccgaaagcagactgcacggtcccgcccaccaccaccatcagcgtgaacaaggtgtggaaggacaagaactccgccaagcgccccgaaagcgtgaaaatgaacctgctgcaagatggcaaggtctacgattccatcatgctcaacaacgccaacgactggaaatacacgtggaagggcttgcaagccaagcacgagtacactgtggtcgaagcgaacgtgccgggcaactacactgcgctcgtcgaccgtgaaaacaacgattacacggtaaccaacaccgccaggcccgaatcggcgaaaaccggcgcgaacgttgccgtcatcgccgcgatcgtagtcgtactggccgctgccggcatcgcaatcgccgtcgtggtacgcaagaagaaccccacggaaaacgccgcgacaccaacctccccggacgatagcgagtgatgttcggctcaagcgagaaacataccggcaaacgccagaaagaacgccagataacggatagcgacgccgaacgcgtcgcatccgaaggcgccgcgaatcctgaaaccgacgcggcaaccccggaacccaatgcgcagcagtcggagacgatgacccgcgtcgaccgtcgcaaaaaccgcaaaaaagacaatctcggcctgaacctcatcatcgggttcctagtcgtggtgctgatcggcggcctcggcctcatcgcctacccgtccgtggc

SEQ ID NO: 1185 - DNA, 23082 bp, Unknown
  R81_24m  MAG No. k141_15246
accgaagccccgcgcttcgccgcactggtcaagcagaagaccggtctcgacgcccgtatcttcctcaagcgcgaggacttgaaccacaccggcgcgcacaagatcaacaacgcgctcggacaggccttgctcgtcaagcgcatgggcaagacacgcgtgatcgccgaaaccggcgccggccagcacggcgtggccaccgccaccgtgtgcgccatgctcggcctcaagtgccgcatctacatgggccagatcgacgcccgccgtcaggccctgaacgtggcccgcatgcgtatgctcggcgccgaagtggtcgaggtgaccctcggcgacaagattctgaaggatgccatcaacgaggccctgcgtgactgggtcaccaacgtcaaggacacgcactacctgctcggcaccgtcgcgggcccgcacccgttcccggccatggtgcgcgacttccagaagatcatcggcgaggaagccaagcagcagctccaggactggtacggcatcgaccatccggacgcgatctgcgcctgcgtgggcggcggctccaacgccatcggcgtgatgaacgccttcctggacgacgagcgcgtgaacctctacggctacgaagccggcggcaacggccccgaatccggcaagcacgccatccgcttcgcccccggcaccggccagctcggcatgttccagggcgccaagagctacctgctggaaaccgacgaaggccagacgctcgacacctactcgatctccgcaggcctcgactatgcgtccgtgggccccgagcacgcatggctcaaggatatcggccgcgtgaactacagctgggccaccgacgaggaggccatgaacgccttccgcgacctgagccagaccgagggcatcatccccgccatcgaaagctcgcacgccgtggccggcgcgtacaaggccgccgccgatctgaaagccaagggctatgacaaggccgtgatgatcgtgaacatctccggccgaggcgacaaggacatggccaccgccggcaagtggttcggctacctgaccgacgatcaggccgccgcgctcgatgtgaccggcgcccacggcaatactgtcgcctgaacaagaagaggagattgttgattatgaccaatgaagcaaccacgccgtccggccagccgctgggcatcagccacaagcccagcaagtcaggcgctatgttcaccaagttcaaggccgagaacaagcccgccttcatcggctacctgccctacggcttccccaacccggacgtctcgcttgacgccttcaagacaatggtcgagcacggcgtcgacgccgtggaaatcggcctgccgtactccgacccggtcatggacggcccggtcatccaggctgccgcctccatcgccctgaacaacggcgagaccatcaagcgcgtgttcgaggccgtcgaaaccgtggccaacaccggcggcgtgccgctcatcatgagctactggaacctcgtgtaccactacggcgtcgagcgtttcgcccgcgacttcgagaacgccggcggcgccggcctcatcaccccggacctcatcccggacgaggcgggggagtggatcgaagcttccgaccgtcacggactcgaccgcatcttcctggtctccccggactcgtccaccgagcgcctcgaaaccgtggcccgcaacgcgcgcggcttcgtgtacgcggccgcccgcatgggcgtcaccggcgaacgcgccaccatcgacgcctcgcccgaactcctcgtggagcgcacccgtcaggccggtgccgagaacgtgtgcgtgggcatcggcgtgtccaccgccgaacagggcgccaaggtcggctcctacgcggacggcgtcatcgtcggctccgcgctcgtgcacaccctgctcgcggacgacaacaagaccgcacgcgacccgaaggaaggcttgaagctgctcgccgccaagagcgaggaactggccgaaggcatccacaacgcccggtgaacacccggtgcgcctcacgcgggttgtgccgtgacacggtagggtagtcacagagcatcaagcacaacccgcgcgtggacacaccatgagcaccagcaagtagaggcacgatgaatctggcttatattccctcgccgaccttctccaagttcgagatcggcccgttcactatccacatgtacgcgatctgcatcctgatcggcatctgcgtggccgtatggatcctcaccacacgttggaagcggtacggcggcaccttcgaccagattctcgacaccacgctcgtcaccgtgccctgcgcgctggtgggcgcgcgcctctatcactgcatcaccacgccggccgactacttcccgcccaccggcaacttggtcaacatcctcaaggtgtgggaaggcggcatggccatcttcggcggcatctccgtcggcaccttggtggcgttcctgtggtgccgccacaagcactatccgttcgcgatcttcgccgatgccatcgcccccgcgctgcccgtggcccaggccatcggccgactcggcaactggttcaaccaggaactctacggctggcccaccacgttgccgtggggcctgaagctcaacgacgcggacgccatcggcaaatccgaaatctgctattccggcgcgcaatgcccggactacagaaccacgctgttccacccgacgttcctctacgagatgatctggaacctcatcggcgccgcgctcatcatctacctcggccacaagctcgccgaccggctcaaggccggccagcagttcgccatgtacctgatgtggtacggcctgggccgcacctggatcgagaacgtgcgcatcaactactccacggtgatcctgggcctgaggaccaacgtgtggaccgcgatcatcgtcttcgtgctcggctgcatcctgttcgtcgtgctctaccagtacggtccggaccccaaggcgcaggcgcgcgggcttgcggcggtcaccgccgacgagctcgaacgccagagcatcgaaggggaacagcttcgccagaagaagcaggccaagcgcactaagtgacaccacaataaacagcgccgaaacagcgcgaaacacgggaccccaagtcccattgcacagataaggtaggaaaccatgagcaatatcgcaatcgcacccagcatcctgtccgctgacttctgcaacctcgaacgtgatctcaaggccatcgccaacgccgacctggtccacgtcgatgtcatggaccatcatttcgtgccgaacctgaccctgggcgagccgatcgtcggccgcatctgtcaggtcaccgatctgccggtcgacgtgcacctcatgatcgaggacccggaccgttgggctcccgaatacgccaagctcggcgccgcctccatctccttccacatgggtgccacccacgcccccgtgcgtctggcccgacagctgcgcgagatgggctgcaaggcctgcttcgccgtgcgtccggccgaaccggtcgagccgatcttcgatatcctcgacgagttcgacatggtcctcatcatgaccgttgagcccggcttcggcggccagaagttcctcgacaaccagatggccaaggtccgccgcctgcgcgatgagatcacccgccgtggcttgaagacccgcatccaggtcgatggcggcgtgagccccaagaccgcgcacatcgtggccgaggccggcgccgacgtgctcgttgccggttccgccgtgtacggcgccgagaatcccgcccaggccatcgacgacatccgcaccaaggccgaggccgcgttcaaggcctgagctccaagcctgaaccgcaatccacctttcatccataaccgcaagaaaagaatctgaatcacatgaagacgtttgaatccctgttcgccgaactgtccgaaaaggcccagacccgccccgaaggctccctgactgtcgacgagctcgacaagggcacccacttcatcggcaagaagatcatcgaagaggccggcgagacctggatggccgccgaatacgagggtgcggaccgcaccgccgaggaaatgagccagctgctctaccacgtccaggtcatgatgatcaagcacggcctgacgcttgaggacgtctacaagcacctgtgagaggaacgcaaatgctgagaatcgcagtgcccaacaagggcatgctatccgaacccgcgtggaacatgctggccgaggccggctaccgtctgcgcaccaaccctcgccagctggtcgtgcaagatcccgacaatggcatcgagctgttctacctgcgtccgctcgatatcgccgtatacgtgggccgcggcgccatcgacgtcggcatcaccggccaggatctgctcaagaactccggtaccgccgcgctcgagcacatgccgctcggctttggtgcctcgaccttccgtttcgccgcaccgaacgaatccccgatcaccactctggaggatgttcagggcaagcgcgtggccaccacattcgataagctcgtacacgactatctggtcgagcacggcatccaggccgagaccatccacctggacggtgcggtcgaatcctccgtgcagctgggcgtggccgacctcatcgccgacgtggtctccaccggcaccaccctgcgcaacgccggcctgcgcgtgtttgccgaaccgctcatgcactccgaagcctgcctgattcgttcgccgcgtctgaacgagcaggatccgcgtctggccgtgctgacccgccgtctgcaaggcgtgctcactgcgcatcagtatgtgctgatggactatgacattccgatcagcaaggtcgccgccgccgtggccgtgacccccggctttgaaagcccgacgatctccccgctgcacgacaaacagtggaacgccgtgcgagtcatggttcccaaggccaaggtcaatcagctgatggatgatttgtacgaagtcggcgcacgcggcatcatcgttaccgctctgcaagcctcccgcatgtagactgttagtcgatatgaccaaccagaaagtcaacgccagatacagtccggaagcacgtgacatctatttcaccgtgcccaatttgatcagcgcgctgcgaatcatctcgattcctttcatcagcgtgctgatctccaagcatgaggtgattgcggcgctagccctgatcgccatttcctcggcttcggacggactcgacggcatcatcgcgcgcagattcaaccaagtgagcaagatcggtcagattcttgatccgattgccgaccgactgctcattttctgctcgattctggccctcagcgtcgccggcatcatcccatggtggatgctgattatcgtgggactgagggatctgtggatggcgattcaggtgctatggcttgcccagtacggttatggtccgctgcccgtgcatttcgtgggcaaggctggtaccgcgctgctgatgatttccatcgtcggtcttattttcgccgatttgggcaccagtacgttcttccacttgctctacatcgccgcgctggccgccggcatctggggcatcgccatgtattggctcgccggatatatctataccaagcagggcgtcggattgctacgcaaggaactgggggagaagtatggcgcttgaggccacggccccggtctcgttccccatacccaaggagaatgagccggtacgacgccgcgccgtgttctcccactcagtccgaggcgcggaatcgcatcatgcgctttccccggatgacgccgccgccatccgcaccagacgtcgccgtaaaaccaacgacgattcgcttcagctcatcgatgatcttgtcaatcgtccgatggatccgatgttctccgactcacgactggtccatgagcatcgttcgaccttctccatctggtttaatcgcatcgtcgtattcatcatctgcgtcggcgttggctttgcctgcagcctattcgtgcaacagttgcaatccgatccgcgtaagcaggtacggcagactttggccacgcaattggagaatcgcaactcgcagatagacgaactcaccacggacgtcaataatttgcgatcccaagttgacgaacagtccaagaaaatctccggcagcgtgaaaagcgacacgcttatccaagacgaaatggtcaatggtgccacggtggtcgaaggcgaaggaatcaccatgacgctggccgatccaatcgcggcaagccagtcggatcaatcctcctcgacgagagtcggcacctccacgaacatccgagtcatcaccgatctggatctgcaacaactggtctccctgatgtttcaaaacggagccgaagccattgccatcaacggtaataggctcggcgcgcaaacctcgatacgcaaggccggcgggcatattctcatcggcatgaccgcgatacaaagcccctataccattgaagccataggcgataagagcgccttggccgaagcgatgggggagaagagacttgcaagtctttacgattccttcaaggaagccggtatctacccgcaggtgagcaaatccaattcgattacacttgaggcagcagtcactggcgaagtgaagtacgcggaaaggaatgaataatggcagccgttctgggactgatcatcggcgtcgtcatcggcgtgttcgtcaagccggacattccgatcatcgtgcagccatatctgccgattatggtggtcgctgctcttgacgccctgctgggtgccgcgcgagcctatttcgagcgcagcttctccgaccgcgtgttcgtgatctccttcctcgccaacgtggtgacggcaacactgctcgtgttcctcggcaaccagctcggcgtcggttcgcagctgcagacggccgtcatcgtcgtactcggcatccgcatcttctccaacgtgtccgcgatcagacgcttcatcttccgaggctgacaagggtactgacgtatggcacgtaaagcacaatcagacaacatgctggagaaaatgcgcgaccagcatgcacaagacaaggtcaacgaccggatggaaaccgggtcgttccccacggtgcgcaagaagccccggaaggatctcaaccgggccagcaacaaatcacggctactatcctcgattctcattgctctgatgtgcgcgctgctgggtttcgcctacatgagccagatcaataacactaaatccacgtacgaaacgatggacgagagcgaactggtaaggctgctgaacgagtcgaatacgcaaatctcgaatctcgagcagcgtaaaacccagttgaacagccagctcaactcactgaaatcggcggctaacgagcaggagcaggcgcgtaagatcgccaagcaaaacgaagagaccagcggcttgatctccggcagactcccggcgaagggccaaggcgtgaccatccggatcggacgaggctcgacgactaaagtggacgcctcaatcatgttcaacctcatcgaggaactccgcaatgccggcgccgaggtaatcgccatcaataacgtgcgcgtcatcacctccacctacattcaggacgccgaggaaggcttgatcgtggatggcaccaccatcaagcccacatacacggtgaaggccatcggcaatccgcaggagctgtccaacgcagtcgatatcgccggcggtgtgggcgctcagctccaggtgaaatacggatccaacgtcaacgtgcagccttctgacagcatcattatcgacgaagtacgcgaagctacgcaaaaccagtatgcaaagacggtagaataggggattatgaccaacccgattcctagcgcaggcgaaaccaccattatcggcctgcccgcgattaatgtactgcccattaccaccaccggcgatcgaccgctgactcaagaggatctggacaccatcaccagattgtccgagggaacggcattgctgatttccgccaggggagcggtctcaggttctcgttacttgcttgacgaggatgaaatcaccgtcggtcgtgatccgcgagctgatattctgctcgacgactccaccgtatcccgtcagcatgccgtgttccgcagggtcaacggtcagttctttgtggttgacgcaggaagtctgaacggcacctacgtgaaccgtcagcgtgttgatcaggcgtcgctgaagaacggcgacgaaatcatgatcggtaaattccgcctcgtgttcttcacgaaatccgccattatttcccaatagtccacacccagcacggggttagactgattgcagaaattgcaatcatgtgattacaccagtgtgagtcacatgcgagacacgcatgagttaggggagtgccatgggacagacagggctgcatcttcatgtttcgcttgaggaccgtcagaatctgaacgctgacgcgattcagggggagttgttctccaatgtcgatactgaggagatcaaacgcggctaccgtggcactgtggcctccaaggtggccggcatcacgtaccgacagctcgattattgggcacgcaagcagattgttgagccgtccatcacgccgtctcatggctccggttcacgccgactgtactcgtttaaggatgtggtgattctcgctgtatccaagaagctgcttgatgccggtgtgaatctgcagaacgtgacggcggccatcggattcttgactcaacgcagcactgatcagctggccaatgtgaccatcatgtgcgatggtcaaaacgtgcacgaatgcactaccagcgaacagatgctcgaactgttgcaaagcggtaaggcagtgttcgccgtgtcggtgggttcgttgtggcaccagattgagacggccttggaacaggaagaatatattgatcttgaggctaagccgctgacgattgccacgggccgtccgattgatgaactgactgccatgaggatgcgcaagaagctcgaggcacagcgcttgcaacgcgcaaccgcctgatacatgtatggttgttggcgacttgccggctttggtcggcaggtcgctttgttgtatgtgttgcttttgttgcctgccatcttatgtttttatatgttgcggtgattattatgactgattggaggaccgggtgaacgggattgttgtcggattgttgccgggcgttctgtggatggtcgccgtcatctttgctgtgtccatcatcactataacggtcagccgaggccatctgttcacgccgaaacgccggcgaccgccggtcgatccggtcgactggccgatggtgaaaacgcatttcatgtcgtttgcggcggcgctgattccgtttcccgtattgacgttcaccgcggatttgatggatgctcgcatgctcgcgttctacgaccacgcgcaattgcccggagcaatcatcatattcgtgctggtgctgctggaacttgtcgccatgtatctgcaggcacgcaacgcctcagaaaccgaaatggacaagcgtttgggcgttgcttctcaccggaataaggatgatgttgcgaagtagccgattctctgcggcgaggctaatccgcagctagatactactggttcggctaaaatcaccacatactattaaccgataatgtacgttatgtcagattaggttttcggaagaaaccgggaagtggccaaaatcagcggaaaacggcgggataacgccgttcttcgtgcgcgcgtcatggaaggacggcactcccgtttacggctatatccggctattttcggctggaataggcacacgataggcacacgttcggcacacgcgccacaccggccggaccgggccgatacgcataccgggggttgtcatcacacgacgaacccggaaggcgacgacatggcagacacaggcggacacacgacaagacgagacaagggagccggcgcgatcacgaaactcggcaacggcagataccgggcgttcgtcgaactctcccccaacccggccgacggctccagacgacgcaccagcgccaccggccacacccggaccgaagccctgaacaacgcccgcgccaaagcccggcgcatcgaggaggacatcaccctggtggacgaaccgcccaccgtgaacgaatggatgcgacgctggatcgacgagatcgtgacccccagacgcgcacccaacacgacccggtcataccggttccgcatcgaacacgacattacccccgtcatcggcgccgtacgcatggacaggctcaaacccgcccacatacgcctcgtcgaacgccactgcctcgaaggaaaccccgcgaaaggcatccagggcaaatcccccgccacggccgccctgacccacaccgtcctgtccgaggcatgcaaggccgccgtcgccgaaggcatcatccgcagcaaccccgtggacgcggtcgagaagaaccgggtgccgcccgccccaatcgccaccctcacccccggacaggccgccatgctcatccacgccgaaaccgacccgcgatggagcatcatctggcggctcctgttcatcaccgcactgcgcgaaggcgaagccctgggcgtcacgcgcaacgagatcgtccgctccgacggactgccctgcctgctcgtcgaatggcagctcaaggaattcgacggcatcacggacatgcccgccggcttcgaggcccgccggctcgacggccgcacatggctcaccagacccaagaccagatccggacgccggctcatccccctgcccgccgacctcgccgccgacctcgccgcctatacggccgaccatcccgacatcgacccggacaccccattgttccgctccggacgaggcaaccccatccgcaaggaaacactccagaacgcatggcgaaaagcgttggaacgggtggggctgccccgcgtgcgcgtccactccgcacgccacacggcggccaccgccatggcgcgcatcggcgtctccgacctcgcccgccgtgccatcatcggccacgccgacatcggcaccacgaacgccatctacacgcacgtggacgccgacatgctcgccggtgccatcgacggcgtggaacgcctcatcgaaggatagtcagtcgatcaccgcgagatcggacgagcccgtcgcccgtggacacggccgcaccccagtggtcgattaccggcaatcactccgcgtaatacgcggccggattgttttgcatgtcaatacgccgccatgctttgaccagttcgacggtaggcgcgtaccgttcgatggccgaccggctaccgtcgtaccgtccggccatatcattgtcaaaagagataacagtgtctgccatgatatgacgcgcttcctttgccgcaatggcctcgcgatgccaattaccgtcaaaaacgtcgccggcaacccaagcgtcacgttccgccatcgagtcaaacacgcagagattgcccggccacgacccgtcattccatgtcgtgccgataccgtaagtccaataaaaagcgtaataatagcgagttttaaacatgatgcacgctcctcgtatcgtcccgatatcatcgacgccggcatgcatgcgtccccggcgatgtcagaacagcaccgggttcgtcggcctcgccatccggcgggctatgagccgcacgtaatccgaatccatctccgccgccacgcaacgcacgtcctcgatccggcacgcctccaacgtggcgccgctgccggcgaacggctccaacacgagcccgtccggcggcgtgaccagacgcaccagccagcgcatgagctccaacggtttcaccgtcggatggcggatcccgtccacggtcggcctctcccccggcccggccttcggacaataccggaacaccgggtagaatcgggacgcgccgcccatatcgtcatattcggcgcccgtccgggtcatgccccagccgtcaccgggtttcgcgctcgcgcgtggtttgcccttgcggctgacggtgacgccggactgggaatcgagttcttccgccatggtctggtcgaacagcatgttcggcgtgaaacgggcttcggccgtgtagtcggtgcgatccgctttgtccgcgccgtacacgtggttgtcccgcggcccggaaccaaagtcggcgtgccggttcttgttcttcgactccagctcatccgctgcattgcggaacggcacccggcatgcgtcgatatgcagtgcgccggtcccgtgtccgagcaggttgtgggcgagattcccgtccaggggcttgcgggccagacagatgggttcgtgcgcgggtttcaactggctgtaccagccggaccattgctccgcctgttcggtggcgggcgcgagcacatcccattcggatttcgccttcccgccgttcgccgtgctgcttccccagcctttcacgtccgaatattcgacgcctgcggaaccatgcccgactaccttggtccgtttcgctcccagctccctgtccacgagcaggctcgcatccgacccgtgcggcatgccggacgcgtacacccagtcgatctggtcgcgaatctcgaagcccgcatcctcgatcgcgcaggcgagccgatgatacgtgcggctcgcggcgaacgcggccacgtggcctcccggtttcagaacgcgcaggatgccgcgccacagatccacgtcgaacgcgatgccggtccggtcgaatccccggttcatgaaaccgatctcgtacggcgggtcggtgacgacggaatccacgctgttgtccggtaaggaggcgatgagtcggcggcaatcccccggcatcagacggatgcggccgtcatcccattgcataagactcatggctccacatatgcgttcccgccatgcaggcgcgcgccgatcatgagcgcgcgcggacgcgcatccacgtaggcgagccgacggctgtcgcccggataggtgcgcacgttgccgcccccatcccgcgtctcgtagtagacgaccgtcaccggccggccgttcaggctcgcgtcatcccagccgaccaccctgaccggcatgctgcccggcccgtagccgcccgacaggagaagcctggacagcagcctctcccccatatcgcgtctcgaaacaaccatgggaaccggtatgcgtcacccgacccatgcaattcctgttccatatgcaattccgaacccgttttttaatgtccgatccaccccgaatgcccgcgaacggcccacccgcgcattcggtttcgcctgtctcgcgaagcgccccacgttggcccagccatccggcgaaacaagccgccacggggcggtcccgaaccggacgatcaacccatccggacgatgtacggctcagtcgtcgcttttggccctgttgcacgccttgcacagccaacggcagttgtcgggcacggtacgtccgcccttcgactaggcgacgatatggtcggcctccccctcctcgacatcggcgaacgctttgccgcatgcggggcagatgtggttctgccgttcgaaggcggtgcgcacgtttttcctcaactcgtccacgcatttcgccgtggtgatgtccttgtcggactccttgaactcggcgatcatggccggctgggatttgtctcgtggaagccaccagccgtccggcttgtcgttcgccgcgttgaatgtcatgcccagccttgcgcccagctggttgaatgtggtgatttgcctggtgccggccaccatgtccttcgatgcgaccatgttgagccggctgtccgccagcctgcggacctcatcctcggtgagcatgttcgccatgcattcccgccttccgtttcgtctgacgattgcgggtatgcgtttcccgctccgttcggagacggtgatggattgcgataggggaaaagaagccggaaaagaccaccctcccctttcaggcgggcatgccgttcatggtttgcgggccggcaaacgcaaaagccccgaaccttttatggtccggggctcgcctatcgcgatagttcagatccgatcacggtcggaatccttcttttcgccggcccgccggtattcctcggaagcgacatattcgaccgcaaagtcggctatctggtcgcgcagcttcgggaaagtctccctgccggccgtttggcgccggtccatgatccatgcgaacacgcaggtgaggatgaagccgcccatcaggccgtacacgccgatgtcggcccgctggcggagagacagtgtgataccggccgcccaccatccgatgcacagcatgatgcccagcgtatgcacgacgatggcgaacggcgtcttgtcgacttccacgatgtccagccagcactgcaatccaaggacgacgagcaggaacgcgacaagccacaacggcgcctgaaggattccgacgagcagcggcgtatggttcgcggccagccaggcgaggatcggcccgtggttgaatgcgaacacgatcgccataataaataggacgatcgccgtccacgcgagacggcgcacggcttccagactcatgattcctccccctgctgccttcctgtccgattcagccgatcatgccgcagttccgcggcccggcgcgatattcgttcgtcgcgttccgtttgacgccggtattccttccgtatggattccaattcctcggcatcgggtccggtcatggaggacttctttccgtattcgatgcgatccagtttcaggagcttatcaaatcccaacgtggcttgcttcccggtctcgacatccacgatggcgactgttccggctgtcctgtcgacatgggcgtacagggcaaggcgcgatcggtgcaagtcacgaagttctccctgatcgtatttgcaccaatattcttcatcggaatcatccccattcgagtcatggctgtcatcccattccatacggaatccgagttcccgcattttctccctaaccgggtccggcgtgatccctctcaagtcgagattgccggaatccggctccttgaattcgctcctgtcaccctcgaacagcacctttccgaaggagtggagccggtcgagcgtgtaattgggccagctgagattgtatccgccgtgaatccgccgcggattccatggggcgtcgaagtcgaggaacgtggcaccgcctccgccctcccacgagtcgtataccgtgcatgtcacatccgggttcgccttcaaccgccagcgggtctgcacgtagtcgcctgaaatgccgttcggccgtggcctatggttgacgaacactggctcgaagcccagccggatcagttcatcccaaccgtccggtttttccttgacactcagatcgagaatcaccggaggttgcttttccttcttttttccaaataatccgaacatcatcggtttcctttctgattgtcggaactgccttccggcccgtagtcgctatcatccaatgtccattcgcttgtcccgtccggcccggtctcgagcgcgatggtcgtgttgcagaacccgcagcgttccacggtgatggaggtgtgtccgtcggccgtcaatccccggttccaccatggctggaacgggtgcccgcatccggaacacggttgcggattacgtcgcaagtcgttgttctcgcagaggaacagggcgcgggcttcgatgggtggatgccagccatgccagtcgacgggccgcccgtcccatgcggacggcagccggaaatcggtcaggtcggcgggccattccggaccgctcatcggccaagctcctttacgctttcatcgagaatccgttggatttcctcgcccgtgtagaagccgtaccggtcgagccggtcggcgaccgcccgaatcaggggcctgttgttccctgccgcgagccgcgccctgacccacaatgagtccatgatctcgtcggtggagcccatcgccgggtcgatgcggtggatgatcgccgcgttcaccagctccatttgcacgtcgccgccgatgcggagcgcgtcggtccggtattccggatattccagggtcacggcgaatccggccatggagatgatcatctccgtctgcaatcggacggacatatcatcgtccataccggtggcgtactgctggctggtctctccggtatcatcctcccgcagcatgattccttgttgcgtgtatccgaaccgatggtcgaccaccgcatgacccgcctcgtgcagacggaggcgcatcggaggttcgggcggcttcagatgcctgaacgcccggagtttcgcgacccaccagtcgtatgtgtccatcatctgcagcctccgagcatcacgtccaatacgacggccagcgggacgacatcatggttggcatgcagtttgcacgccggcccatacacgccctcctcgggcaggaactcgcaatcgtcgtacccgtcgtcgcgagtccagcggcgaatcgccacaggtggtttgccgcacatgtcgaagttctcgcccttccagcatccggccgcacagccgagtcgcagggccgacgggtcgcattgggcggcgacgagtttcgggtcgtacggcgttggtttcttggttttgctcatatttccagctccttctgctccatggcgggttccacgtccatcgaatccttcaatcccttgatgtgctcgcgtcccaggctccgggtcatgccgagcagcagttccaatgcgggacgttcgcgcgggaaccggcgcgacggcttcacgcatttcaggttttcaccacgcccgtatccggcaacgggagtgtagatgccgacaccgcatgcgccggccgggctcgacctcgcgtaatccacaagggacggcggcacgaccacgtaattcagatcggcgatgaagttgaggccgtgcccggattcgaaatcctgcttgcagcttttcacctcatacgccaggaactcgctttgctccaaaccggacggaagcgtgttgcgtggcttgaaccgcatgaagtccacgcggatcgggtgcgcgagcgtgtagtcgtacgtcacctcattcgcccagtagatgcgcggatccgggtaatgaaacacgtccttgacaagcatgcggcctaaagccgccgtgatgtcggggcggcccatgtgctcccagtcgttcggggcagggttcatgccgttgcctcgattccgaacaggctacgttgggcgagacgccgtttcgacaactccagataatcctcgttcaaatcgatgcccgtgtaccggcaaccatgctcgaatgcggccagcccggtggtgccggagccgttgaacgggtccaatacgtgcccgtcttcgggtgccccggccgtcacgcagcggcgcgccaattccaatgggaacgtggcgaagtggatgttcgtggagttggcgaccgccatgtcccatacgtcgcccgggttcttcaacccgtcggcggaattgtctgtacgccggcgatgctggacggcatgctggccgggcagcagttgttcgtgggtcttccggtcgaacgacattgccgcagcatccggcggggtgacggccagaacgcggatcgcattcaggtcgaacagataccgccggctcttggcgaacacgaggatatgctcgtaggtcgtggacaggcgtcggcgcacgctttgcggcatcggattcgtcttccgccagatcacatcgttcaccggaatccagccatgtgattccaatcgttccgccaaacggtacggcagattcaatagtctcccgttcttgtgccggtcggcgatgttcagccatagggtgccgctgtcacgggtcacacgcaacagctccgcgaacacgctctccagcctctctaaatactcgtctgcggacggttcgagcccgatctggcgcgaattcccgtaatccctcaacccccagtagggcgggctcgtgaccgtacagtccacgctcgaagccggcatgcattgcagggcgtggaatgcgtcatcgtggataagggtcagttccccatccgaataccaagcatccatcacgccaccggcttccagtcgatgtacggtctgccggcctccacccaagccttgtggttgatacgatgccgtttggtcagccggtgcgcccggaatctcgcccatgcgatgagacccggcaccggatggctgtcccgttccgcgatgacggccccgccgcagcaatagcactcccatccgtacgacgccggaaacagtgcggacgccacgagcccgaggaacacgagcgccgcgacggccggcagcgtgacgaggccgaggatgtatccgatccagaacccgctcaccgttccgcctccttcaatagttccccgtcggggccggccaacccgaccctgtgaccgtcaatgatgaagcgcccctgttcgagccggccgtccttcagccagcgtgcagggggtgttgtccgcgggcaggtcgtatgccgggcaatccgccccatcgcagcgcagatgttcgatgccgtacatgttctcggcatgcgttgcgaacggttccacgccattgggtccggatgccgtcgcgaacagcaacgcgatgacggacgcgacgaaccccaaggccatcacggccgtgatccggacgttggctttcacgaattcctcggacggtcccatgaaggcgatgccgcccacgaatgcgatgaccatgccggcgaagcagaacacggacagcacggcgaggatgatggccgtcctttcacccggccgcaccgcctcggacaccgtttccagccacgacgagtaatcggccatcaatccccctcatccttgaagtcatcgagcctgtcggccagaagccgcaaggcgagcgccagcccatgtcgtgcttccggccggtagccgcggctgttgatggtcgcacgccatggcctgccgccgatgtcgagcgtcgccatcgtgtcggcgtcctcgccgtccgtgatatatactccgatgatgtattttcttccggccatcacgccccccagccgaccgggatgtccgcgcttttcgccgtttccaacaggagccggaacgactggatggtatcctccttgccttccatggggtcgaagcggatgccgtcgccattgttcatgccggtctccagcatgaaagccacctgactgtccgccccggggaacgcgagcccggtgcccgcctcgacccattccccgcgatccccgtcccaccgcaggttcagataccgtccgaatccacgatgcacgtccgcgccgacccacatggaccggcagcaggccaggaattcgggtgatgtgatattgatgttgaagccgtttgacgtatcgcccatcatgaatcccacccggtcgccgtccttcccctccacgaacgggataagggtggcgagggtgacggcaagcagggtgaaccaggcgcggtcgccgtccttcaacggtgtccgctccccgttcacgatgctcatgttgacatggttgaacgcgtcgacgatggcggcggactcctcgaaggcggcgggaatttccccgtccccgctcatgtggaacgtgccgtctgggtcgaattcccaatcatattcgaccggattgttgccggtctcgtcgttggtttctacgatgatgcgttcgacgctcattgcttctccttgtccaatacggttctggatactttcagatatcgtgtgccgcccgactggcgtagctggcggttgttgatgctgtcgatgaccggggctgggggatccgtatacgattcatgcgcccggacgatcacatgatgattcgggttgaacccggagtacaggtgcgtgatcgcgaaggtcgccgatagtacgtccagatccttgaaatcgtagatggtgtccgttcggaacccgtcgatgccggtcggcggttcgaccggttcgagaccatggacgccgaacatcgccaccctgaccctcatgtccggatcatgctcgaacaggtgcgcatattcgtcgcgcagcacatcatattcggctatcgcccgtttcgcggtcatcggcatgctctccgggtcggcaagcatacgtttcacgaacgcaatgccctcgtcggtgatgatccggtcatgctgcccgaaatcgaccaagccgcgttccttcaacgcgtcgaaaccataggggccggtataccacgagtcttccttgagcctgtcgacggcgaaaaacagcatggcgtactgggctttcgtgatgctcttcatcgattgtcccccgtccattggctcaggtatccgcgcacgtcggccgccgtgccctccctgtcggagtcgaagccgtccggctgccaggtgccgtctgacataatcagcaggtccagactgatgggatggtcttccgcaccttggctttagaatatgacggcgccggtttcgaccgggtcgccgttcgagaacaggtcatcccagtacacgtcatccgcctccaatgcctcgaccctgccaagaccggcgacggtcttccggtagccatcgagaatcttcccgcgatttctgaccgcttcgatcagccgacttgccgcatgcgtcggatcggcgggcaatagcgcacggaacacgctttcgccgacctcgaacaccagatagtccggatccgaagagcgcgtggcggggatacctgaatcgttcaaccgtttcacggccttgtcggcctcgtccatgatgccgcggtccttgcgccactggtcgtatccgacgtcgaacaggaccgtcatggtcgtctcatagtcggtgtcgaaggtcgttgttttcggatgccaccagccgtcggaaaccgtccagtggatcaggttcccgtcgaattcaaggcgaatgcgccagtagtcgaacggtccgcttcgtgtttcgaatgtggatttgcagtcgaacagtcttctcaggttcgaccattcgtacggtaacatcggcgtgattctgagcagaatgatgttgtcggccatcaaccagtgacagtctgcgaagaaacgaatctcgggcgtgacgacgctcattccctgcaccatcctctctgtttcgtctccacatacatggcgtcgcgcacctcggtgtcgttccaaccccattcgcgggcgagatgcaggtagtgttcgcctatcacatcgatgacggattgacggtatgccgcaaccgccgcagtggtcagccacgtcatccggctcgtacgggccgtggattgaatcttcgcaggtttcgttcgcgttcatgatggttccttttcattccttgcctaacaggtcaagtccggcgcataccgtctcccatacggtcttgtcgtcgaatgcgatgagcatgccggatatgctgtattcgctcgcatgaggcaacgcgtcgccgcaatccacggccgcacgccaggtgccgtcgaacatgccgtagtcgtccagatcgcccgcatacgacacgtccgacggctttgcatggccgagccgtcggaattcctcgtcggtaagaaagcgccattcgcgcgtatcgcgcacgcgcagaccgtctcggttggctcgcagtgtggcgagtatcgccttgcgggcggccgtgtggaatgatgccgttctcatgatgctcgtctccttttcgtcagctccatgcgtccccgttcgacggcagtggcgttatcctcccgcccgacggcgaggccattaaaccgtccgttctacgtgcgacgcgaatttcaacgccttctcgcccttgtcggtcagtgcgtcgaacacttggtcgatgtagtatctgcgttccagcacgcccagctcacgtagccgttgcgattcctccgccggtttgaccacgccatacggtttaagttctttcaggattgcgatgtcccgcccgtccaacaggggcgggtcgtcgggttccagcaatactttcagacggtcggccttgtcctccatgtcggacacaaccgctgccagcgaatccggcatgggcgtatccgcaccgtcgcacaggccgtcccactgtttacgcttgtctttcgccttgtcgaggtattcgtccgctgcgagagtgattatccgcacgcggaactcgtcgaagtcgcagactcctttatgatcgtcgtaatcccaccagacgaaggtgccattcggacgaatcgagcattcgaggaacacgtacaccttgtcagggtcgcggatgtccgctatgcagtcggagtattccgattcgaccagagtgaacttcacgccttccttgctcaaccggtccaataggtcgcggacggattgcagcgtcttctcgatgttcagcatggttcactccttgtccagtcggtgcacgttgctcagcatgtgcgatgcggcgttacggcgcgtctcatacggggtgccgagttcctcgccccgcagccacccctcgaacacggacaccgggtcatgtcggccggagtatttgttgttgcaggattcgcacacatgcatgtagtgttcggccatgtcttccacatccttcgcctcctgttcgtcgccaagcgtgttccggcaccattcggcggtcttgtcgaacttgtctttcagccgcatgagacggtcggtgcgcggcatgggcgcggccagtaggcgtgccagttcgtccaatgcccgttcctcgcccatgtcggctgtatcgaggacggtgttatcctcgacaagctcgtactgcgtgcggacgatgctgatggtgtcgctgtcgggaaggttgacggtgacctcgtatcccgcttgggggtcgaatgcggtgatgcatccggattggtggtcgttgtatacatgccagtccggcagtatgcgggtgacggtgttgaggatgtcgcgtgttttcacttgttttcctccatctcgttgacggtctgttcaatgaggcttatgagcgcgtccaggtcgatgctgcctgaccggtcaacgtacacggttccttcctcactgtggggtacggcggtcttgtacagttcgtcgctgagccatccaaactcgtcggtggcgtcctcgcagagcctgtccacgatttcgttgataggtagattcagcatgttcgttgccctctctcagtcagttccagttcttcggcgcgacgacgacccagccgttcgacaatgggtagacggtgcagtgttcgtccgattccaagtcgtcgtccaacgggttccagtcttcgaggccgtcgtgggcgatttcgtcgttgagtgtcccgctgtggatgcgttcggtttcgacgtggacgtcctccgactggaggaagacgaacgagaacggttcgagcatcggttcgac

SEQ ID NO: 1186 - DNA, 10275 bp, Unknown
  R81_24m  MAG No. k141_15421
caccggacgtgtccgcagccagccaccatccgtaatcagttccccgccataattccgtatcacttgccatcgttgccctccctgggattggtccttatggacgccaccatagggagccgccgccgagccgaacacccgcaatcctcggttatggggacatggctgcggtcgtcgtcctcatttgtgaggacagggcacaatcagcgccggacgccggacatcgcagcttctgccccatcagccccgcacgcacgggatacgcacatagatcatccacgtgccatcatccgaacgggtggtcaattcaccgcccaactcctgcacatgggtgcgatgcatggccagcccacgccccgaccgctcctgcgcggacaggccactctgcgcgtcggcatcgtcacggatatcgttggtctcgcgaatctcaatccattcgggagacagggtgacgaatagcaggtaggaatcagctcccgccggtgcatggcggcggatattcgtgccgatctccgtcatcagcgacagcgcctcggccgccgcctcggggtccacgaccatggcgatgccgttgaccgcggccgtcccccgatagccctgcgcctccagaaactcctcggtatcggtgatctgcgccttcacacgcgtgacgaaggactgcggcatgcccgctgtggattgcgtacggtcatcgccaccggcgttctcgggcacggcattgtcaaccacctcattcgcaatcgctggacagctcccggcgcctaccgggtcacgagccagggcggattctttcgtcggcgaatcaacctgccctgattctgcagtcgccacctcagatgtcccggtgccaccgaccggcaaggactcgtcccggaagccggcgtccattccgctctgctcggtcagaaaatcgatgatgccatgcacttccgcaaaggcacgttggctgcgatccagcacgcgctgccagtcgccaccatcgatgccggctggcgcggccagattattccgggcgatggtcgagatatacgtcagatcgttggacagcgtgtcgtgcagttcgatcgcgagctggttgccgtggcgcagatcggccagcgccgattccatctgctcgttttcgttctcctgattcaccacgcgcttgcgccagcgcaacgcaatgcccagtaataccagcagcacgcttgccgtcagcgccgccgacgccgtgaccagccacgacccggtcaccgcatagacgatggccgccaccgcaagcacaccgatcgggccgaacatcgccagcggatgcttgagttctatatcgatatcaatctgatgatgcttcttgccgtcggcgtgactatacgaatacgacgaatgctgcgaaatgataatcggacgtttcaccggcccgctccccttatgcgccttgcgcttcttctaccgtgtccccacacacccatcggcgccttcatcagtgcaggttcatgcgaatccatgcgccgataagttccttgagattgccggcgccgagcttgtcggccgcacgcatcaaatgcgtgcgcacggtggtttcggtgatggacagttcggcggcgatctgcggcatggtccggccgcgggaccacagttccgcaacctccatctcacgcgcgctcagccggttgtccttctcggccttgatgcgcgcggacgcaacggccgcggtctcgaaccgcacgtcgccaccatcgccccatattttgccggcctgtacctgacgaatcgccacggcctgcaatcgcacatcatcgttcttgctcatgatgccctgtgcgccggcccgggccatctcctgggcatgtcggcccacaatcgaggcggtaatggccagtatcgccgtggtcgcgttttccctgcggattgcacgcaccacatccgggccgttgatgtcgttcatcgcgatatcggccaatagcacagcaggcgggcgtttggtggccgtgcacagctgaatggctttgctgccctcgctcaccggcggcaacaattcgaagtctggcagggccttcgacaaaatcgactgtaatgccatcaaggccatgcggtcgttgtccatgatgagcatggtgggccttggcccatcctgcccgctgatatccggcatatgcctacgtgcgctcagctcttcttcggcttcagcgctgagggcatgggcatcggaatcggcttgcgcggggccggcttcggcttgggcgcggccggcgcggaggccgggaactcgccgctggtcgcctttgcggcggcttcggctgcccacttggcgtactcgtcgaggtcgtcctcctgcgcggcgggcgagaccttggcggcgtcggcgtcagcagcagaatccacatccttgtccgcatactgatcatcaatatcggcgaacgggtcaggagagcccgttcccggctcctgctcgctcagctcttttgccagctcatcgtaatcggtatcggtggtcaggtacttgagctttcgggcaattttctgctgttttgctttttgacgtccgcggcccatctgaccccctgcgattactgtgctgttcgattcatcaacaatagagagtaccactaatagtggcttgttcgttgtcggctcacacttttaccataaaaagcgtttatctgagccctatttaaaggattttcgcatgaccgacgagcagcaactgacagcggcaggcaatgagataagcgcgagcttcctcgcggccaaaaagcgttcggacgaaacgctcgccaagctggaggccaagccgtcgtccttcaccatgttgaccggcgaccgcccgaccggccggctgcacctcggccactacttcggctcgatccgtgagcgtgtcgccatgcaggagcgcggcgtcaacacgaacatcatcatcgccgactaccaggtgatcaccgaccgcgacaccaccgagcacatccaagacaacgtgctgaacctggtgctcgactacatggccgccggcatcgatccgaacaagaccatgatgttcacccactccgccgtgccggccgagaaccagctgctgctgccgttcctgtccctggtcaccgaggctgagctgcaccgtaacccgaccgtgaagtccgagatggaggcgtccggccacgcgttgaccggcctgctgctcacctacccggtgcaccaggcgtgcgacatcctcttctgcaaggccaatgtcgtgccgatcggcaaggacaacctgccgcacgtggaaatcacgcgcaccatcgcccgccgtttcaacgagcgttacgccaagaagaacccggtgttcccggagccggccgccattctgtctgaggcaccggagattccaggtctcgacggccgcaagatgagcaagtcgtacggcaactccatcatgctgggcgccaccgccgaggaaaccgccaagctcatcaagaagagcccgaccgattccgagcgccgcatcaccttcgacccggttgcccgcccgcaggtctccgccctgctgaccaccgccggtctggtgaccggccgcgacccgaaggacatcgccgaggagatcggtgattccggcgccggcgcactcaaggcatacgtcatcgaatcagtcaacgagttcctggccccgcaccgcgagcgccgcgccgagctggccaaggacatggactccattcgtgacatcctgcacgacggcaacaagcgcgccaacgccatcgccgaggagaccctcgaccaggtgcgcgaggccatgggcatgaagtactgattttcccgccgctcgtagcaagacgccatgtcagccccaactgggcaactgacacggcgttttttgcattgcggcgtctgctgtgtcctatcttcacttcgaggggcggatttcttgttttccggaggtctatctccgcttcgaggggctgttgctcaagtaggcgaggcacaaaaacggcggaatgacgttggcgtgaatgggattttatctgagattgagcgcatgaccagccccttgaaacggagatagacctccggaacggctcaaatccgccccttgaaacggagaatcaagcgttagtaactctcaattcaaaaaacacaacatgttttccgtgcaacgcggctatcaagacggacctctggccacttcatgccgatggcttgcatcaatacgtacgctccccgcacagcaatgtcattacgacgtgttgcggcatagcgcgcatggcttccggagtatcggcggcgtatgggtcggcgtccaacaacaccatatcggccgggtcgccggatgcaaggcggtcacggccagtggcggtcgaggctgccagcgaggtgcgcacatcgaggcactgctcgggctggaacggctcgcggtcagagctttcggagccgaacacggcggcggaaatggccagccacgggtccagcggggccacgggcgcatccgagcccatgcgcagcgtggtaccggcgtcgtggagggccctgaacggataagggataccggccgggttggtccagaaacgggtgatgacgtcgcggtcatccatggcgtgctgcggctggatgctggccgtgagccccagctcggcgaaacgcgggatatcgacgggtttgagcatctgtgcgtgctcgatcgatccatgtgcgtgcgtggcggcgactgcgttgagcgcaatggtgttcgcttcgtcgccaatagcgtggcaggcgatgtcgaagccatgctcggtggctaggcgcatatagtcttcgatttgctgcggcgtgtagctcagcgtgccatacgtcggcggctcgatgcccgaatacggcgtggagcagtaggcggagcgggtgttgagcgatccgtccgagatgagcttcatggcgcccacatggccgagcccggtgctgcccggcagtgggttgccggtatgccaacccgcgtcaatggcggcttgcaaccgctcggggtatacaccagcgtccacgcgcaaaccgttaatgccggccgcgaaacgattgatccacgtatcgatgttttcggccatttcataatcgcggatgcccaccacgcccttgcttgcggcgtcctgttcggcctcgcgcagcagacggtcagtctcttcagcagcgcccggcaccttgtcgaaggcggtgtaggcgttgaaccattcgagttcaccgaccagaccggattcgtccacatgtacgccaagcctgcgggccgcggcggagttcacccatccgcagtgcatgtccgcgctggagagggccaccggctgttcgccggtcacggcgtcaattgcagccagtgtgggctgctcgtcgtcggcccacagcgagtgacggaatcgcatgcccaccacgaaggcatctgggtcaagcgtgccggcggcgcggcgctcatccagatgacggcgcaacatgtccatcgcttcggcggcggaacgggcattgatgaggtccagtcggcccagcgtcttagcccattgcgtgaagtgcgtatggcagtcccacaggccgggaataacccacaggccgtcggcgtcgatggtggtttcgtcagcaggtgcggcggccgacgttgggattgagacgctgccagaagcaatggcattcgtcgcgtatgccaacgatgtcgtatgcgccttagtctgcatcgtgccgtccgaagccgagaccgttccagcagggccgacagacgcaacaaccccatcgcgaagcaccacatccacgcggtcctgagaccccggaacaccggcattgacaatacgcaccaagctactcatacccgccatcatgccacctttgcatgaacgccatggagattcgttcaagctgaatcgcgccgtcggcggcgattcccgctggctgcctgcaaacccctacgttccatgtaattgcgggatgcctgcaactgcgatgaacgcccatagtttatccaccgacttatccacatttatccaccgaaaaattgaggcggtagacagggccggtagccggaccctacactgcgaggacaaagcgaacatcacgaaggggtgatcatcatgggtagctcaacggcattgaccgagctgacaatgcagaagtatcaacgaatgcagacgtgcgcagatgttcaacgacgaagcgcatggcacccaccctatgccctgacaacagcattggagcttttgtcaattgaagtaccccgcatatcaagcaaacacagaggccttgcaactacaaccattgttgcggttccacacgccaatgacaaacggcacattgtgggggtcaaagtggttgtatggcctttcccactagacacggtcataatcgagggacaattcacatgcacttcaccagcttgcacatgggccatgttctccgcgtatctcgaacttgaagaactcatcgttctcgctgattccatgatgcgacgagatcgaaggctctgcagaacaaccatcgatgccctttctctgtatctcgatgaggccgaggcccaggtgcgagccgacaaagagaatggcaccaattcgtatttgttccgcgggtataacaaatgccgtcgcgccctgcttttggcgcgctcgggcacagattcctccatggaaacacgaactcgtttggttctcttgaaatacggtctggattgcccgcaggtgaattatccaatattcgtaggaaacaacaccagacccatatatctcgatcttgcataccctgaattcaaggtatgcatcgaatacgaaggctctcatcatgccgggcaatggctgaatgacgcgagacgccgccagatgatcgaagacgctggctggaagtacattcaagtcaccaaattagatattggcgacgaagcgggagaagaggcccttgcccgaagagttgccgagaggatacaggaggttacgggcaaaacggtccagctcacgatgcggcaaaccacccagcaaattagcgatgtccgaaagctacgccgtattccgctgtacaaacggctgaaattcgagcctctgctgccaattattccgacgacgcaggaataataagcccggtagagtcagtccgcaccgtccgcaccgcgctacggtattcaaaacccatttcaaggggctgatttggcctccgccggaggtctacttccgtttcaaggggctaatcatccgctagatcacgtgtatcaatgcccttacgccaacgccattccgccgttttggagccgcgtctactcaggcatcagccccttgaaacggaagtagacctctccagaacgtcaaatcagcccctcgaagtccgttttggcctcaatggttcctgccgaaccacaaaaaagccactcctctaccatacgagccgaccgcacagcaggcacgtgtcatttgccgctgcggacctcggactccatggcttccatgggctcgtcgacgagcacggtgccggacggcagggtgccgggcagcggatcgtccatgtagtggtcgaactcgtagagcatacgctcgttcggcttggcggtcagcaacgaaaccaccacgatgaacagcagcgaaatgatgaacgccggcagcagctcatagatggcgaatacgccgcccaagggcttgacgaggttgtgccagatcagcacggccgccgtgccggacagcatgccggccacggcgccggccttgttggcgcgacgccagtatagcgagcacagcatcaacgggccgaatgaggcgccaagcccggcccacgcataagacaccacctggaagatcgacgagttctggtcgtatgccaccagaataccgaacaggaacatgaccaccagcgtgaccctggccacgatcatgacctgcttgtcggtggccttgcggtgcagcagcccgcggaagatgttctcgcccatggccgaagcgccgatgatcagatacgaggagctggagctcatcgaggccgcgaaaatgccggagaccaccacgccgcacatgaagctcggcagcagggtctgcgccagcacgatgaaaatggtttccgcatcggtggaggtcagcagttcggtgggcatcatcgcgcgccccaccaagccgatgcacactgcgcaacccagcgaaatcacgcaccaggaggtggcgatgattcgggacttgcgcacttcttccacgctgcggatggacaggaagcgcaccagcacctgcggcataccgaagtaacccaggccccacgccagcatggagatgatggtgatgatgccgtagtcggagggcgcgccgaacacggccttgcccgcctcgacgagctgctggccggtggccgggtccagcttgggcgcggccacctgcgtgccggacaggtagccggggatggcacgcaggaattccacggtgttgtcgatgccgcccgcgctggccacggtgccgatgaacaccaccgcgagcgcgaagaacatgagcatgccttgaatgaagtcggtcatcaccacggacaagtagccgcccaccacggtgtagacgaacacgaccaccgcgccgatgatcatcatgacgtggtagtcgaaaccgaacaacgtggcgaacagcttgcccacggtcacgaagcagctgcccacgtacacgctgaagaacaccaggatgatcacggccgcgatggtggagaccacgcccttcttgtcatggaaacgcttggcgaagaagtcaggaatggtgatggcatcgccggccactaccgagtagcggcgcagtcgccgggccacaagcttccagttgagataggtgccgagcgccagtccgatggcggtccacatcgggtcggccgcgccggtgaagtaggccaggcccggcaggcccatcagcagccagccgctcatgtcggaggcttcggcgctcagggccgtgagccacggccccacgccgcgcccgcccgcaaagtattccttggaagaggagttggagcgtttggagtagatgaatccgatggacagcatggccgcaaaatagatgaccatggccagcagaatccagaaatcgttggccaactgcgacacctccccaatcatgacgccaagcggctaccgccatggcagaactatgtgctgatatgcgtgctgatatgcgattgacgccggagcggcgtcatacagaccgtcacagccgtgaatacggccgcaacgcacttcgcctgatggtagtggatacaagggctcaagcaccttccaccgtttccatactgagacgctgttttatccgagctccccacctgaggggagccaagatgacggtcagatgtcgtagcgccaggacttgtcggtcaccacgcgggccatcgccaagccgatcggcagacagataatcaccatgaacgcacggaacgcccagtccagcgcattcatggtctggaagctgccgaggtaccacatggcacggtacatatacagaccgggcaccatgatcacgatcgacggcacggtcaggcagatgcgcgggtagccgaggtgcggcggtagccagccacgtcgcacggatgaacgccacgccgatgccagaatgcccgccaggaacgcgccgatgaaggtagccatctcgggtgccacgttgaagtcctgcaattccaagcgcagcgtgtccgtgatcgcaccgatcagggcggcggccaggcacatgcgctgcggcgaattgaacagcacggagaagccccacacgccgacgaacgccgccacgaaccgcagcaatccgttgacccacgggtcaagccccagcggttcaaagccttccgggtgcaggtgcaccatcacggccacggcccagcctgccagcgtggccatcaggatgatgcacagcacgtacgccacgcgctggatgcccgaggggaagtcgattttcgccatgtcgagtccgccggtgatgagcgggaaaccggggatcacgaacagcatggcgccaatgtaggccgtatcgtgcgagagcgcgactgggtcgaaaatgccgatgagtcgcagggtgccggtgcaggcgagcgccgccgcggccacgcacacaaaggtgacgaagaactggttcagatggtatgcaaacagccggcgacgcatccactggccaaggcccgcgcccacgaacgcaccgatcatgtcgtatgggccaccgccgagcaggaacacgaaggccgcgcaggccagggcggaggccagaccggagaaccacggcttgtacagcggcttgcgacgctcaatcagatcgagtcgctcgtgcgcctgccgcacggtgataccgcccttggccttctcttcgtcggagcgctcgttgaagtgttcggcgtattccttgggcacgcgattcttgc

SEQ ID NO: 1187 - DNA, 3878 bp, Unknown
  R81_24m  MAG No. k141_15792
agccggatcgatcatgtccacgcggttggaggcaccgattaccatcacattgtcgagtgattccacgccgtcgagttcggagaggaactggggcacaatcgtggtctccacatcggaggagacgccggagccgcgggtgcgtagcagcgaatccatctcatcgatgaacacgaccaccggattgccgtccgcggcgcgttcacgggcgcgctggaaaatcaggcgaatcagtcgttcggattcaccgacgtatttgttgagcagttccgggcccttgacggacaggaacacgcccttgacatgggtttcggccgggctgattgcgccgtcgccattcgaatcgtaaccaccctcgcatagggcgttcgccacggccttggcaatcatcgtcttgccgttgccgggcggaccgtacagcagcacgccctttggcggcttcaaatcgtagcgctcaaacagcgcacgatgctggaacggcagttggacggcgtccctgatacgaccgatctcactatccaggccgccgatgtcggcgaacgtgacatccggggtctcctccagcaccagatccttgtcgccctcggcgggcagcacttcgatggcgaggcggacggacggatcgacgataatacggtcgccctgattgatgcccgcatacgcgagcgcgccggaacggcggatgagcacgggattgccggaggcgtcggtaacgatcagtcgaccgtcgtcaagtacctgcttgacactgcgaatctggcccacggtgtcagcatcgcgctgctcgaccagcacgagcttctcgttgagcatcacggtggccccggcggtcaggcgggcggcattgacgttggaggccacgggcaccaccatgcggcgggtgccggaaatgacttcggccgacgcgtgctggatgccgtcttcatcggtgcgggtggaatcgaccttgaccatggtggcgaaggtgagcggcggctgagcgagctgggcgagctgtgacttcgccttggtcagttccttgccggcgcggctcagcgcttcggcgagcgcatggttcttggccatcaggcgatcgttcagcgcggcgagatcttcggtgtcgctcatgcgggttcttcgcttcccttctatccgggattttcggcaacttatggcagtcggcagaccctattcgttgccgtcggcggatttcctgttacgtataacagtacgcacttttcgcaccacgaaccatacgatgaccacaatcacggccgcgatgaccacgtcctcgaacacgccgagcgcgccttgaatcgagcaccactggtcgccgagcaggtaaccggcggaaacgaggatggtgttccacacggccgagccgagcagggtccagccggtgaagtgcaggaagttcatgcggttgaatccggcgggaatcgaaatcagcgagcgtaccacgggaatcacgcggccgatgagcaccgaccatgtgccgtatttggtgaaccagtcgttggctttgctcacgtctttgcggctgacgccggggattttgtctgccgcgagattgatgcgatgcaggcccacccagcgggagatgccgtacaaggtccaggcacccagtacggagccgatggtggcccagatgattgcgcccggcagactcagggtgccgcgtgcggcggtgaagccggagagcggaaggatgacttcggacgggatgggcgggaagatggattcgagggcgatggccaaggccacgccgataccgccgatggtttccatcagcatgatcagccagtcggtgatggtgccgatcaggccgggttcggtggtggtgcagatgggtgtggggtcggtcgcaagaatagtggcggctgccatggaaaaactcatagagggcattgtcccaaggttttcccagaatcagaagcatgacgcaagaagatgtgcattttgttgacaagtccgccgagagcgaagttgggagcccggctggttctgcggtttctgtgccgacgctgagcaagcccggcctgctggttatggatgtggactccacgctcattgacgaagaggttatcgacgagttgggcgtggtggctggctgcggtgaggagattgccggagtgaccgcacgcgccatgcgcggcgaactggagttctgcgacgccttgcgcgctcgtgtggcgctgctgaaggggctgccggtttccgcgttcgatacggtgcatgacaagctgcatttcaccaagggtgcgctggagcttatcgacacgctgcatgaacacggttggaaggtcggcgtggtgtccggcggcttccatgaagtggtcgatatgctggcggccgagggccatatcgactattggattgccaaccggcttgaggttgccgatgggtgcttgaccggcaaggtgctcggcgaaatcgtgagcaagaccgtgaagttgcacgccttgcagacatgggcggaccgtttgggtattccgatgagccagaccgtggctgtgggcgatggcgccaacgatattccgatgattcaggccgccggcctgggtctcgcgttctgtgccaagccaaagacccagctcgccgccgacaaagccatcaacgaccgcgacctaacccacgtactcgattacctgcgccggtaaaattttaccgacctcggctccggcacttatagttgagccatgactacttcaggcgcagaacagttgacgcttgcggggctggctccccgcaagcggcgtaaacgtgcgcctgcggagcatacgccggccgagcagcatcccatagcgcaagtcgtgctggatgtgcaggcgctccacctcggtcagacattcgactacttcattgatgaaaaagacagcgaggccgcacaaccgggtgtgctggtgcgcgtgcggtttggcggtcagagggtcagcggcgtgatctgggcacgcaccgataccagcgatacgccgcgctcttcgattcgctatatcgagcgagtgctaagccccgatgtactggttcccgcttcgatgcgtgaggatatcggtctggttgccaaagcctatggcggcacacgggccaatattctgcgtttcgccgtgccaccgcgcgtggccaaggtagagaccgagcagcggttggccgcgtcgttccgtcggccggtcggcggctcattgccggataatacgcagggtggttttgccgggcgtggcaccaatcccgatgggaccaaacctgctggctctacctttgccgttgccagtaccgtttcggagggagctgcgcaggggtatcgtcgtctgaccgccaattacgccgatgtcaatgtgcttcatgacgcgcttaccggtcaacgtttccaatcttttgtgtttgattcgctgcccggtgcacaggagtggcaacgaaacatggcatggatggtggccactgcgttgagtgccggtaaggctgccgtggttgaattgcccaccatgcgcgaggtcgaagacctgatgcctatgctgcgcaattatggactcaaaccgttcgccccggcacccgccggcggctgggtgggcgacgtcgccgtgctcaatgcggagaccatgcctgcggccgaccggtatcgcacctatctggctgtggcgttgggacaggtgaaggtggtgatcggcacccgtgcggtgatgtatgcgccggttgaaggcccggcgctgttcgccattctggaggatgccgcctatcagaacatggacggtatgatgccatatccacaggcccgtggcgtgatgcggctgcgcgccaagtcccatggcggcgtgttcgtggccatggccaatgcgcgcaccccgcaaagccagtgggaaaacaccggcccggatacggtggagaccccagtgagcggctattccacc

SEQ ID NO: 1188 - DNA, 17808 bp, Unknown
  R81_24m  MAG No. k141_15803
aaggccggttcaccgaatcttctggcttcggtgctcgtggtggtggcgttcctcagcttgcaggacccccgcgagcgcccggatgacaagcgtgaggaagccgaccgcattcataaccggtatgcggatgaaaccagtgattttcttacggcgttgaatatctgggatcgcgtattccaggcggatggcgatccgagcaacaatgcgttgcgccgtatctgcagaaccgaatatttcagctggctcaggatgtgccagtggaaggatctggtctctcagctcaggcagatgtgcaaggagctgaagttcaaggtcggcgacccgttgcccgcctcccgcccaggcttggagattcgccagctgccgttgaatcagcaggccgcgcattcgctgtgctgctcgtgggatgcggatggcatccacaagtcgatgctcgccggattgctgtcgatgatgggcatgcaggtggtgcgtgagcccaaggcctccgatttcgcggggctgaccggtgcggcgcgcgcccgtgcgatgaaacgcgcccagaagcagtcgaagaacgattatcagggcgcgcgcggcacccgtttcgccctgttccccgcctccgccgtggccaagaagaccccgtcatgggtgatgagcaccgaactggtggagacctctcgcctgtgggcccgctattcggcggccatcgacccggcgtgggccgaaccgttggccggccaattgacccgcaccacgtatgcggagccgcactggtcgggttcgcgtggctcggctgtggccaccgcgcgcgtgctgctgtatggtctgccgatcgtacaggaccgtgccgtgcagtggggacgcatcaatccgcttgaggcgcgcgacttcctgattcgccagggtctggtcgagggcgatattcagcagcgcttcagttacgacgactttgtgggcaaaaaccgtgacattctcgaggatgccgccgatgacgcgagccgcacccgccagctggcggacaccgtgtccgacgaggatctgttcgacttctacaacgcggtcattcccaacgatgtgaccagcgtggccgatctggcgaaatggtggaagtccgagcatgaccgtcagccgaatctgcttgatttcgacccggccaaggtggagcgtctggcatccagcgattcggtgagtctggacgattaccccgaccattggcatacgaccggatcggacggccaacccatcgacctgcgtttgagctacgtatacgatccggccgacccggccgacggcgtcaccgtgcatgtgccgttgaaggcgctctcgcgtatcacgcccgaccagttcacatggaatgtgccgggcctgttggatgagctgattctgtcgatgatcaaggcgctgcccaagcagctgcgcgtccagttcgtgccggccccggatgccgcgcgtgcgattcgtgactggatcgacgagcattacccggatctgccgggctcgggctcgcagcagaagccgaatctgccgccggtggatgaggatggcacgaccgttggctggcctgatttggcacatgtgttcaccaaggcggccatcgccaccaagggtgcgcagattcatcccgaagtgttggggccggaactggtcgagcgtctttccccgtatctcagggtcacgttctcggtggagcagcaactgccggccggcaagcaccctcgtggacgccggcatgcacgcggccccgtcaaggtgctgggtgtgtccaaggatctgaaggcgctgcaacgcaagttcgccgcgcaggcggaggcgtcggcccgtcaaatggtcaagaagcaggccgatcaggctggagaacagggcaagctggtcagtcaggcgaacctgttgcataaggcgggtgccaccaccgagtcccgggccacgatgctctggcgtggcgcattggatgcgctgcggttgccggccgaacgcatttcgtcgcgctggctgggtaccgaggcgttgatgctggcttctgctccgtacaagtccaccaaggatctggtcgaagacctgcagctggccacggtcaaacggctgatgccgaatgtcgacaggctctcggacgatgaggcgttggccaatgcggtgctcgatgtgcgcgaagtgtacgaggacaccgtctatcaggtggcgcatgacgtgatcgccgtgctcaaggcttatgccgaagtcgacaaggccactggcggcaaggccgacttgccgatgctgtcggtgctgcagtcggtgcgcgagcacatcgccacgctggtgttccccggattcgtcggcgccgctcccccggacgcgctggcgaacatctcccgatacctgcaggccgatctcatgcgcctggccaaggcgaagaccgacaagaaccgcgacgtgcgatgggcgtgggaggccgacgaggcccgcacgctggtcgacaaggcgatggccaaggccaaggcggagccggccggcccccgccacgagacgctgatgaagcaggcgaccgccgcccgctggatgctcgaggaattctacgtgtccctgtgggcgcaggaactcggcaccgccaagccggtgagcctgcagcgcatcaagaaggcactggcgtagcgatggcgacgacgcaacggcgcaagccggccaatccgcgcggcagggcgaacgtgattgtcgcggggcggggcgtgtcaggcggcaatcgcaaacgtcgcccgggcaaacgcccgcgcaatcgcaggtatccgctcagcccggcgcgctggtggaagcgggccgggttggcgcagcgcgtcgcggctgtgctggtcaccgtggtggcggccgcatgcgtggtcgcgctggtcgtgggcactgtgcgggtcgtccagtggcgtcgcgacgtgcaggaggccgaggcccgccagctgcagctgacgcagcaatacgacttcaatcccggcgacatcatctcggacggccagttcttcaacgccaatgcgatgagcgaggccgaggtccaggcgttcctcgacaagcagggcgcggcgtgcagcggttcccggtgcctgaaaaccatgaccttcgacaccgaggaccaggcggcgaacgagtattgcgcggcgtacgagggcgcgagaaaggagaccgcggccgcgatcgtcgacaagtcggcgcgcgcgtgcggcatcagccagaaggtgctgctcaccgtgctgcagaaggagcagcacctggtcacggccgtcgatccgacggacttccagtacaaggccgccatggggctgagctgcccggacaacgcgaactgcgatccggcctatgccggcttcttcagacaggtgtacggggcggcgcaccgctaccaatactatgtggcgcatgaaagcgcctacggctatcacgccaacgcgctgaactacatccagtaccacccggatgccgggtgcggcggcaccaacgtgtacatcgagaacaaggcgaccgcgctgctctacatctacacgccctaccagccgaacgacgcctcgctggcggccgggttcggcgagggcgactcatgctccagctacggcaaccgcaacttcgccctcatatacaccaactggttcggtgccgcgcgccgataggggcgggacggcaaaaaaccgaaaccacggtaaggctaggtgtcatccgcgccgtcgccgccccgccgcacggccggagaaccggccggatgacgagcggcacggctcacaggtcgatcttcggggaggcgtcgagcagggtacgcgtgtactcggccttgggatggttgagcacgcggccggtctccccgctctccacgacgcgcccgtggcgcagcactgtgatcacgtcggacatctcctgcacgatgcccaggtcatgggtgatgaacaggcatgcgaaaccgtgctcgcgctgcagccggcgcagcaggtcgagcaccttgcgctgcacggtcacgtccagcgacgacgtcggctcgtcggcgatgagcagcgacgggttgagcgccaaggcgcgcgcgatgccgacgcgctggcgttggccgcccgacagctggtgcgggaaccggccggccacatcggcgggcagctccacctgatcaagcaattcaaggacgcgcttgcgccggttcgtctcgctgagcccgccctgcacgagcatcggctcgccgatgctccatgccacggacttgcgcgggttgagcgccgatccgctgtcctggaacacatagcccatatgcttcaggatctcgcgcttgcgcctgccatgcgccttggcgagatcctccccctcgatgagcaccgtgcccgaggttggcgcgagctggccggagatcaccttggcgatcgtggtcttgccggctcccgattcgcccaccagcgcgcgggtcctgccggccaccagatcgaacgagatgtccttgacggcgaagctgccggccttgtacgacacggccacgtcgttcacctgcgtgatgcgcctgccgccgccgggcgcgtcactttccgtgatgcgttcgccgccggccgcatgttcgccgtctgccgcatgctcgtcgatgcgcaggcgcggcacggcgtcgagcagcatccgcgtgtagtcgtcggacgggtggcggaagacctgcgcgacgctcccctgctcgacgatcacgccgttgtgcatcacgtacacgtcctgcgcggcctgccacaccacgcccatgtcgtgggtgatgagcagcacggccagatcgaggtcgaccgccagcgaggagatcagggcgagaatcgccttctgcgtggtcacgtcgagcgcggtggtcggctcgtcggcgatgagtaccttgggtcggttgatgatcgccatggcgatcatcacgcgctgcagctggccgcccgacagctcatgcgggtacgacgaccacacgcgttcggcgtcgtcgagcccgacctcgcgcagctgttcgagcaccttggccttgcgctcggcggcgctgagctgcttctggtggtatttgagcgattccgcgacctgtacgccgagcgtgaacaccggattgaacgcggtggacggttcctggaacaccgtgccgatgtattcgccgcggatgcgttgcagcggcgcgtcggcggccagcagatcgatgccgcggccggcggcgtccttgccgtcgccgcccggaccggagtccggcccgtcatccacaagggcgtcgtcgaggtacgcgtggcccttcccgctggccaccgacggatcgagacggggcagcgccatcgccgtcaccgacttgccggagccggattcgccgaccagagcggtgatgcgccccgggaacagcctgaggctgacgccgtgggtcacctcccgctcgtcgaagctgacggccagaccgtccacggtcacgatcgcgcgtggttcactcattggaagctccttggatgcacaagcgttggaatgcgtccggcgcgcgcgccagcggaccatgccgccggcgcgcgccggatgcggatgccggctcagttcgcgctggcgagcgagacctgcgtgtagtccgggtacgccgggaagttgccgatgacgaagttggtcacgttcgatccgtggatgaacgtgttcttcgaatagatcagcggcacgaccggcgcgtcggccatgatcgtcttgtcggcctcggcccagatcttgccggcctcggtctgatcgatggtctcggtggccttcttgatcagctcgtcgaccttcgggttcgcgtaacgggccaggttgtagttgccgtggccgatctgcgaggagtcgaacagcggggagatgttggcgtagggcgacgggaagtcgggctgccacgagctgatggccagatcgtagtcgcccttgtcgttggtcagcgtatcggaatacacatcgtcgttgagtgtctggatgtccaccttgacgccggcccgcttgaggctcgtctggatcgaggaggcggtttcggcctgagcggaggtggcgatgagcttgagggtcggggcctgctcgcccgactccttgatcagctgcttggccttgtccacgtcgccggtcggatcggccttgtacaggtcgtagtcctcgcggccctcgatgccgggcgtaatgagcgtggtggcgaagttgccggcgatctcgccgccggaagccgtctggtaggccttcttgtcgaccgcgtactgcagcgcttggcgaatcttcgcgttcttcacgtgttgggtgttgatggcgaggtattccagcgcgccgtcgccgctggtggtcagcagcttcttgtagttcgggttggcctgcgcctgcgcgagctgcgcggccggcacgaatccggacaggaacgagttcttgccttcaccggtgccctgcatgatcgactgggcggccaccgaggtgtcctgtcccatcttgaacacgatcttgtcggggcccgcggtgcgcaccggatcggtcttcttgtcccagtaggtgttgcgcacgaagacggcctgcttgccggcctcgttcgactcgaccttgtacgggccggaggccaccggcagcttgccgtagccggacgccgggcccttgccgtcgggcacgggggtgaacgcggcgagcgagacgacccacggccagtcgccgaacggcgcgttgaggtggaagatgatggtcttgtcgttcggcgtctcgatggagctgagctcctggccgtcgaacgggccgtggtagtcctgcgcgccctcgagcagcgtcttgtggtagctcaggccgccggtcagcgagtcggcgaaggaacgctccagcccgtacttgacgtccttggaggtgatgggcgtgccgtcggagaacttgagcccgttcttgagcgtgtacgtccacgtcttgccgtcgtcgctcgacttgccggtgtcggtggccagatcgggcacgaccttcgtctcgcccttgtcggtgatcttccacgcggtcaggcggcggaagatgttgccgttcgtggtggtcggcagaccctggctcttggccgggtccagatccatctccgtgctggacagcagcacgttcagcgtgccgcccttgacggtggtgccgctcgccgagccggtggcggcgttgtcgttggacgcgccgcagccggacagcgccagtaccgcggcacaagcccccgccgcgaatacgcgccatgcgttgttcttcatgatggttttcctctctatcggtgccggtccgtggagcagaccggcaagtatcgcgtgttgcggccgcagccgcactacttcgtgccgagcgcgaccctggggtcgagcaggctgtagcagatgtccacgatcaggttggcgacgatgaccagcacggcggcgaacatcgtcgcgccgaccagcacctgcaggtcgaggttcgacacggaatcgagcagcagcgagccgagcccctgcatcgagaacaccttctcggtgagcaccgcgccgccgagcagcccgcccagatcgaggccgaacatggtcatcacgggcagcagcgcgttgcgcagcgcgtgcttgaagatgatcaccgattcgggcacgcccttggagcgggcggtgcggatgtagtcctggctcagctcgccaatcatctgcgtgcgggtgaccctggtgtagccggcggcgctgagcacggccagcaccagccacggcagcagcagatgcgtgaaccagccgacagggtcgtcgtggaagttcacgtacccgccgctggggaatatctgcagcaccagcgaaaaggcgatcaccgtcagcaggccgatcaggtatgacggtgccgaaacgcccacgatcgacagcccgagcagcgtgcggtcgatcagcgtatcgcgcttgagggccgcccacacgccggtcgccacgccgatgaccagccacagcacggccgcgccgaccgcgatcgacgcggtgatcgggaagcggtcgaggatcagctggctcaccgattcgttgagacggaacgaatacccgaggcatggtgccgagcagaccacggcgccgccgccgctgccgaaggtgcgcccgacgaagatgcccgccacgtaattgcccatctgctcgtaccacggcttatcggtgcccatgaaggcggagacccgctgcagctgctcgggcgtgcacggcttgccgcacgacagctgcgccggattggtcggcagcaggaagaaaatcaggaacagcgccagcgtgatgagcaggatgacgacgatcgagctcgccacgcgcttgccgatgtattgcaggattctcatgcacgcacccccttgcgcgggtcgatggcgtcgctcaggccatcgccaagcaggttgaagccgaaggtcagcaggaacagggcggcgcccgggaagatcagatacatcgggtcgaccagggcccactgcacggcgtcggagatggaccggccccatgagggcgtcggcgggttcatgccgacgccgaggaacgacaggcccgcctcggcgccgatgcgcccgggaatcgacagcgtgatgttgacgatgagcagcggcatgaggttcggcaggatctgatgccacagcacatgggcaggcgaggcgcccatcaccttggacgcgacggcgaaattgcgcttgctcagcgtcagcgtctgcccccggacaagacgcgcgatgccgggccatccgaagaatccgagcactagcgtcagcagcaccggcctcgggaagccctgcggcaccaccgccgacagcgcgatcgcgaagatcaggaacgggaagccgaagaagacgtccatcgtgcgcgagatcagcgcatcgaccaacccggggaaatagccggccagcagcccgagcgccacgccgatgaccagcgagatgaccgacgagacgacgccgatgcccagcgagatccgtgagccgtacgccacgatggagaacaggtcgacgccgcgcagcggggtgacgccgaaccagtgccgggcactgatgccgccgccgaatccggccggcaccgacccggcacccaaggcctcgggatgctcggcgtacgggtcgttgccggtgatggccgacaacggcccggccagcggcgccagcagcacgaagaacagcacgatggcgccgccgaccactatcgatgagcgagcgccggaacggagaacgcgccgccgtctttccgccttcggcgcggctttcgcagtcgcatccgtcatattgtcatccccattttcacgctgaacatgccgataatcatcaatccgcgcaggtgggcgcccgtgagccgggtccccctgcagccggtgtcctaacattaaggtttcgcagcaggatgacatgctgtggccttatcggttatttggatagcaggttatcaatggacggcaatcggcggataaggcatgccgcggggacacgcgggaaaaacccttcgttcccgcgcgtcacgccacccgtcattccccgaccgggctgacgtacggacgcagcagtgtcgtggtgccggctgccagcaacgcaaaaatcgcgccgaccgggccgagccaggtcaggccaaggaggtcgttgaccaggccgccgaccgcggagccgatggcgatgccgatgttgaacgacatggaattcagggaggcggccagattcaccgaaccgggatgggattggtaggccacatccatatacagcacctgggaagcggaattctgcagatacatgagcatgccaagcgccaccagcagcagtgcgccgccggccggcaccagcgaggcgaaagccagcaggcacaggcagacggcctgcacgcagtagatcggtcgaatgtgggtcagcggctcgacccccctgccccgatcggccagcttgcctccgtacaggttgctccacaggcaggcacagccgtagaccaccaagccgacgctgatatagcgttcgggcacaccgatttcgtcgcgcatgatcggcgagagatacgtgtagaagacgtaggaggcggctgcgccaaagaccacatccgccacgccgagctggatgcggcggtcgaagaacagacggaattgcctcaggaaaccgatcttcgccggatgtgagttgcgtggcagagacactgccatcgatgccatcagcacggcggtgagcaccgaaaccaaggcaaaggtgacacgccagccgaaagtattggccacccaagtgccggccggtacgccgaccacagaggcgatggagaaacccgagaatacccaggcaatgaacttggtgcggtatttgtcggtggtcacgtcgggcgcgaaggtcatggagatggccaccagcgtgccggacaccgaggcgatgagcagtcgggcgatgagcagcaccggatagttcggcgcgaaggcgcacaggatattgccgacgaggaacacgcccatcaacgtcagataggtgagaaagcgcgggaatcgggcggataatgcggatccgagcggcgtgcagggcgcgtacacgaatgcgaagatggccaccagattacccacggtcacttcggagaccttaagtccggatgcgatgtccggcaggatgcccactaccacgaattcgctcatgcccagcatgaagctggcgaagatcaggatggtgaccggcagattgaagaagcggtcggtgcgcgcggtgttcgcaggtgtgttcgtcatgggtgctctcttgagtgctctcgctcgtactacaagctgattcgtcggttacgtcaatcgtttttcgtatcaactcagcgacaacactattcccacctctgcccgctacccaccaccacgacacgctatagaaaaccccgccgatgaccaatcatcgacggggttcggcacatgtgcaacgcttgcgattacagcttcggcagatacttcttcagctcgtaaggcgtgacctgctggttgtactcctcccattcctggtgcttgttgtccaggaagtagccgaaggcgtgttcgccgagcacgtcggccacgaagtcggatttctccatgatcttcagcgcctcgtccagcgagcgcggcagcggctgaatgcccatagcctgacgttcgccgtcggtgagctcccacacgtcatcactggtgggttcgcccagctgcatctgcttatcgatgccatcgagaccggcggccagcagcaccgagtaggcaaggtatgggttggccaccgggtcgagcgcacggaactccatgcgcgcggagttgcccttgcccggcttgtactgcgggatgcgcagcagcgcggaacggttgttgtggccccagcagatgtagcttggtgcctcattgccgccccacaggcgcttgtacgagttgacgtactggtcggtgaccgcgcagatttcggccgcatggtacaggatgccggcggcgaactggcgggcggtcagggacatgttgaactcctgaccggcctcgtagaaggcgttggaatcgccttcgaacaggctcaggtgcgtgtgcatgccggaaccaggcgcgtcggccaggggcttgggcatgaagctggcgtgaatgccacgctccaaggaaatctccttgaccaccgtacggaatgtcatgatgttgtcggccatggtgagcgcgtccgcgtatcgcagatcgatctcgttctggcctggccccgcctcatggtgcgagtattccaccgagatgcccatttgctcgagcatgttcacggtggcgcggcggaagtccatgcctgggctgcgcggcacatggtcgaagtagccgccctcgtcgatcggggtcggggccttggaccagtcgtcctggctttcgaacaggtagaactcgatttccggatgcacgtagaacgtgaagcccttgtccttggccttggcgagcgtacgcttcaacacgtgacgtggatcgccgagcgaaggctcgccgtctggggtcagaatgtcgcagaacatgcgggcggtaccttgcgggccaccgcgccacggcaggatctggaacgtcgcgggatcgggttgaacgatcatgtcgtcttcggacacgcgggtcatgccctcgatggcggaaccgtcgaagccgagaccctcctcaaacgcggcttccagttcggccggagcaatcgccacggacttcagtgttcccaacacgtccgtgaaccacagacgaataaagcgcacgtcgcgttcttcgaccgtgcgcagcgcaaactcctgctgtttatccatagtcgcctatcgttccataaccgtgttacgaggggcgttaacatctcactgtttgtcacctgcgagtcgcgagatttcatcaacatgccccagtccgcatgtcgggcatggttcgggcccatgccggcacggcactatggtagtgactataagcgaagatcatctcaccccatccgccaatccgcccgagctggtgccgatatcagctggatgattacgccgacttggatgcgttgcaggcacgtatagacacgctgttcgagagctaccggcattccctgtacgacgatcgccgttgggtgttcgatcatttgcgctatcaggacgcggcccgcaaggtggtgggcgtgggctcggtgggccagcgcgcgtggacgtcggtgtggatcgcgcgtgatatcgacgatccgatgatgattcagatgaaggaggccacgtattccgtgctcgagcattactgcggcgcgtcgccgtacgccacgcacggtgagcgcgcggttcaggggcagaagctgattcagaatacggccgatgtgctgttgggttggtcgagctttatggccgaggatggccgaccgcgcgactattacgtgcgccagttgtggaatggcaagggttcgattgatatcgacaatctcaacgcttcgggattgagcgatctgtcgcgcatgtgcgcatggtcgttggcgcatgcccacgcccgcaccggcgattcgatcgcgatcgccaattacatgggtggcaccgacgaattcgatcaggccattgcctcgttcgccgtcagctacgccgaacagaatgatgaagactacaccgtcttcaaaaagctcctcaaatccggcgaccttccttgctgagccgttaagcggacagcccagtgggctgtccgtaggcgaggcctgagtgaagcgatagctgagcaaaggtagcttaacagtctcgctaaggcgagtcctttgcctacttcgcgactgcgagcgcttcctggagcgtgaacgcacgtgcgtataacgacttgccgaggatggcggaatcgacgccgatctcggccagttccttgatggcgcgcaaatcgtccagcttggagataccaccggaggccgtgaccttggcgtcggtgcgttcggcgacttcacgcagcagttggatgttcgggccggacatcatgccgtccttggccacgtcggtgaccacgtaacgcgagcagcccacggagtcaaggaacttcatggtctcaaacaggtcgccgccttcgcgcgtccagccgcgcgccgccagtgtgtgaccgcgcacatccagaccaacagccacacggtcgccgtacttcttgatgaccgaagcggtccaatccgggttctccaaagcggcggtgccgatgttcactcgggcggcaccggcctcaagggccgcgtccaacgaagcgtcatcgcgcacgccgccggacagttcgatgttcacgcggtcgccaagctcatgaacgatttcacgcagctgatcgcgattgttgcccgtaccgaaagcggcatcaaggtcgaccaggtgaatccattcggcaccggcctcaacccaggtacgggcggcctcaaacggcgaaccgtaatcggtttcggaaccggattcgccttggcgcaggcgcacggccttgccatcgcgtacatcgacggcgggcagcagagtcaacggcataagaagagcctttcttcagttacttatacataatttgagctctctcgtcagaggggagcttcatgctttttacagcgtggtgatccagttcttgaggagctgggagccagcgtccccggacttttccgggtggaattgcgtggcggacagcgggccgtgttcgtaggcggccacgaaacgcgaccggccgtacgagcaccagctcacgcgttcgggcgcaccgctcagatcaatgtcgaagcgggacgtatccgccggcttcacttccatcgcggcgtaggagtgcacgaagtaaaaccgttcattctccacgccgttgagcagcaccgaatcgggggcggcctcgatcgtgtcccatcccatgtgaggcaccacgtcggcgtccagcaggttcaccgttccgccgatcagcccgatgcccgcggcatgggccccgtgctccagaccgtgttcgaacatgatctgctcgcccacgcacacgccaagcaccgggcggccggcgcggatgcgatcatagatcacacggtcgccgtcgaccttcttcagtccttccatgcatgcggcgaacgcgcccacgcccggcacgaccagaccgtcggcctccaacgactgccggtagtcggaggtgagggtggtgtcgacgccaagattggcgagcgcacgcaccatggaacgtacattgccgaaaccgtaatcgaaaacaaccgctgtggtcatattctctcctatcccctactggttggttggcgtctattcgatgcgggagccgcgtccgccacgcccacgcttggtatggttggcgagaatctgcatcgcctggtcatggtcgagtccagcggaatccaccacttcgaacccttgggtcttgagttggttcagggttacgatgccgagcatcaggtcctcgacgaagcgcggtgtggaggtgaacagcacgggcggcgcgaaactctgtccggcctctccctgcacgtacatggccacttcgagcttgtcggcacgattgactgcaagaatcacggccatgccggataccacggtggtcaggtccttggctgcggcttccgggccgtcgccgtccagattcttcagcaccgcgacggccccctgattggcaccgacgcatgcggcggagatgtccgacagctggcagaacgcggccaacagttcggcggaggcaagacgggtgacgatcagcgccaccttcgccttgttacccaacagtccagcgagttcgttgtcgaagccgagcgaggggtcgaccacgtcggccatggcctcattcaccgcatcagcgaccgacccggtgacgtcgtcggccataggctggccggaatcagcggaagccttatcagccgtatcatcattcgcgtcggaatcggacttcgctgaagcagcgtccgccgttttatcggcatcactggtatcactggcatcgccggatgccgaatcgtccgcgaattctttctcgaatccggcgagcgcggcctcaagctcctcgtcggagaagtgcgattcgtccggatcgaacttgtcgtcggccatcacagggctcccttggtgctgggcacgccgtctacacgcgggtcgatttccacggcgaagcgcagcgcacgggccagcgccttgaattcggcttcggcgatgtgatgcggatcacggccggcgagcacctgcatgtgcaggcagatgccggcgtggaaggcgatggattccatgacgtggcggaccagagagccggtgaagtggccgccgatcatgcagaattcgtagccttcgggctcgccgctgcacacgcagtacgggcggccggaaatgtcgaccacggccttggccagcgcctcgtcgagcggcacggtggcgtcggcgaagcggcggatgcctttcttgtcgccgagggcccgcttcagagcttcgccgaacacgatggccgtatcttccacggtgtggtgcacgtcgatgtcggtgtcgccgtgggcgtggatggtcaggtcgatcagcgaatgcttgccgagcgcggtcatcatatggttgtagaacggcacggatgtatcgatatcggttttgccggtgccgtcgaggttcagttcgaggtcgatgtgtgattcgctggtttcgcggacgatgtgcgcggttcttgccatcatgtctcctgtgtgattcgtcatattggattgcggcgggactcgaatcgcttcgggtctcgccgcaatcggaaagaaacgtcccttatgctgcttccactatacgaagcgcttcaacaagggcgttacggaaggtttccatctcctcgtcggtacccatgcacacgcgcagccaaccgtccggtccgaccacgcggatgagtacgccgcgcttcaggagctcgtcgaagatggcttcgcgcttgtcgaagtgcccgccgaacagcaggaagttcgagccggattcggccacttcaagcggctggtccttgtaggtctgttccttgagccatgcggcggtggcctcgcgggtttcgcgcagatgctcgacacggctcagctgttcatcggtgtgttcgaaggcggccagtgcggcggcctgggtcacggcggacaggtggtacggcatacgtacgatgcgcacgcagtcgatgatgcccttggatgcggctaggtagccgactcgcgcgccggcgaaggcaaaggccttgctcatggtgcggcttacggccaggttcgggtggtccttgatcaggctcacggcgctcggggtgccgggcttgcggaattccacgtacgcttcatcgatgacgagaatcgggtgcacgccctcacccgcgccggccacttcggcggtttcgcaggcggcgagaatacgctcgatatcctccatcggcaacggggtgccggtcgggttgttcggactggtgagcagcaccatcgagggcttgacctcggcgatggcctcaagcaccttgtcgacgttcaacgtgaagtcggcgttgcggtgggcgagcttccaaccggtgaaggtgtcgcgagcgtactccgggtacatggagtacgtcgggtcggcaccgagtgcggtgcggcccgggccgccgaaagcctggaacagctggagcatgatctcgttggagccgttcgcgccccacagctcgtccacgtccagacgggtaccggattcacgggccaggtaatcggagaatgcctgacgcaattcaatgtgctcacggtccgggtatcggttgagtgtgggggcgatttcacgcacacgcttggcgatggtgtcgcatacggccgggtccggcgcatacgggttctcgttgacgttcaggcacaccggcacgtccagctggggagcgccgtacggctcctcaccgatcaggtcgttgcgcagcggcaggttttcgggaatcgagctcatcgcagaccggctcccttctcctgctcgcgcagggtggccttgtcatacggatccttgacgaagcgggagagcacgcactcgccgtgggcgggcaggtcctcggacaccgcgaaggcgttgatgcgggcggcgagagccttgaggccttcctcgtcgtattcgatgacttcgaccggcttcatgaacgtgtgcacgccgaggcctgcggcgaagcgggcggtgccgccggtgggcagcacgtggttggaaccggacatgtagtcgcccagcggcaccggggagtacgggccgcggaagatggcaccggcgttcttgatgcgcttgacgacagcatcggcatccttggtctgaatctcaaggtgttcggccgcgtaggcgttggccgcgtcgatcgacgggtcaaggccgtcggtcagcacaatggcggactgggtgccggacagggatgtgtggacgcgttcggcgtgctcggtcttcggcacgcgatagttgaggttctcctgtaccttgtccgcgatgccggtggagtcggtgaacagcacggagccggccagctcatcgtgttcggcctggcccatcaggtcggctgccagcaggc

SEQ ID NO: 1189 - DNA, 12837 bp, Unknown
  R81_24m  MAG No. k141_15946
cgtggaacgccggcgctggaaacgctctctcgaagacgcgggactgccctacgtcaccatccgaagcgcccgccacttcttctccacgcacctcgccgaagccggagccccggaagacgcgagaaaagcgatgatgggccacgcaaaaatcagcacgacggccggatacacccactggtccgccgcaagccttgcggcacttgccgacaaggctcgtcaggcggtgggggaatcggcctgattgcgattcttgcgcggccttcccccgcccgcaccacgaccgggacgagcggcgttccacgcatcgattgtctccggaagccagccgcgagtcgtgccgatcagcgcgtccggctccggcagatgataccccctcgcggccggattgctcgtgccgatgcgctcgccgacctccttgaggctgagatatcttgcggtgctcatttccggcctcccgacagatagccgaacaccccggcggccatgccgaaggttccggccgcgatggcctgaccgccgatggcgagaatgaggcacatcgcgccacatatcagcgagacgagcctgtatgcgtttgttgtgttcatgatgttccatggattagtctggggatagggagccgcagctccggatactaggactattcggaatctgcggctcttgtactaccggcgaggccttcgccgtatatgcggcggcttgggcttcggtacgggtgacggctcatcgcctttggatttcaccgccgcgatgactgcggcgattccgacaagcagggagccgatggcttctatcgctttccagacctcatccatgtctcacctccttccactgttccgtttttgtttacataataattatagctcaactaagtaagttatgcaagtcagaacggcaaagatctggatgtgcctattcgaatgttctccattactcgcacatggtgtaacaagtgcatgtaaaaccggtagaaaatcaggataatgataagacgacaaggaagcgtctggccgttgtttttgcgtcggacgccagccggaaaaagtggagatgaattttagaataaataaccagtagaattgttaactatgagtcaatttcgcgtgggagcctatatagatggctttaatctgtattacggaatgcgttcgcatatggggcgttcgacgcctgaatggcgatggcttgacatacgtggaatgctacagccgtatgcgcagtattgggatcccaacgcctctctgacggtggtctattgcaccgctcgtgtgaacgcctcttcctcgcagtcggcggcgattgaccagaatttctatctgaaagcattgcgtgcgtctggttcggtagatgaaatcgttttggggcattacgtagttcgcagcaattatgccttcatggttgataagttatcacgcagccgagtgcctcaactgctgagcgtaacggcgcagcagttcagcaggataatgccacgcggtccacagaattggcccatctcactccggaatggccatgtcggagtggatatacaacgaattgaggagaagggctccgatgtaaatgtggcttcaagactgttgcgcgacatgtacgagaacacaatcgatgcagctctcgttctgactaacgactccgatctgtcggaacccatacgcattgcgcgagaacgtatacctgttggagtgttgaatccccataaagggccgatcgcgggcagtctgaaaccattccgtaatgcgcagaacagaattggcagctggaacaaagctctctctccagccgattttaaagctcaccaactgcccgatgaagtcaacggaatggtcgacggaaaatacgtgtttgcgcgtaagccagcagaatggtgacatgctggaatacttgacgacatacgcctaccaaggtatatttaccactgtacccaccccgattgccactggcgacggggttttttcatgcccgatcgatcggcagacaaaggcgaaccatcggtatggtcatgttccgtattctggcaatcggagtatggatattcgccctgctgattttcgttggcggattgagcaccgatttcctgacatgcacaatagtcgcgctgatcatcgcattgaataccctgattccgtcaagccaaagccccggcgcccgcagagagcgatcggggcgattccgtatatacggcggtagaatctaatcaagccgcatcgagacggccgagagaacaacgaggttgggggcatgatgccggaacgagagaacggaaaaatgggcaaaatcgtgaaatgggtcaaagacaatggtctggccttcgcacgcgaaatggccggtcggcatgacgccgatatgagcaacgaaggggcgagtcgccaatttcgccgtgatatggaacgagccaccgcggcattcgccgagcttggcgcagacaagcagaaaatgtacgaactgctccgtaaatggttcggagtggacagcatggaagaagcggactcctacatcagggacggagcccagttcgaataccccatgacactgctcgaagaatacctgaaacatgaaggatacgagacaatggacataatcagattcaagagagaccacaacgtagcggagagactcagacgagacccgtcactgtcaagcctcaccccagaacaactcaaacaacgaatggagcagaacaaataaaaacgtctccagcgctcgcctgtcgaacggtagaatctaaatatgtcgcatagaggcgggtgagagaacgaggggcgttgagctcggcagccatctggtggagttcaccgtcatacatgcgttactcatggtgccacatccgtatcattttgcgacacgcgcgggcgacctgaatgagccgaacttatgcacattttggccgaaaatgtgcataagttcatcaaaagtgtgtaaattgagcatacggagacgtgatgacaagccgaaaggagactgacatgactgcagtggcggtggctccaaaggcccataaaatcggcaggccggtcatgctggacagcgaggaaatccgaaagcgcaggaatgtcctcgaaggcaagtacggcactcgtgaacagctttctcagaagcgcgacctcatcggacttactctcgaggagcgcatcgcattgtacgacctcgaggatctcgacttcctagagggccgatgagcacggaatccgaccagaccgaggaacaggccatcgatttcgcccagagactcgagaacatgctcactgaggttctcggccaaccgtcggacgggcaatacaccgccgacccgcagggcgcacgcaaaaaacgcagcgccagctatctgatcaagacgcgggatccgcaaggcatttctctcaccgtgggcggcagcaccatactccgcctctcgtaccgttaccaatgctcctgccgcgactcgaattcatacctccaagtggatgagtctgcgatcacgctgcgagccgaaagcgaccccgcacccatcatccactacgatttcgtgcgcgacccccatagcgccattcccgcggcccacatcaacattcacgccagcaacgacagcgccacgaaagcgatgctcgcatgcggcagcaaaagccagggcaagaacagacgaaaagcgttccttgaaaaaggaaccttccccacattctcctccctccacttcccggtaggaggagaccgattccgccccggactcgaagacgtcctacaaatggcaatctacgaattcggcatcgacgcacagccgcaatggcagcaagccatcgaacagagccgggccgaataccgcacccgccaaatcagcgcccttgtatgcgaattcccggacatcgcataccaagccctctcgcaaaacggatacctcgacagcggcacaccgccacaacgacccgaacgagaagacaccaaaagtcgactcaccaaatactgacgccaaaccgccccggcgctcgcaaagagcggccggggcgattccgtatatacggcgcttgaacctaatcaagccgcatcgagtcggccgaacgaacaacgaggttggaggcatgatacccagagaacacaaaggggccagcgtactggccgacagaaaagattacgtagccttggacctcgaaaccacgggatatgacccacgattggacgaaataatcgaaatcggtgccatcaaagtccgaaacgggcaacccatcgaccggtacggacaactcatcaaccctggtcgccatatcccgaatatcgttaccgaaatccatggaatcgacgacggcatggtaaaaaaacgcgccaacgctcgccgacgtgctctccgaattccttgactggatgggcgacggcctgattctcggccacaacgtcaacttcgacatcaatttcctctatgacaacgccgaagatatctgtggcaagtatgtcggcaacgacttcatcgacaccctccggctcgccagatacctctaccccgaagaacgtcacaaccgactgcaagacctcatcgtcagattcgatatcgccgaagaccaagagcatagagcgctcgccgatgtggaacagaccatcgcgtgctatcggtggatgattcggcacatgaatgagaacggtattcccttcccggccggagatggccgcagccgcagaggcttatcttcgctattccgtggcggagatcaactgctgcagatagccccacaggacgaagtcacccctgatcccgcattcgaaaacctcacattcgtattcaccggcgcactcaagaaaatgacccgcgccaacgcacaacaggccgtcaccaacctcggtggcatcaacggtaaaaccgtcaccaaagacaccaactacctcatcaccggcagcaccgactacaatgccgccctcaaaggctccaaaagcagcaaatggctcaaggccgaaaaactccaactcgccggacaagacctcaacatcatcagcgaagacgtgttctacgacatgctgggggacagcatcgcccaagcaccaacgcaaagccaactgaaattcaaaatcacgcaaccagcttgcaaaaagattctggaaatacccagcggaaacctagatgcggaagaagtcagcgtattggccgtcgatgacagaactaagcccagcatcgttttgaaaactcaggacggcgaaattctcgcagaattcagctccagaatgaaagcgtatgaaaccatcgccgccctgaacggtagaacaatagaattaaccgcaaccaagcacgatgaattcgggtctgccccatacttcaacgcaaaagcaaaaatcattcgatagggcaaacagtcacaaacgccccggcgctcgcagatgagcgaccggggtgttttttgtttattcttacaagaattctagtttctgatatgaaaagccctggcgctcgcagatgtgtggcaggagacgccacggttacggccaaggcggcggcgtgcgtcgctggcgtcatcaggatttcggctgctggcgggtcggactggtcgcctcgatgccgcgcgtggattgtccggaatgcggcgtcgtggtcgcccgggtgccgtgggcggaaccgggcagccggttcacgagggatttcgaggcggagtgcgcgtggctgatgggcgtcgcgaaccggaagaccgtcagcgggttcctgcacgtggcgtggcgcgccgcgggcgacatcgcccgcagggtcgctgatcggctcaggacggcgatgccgtcgccgttcgacgggctgacggcgatcggcgtggacgggaccagccaccgcaaaggccatacgtacatcacggtggtcgtcggccacgagcgtcaccgcgtggtctgggcgcacgacgggtacggcggggacgtgttcgacctgttcttccggcggctcgccgaggagcggaaggcgtccatccgcgtggtcgccggcgacggggcccgctggatcgactcatgcgtcgccgcgcactgcccgaacgccgaacgcgtgctcgacgggttccacatcgtctcctggatgaccggcgcgctcgaccaggtccgcagacgcctgtggaaccaggcgagacgcgccggcaacgaggaggtgaccaagcgcatgcgcggcgtcaagcacgccgtcctgaagaacccggacgacccgaccgaccggcagaacgacgcgctcggcgccatcaggaacacggacccgaagggccggctctaccgcgcctggcagctcaaggaactcctgcgcaccctgctcagacaccccctcgaccaggcgcgcggcgaactcgaccactgggtgttccgggcctcgcgcagccgcatacccgagatcgtcgaactctccgaaaagatccgacgccgacgccccgacatcctcaggaccatccggccgggctaccccaacgccagactcgaagcatccgacaaccggatcaaggccgccatccgcatggcctacggcttccaccacgtcgacaacctcatcgccctgaccatgctccgatgcggcggactcgacatgcacctaccacaacccgcaatctaacccacgaaaacagcagaagcctccgttattacgaatacacgctataccgcgctagcgtaacggtaatgcctgacgcctggcgttccactgagttccatgttggtgccaaggactgccgctggatgactcttgatgagatgcttgccgaccccggcatcaacaaaatcaatcatgatgtcgtcgcgatggtgcgggatacttgtaattgttgccacttcgggcatatgacgattgagccaaagcatgttctatgtttcgataatcatcaaaagcagagcatagtatgctctacggggattttctacaccctgaaaacaccgaaaatcaggatatagggcagtagcacgaattagccaacagcggtataccaaggaataaggccttttccgcccgcgatgtaacgtagatccgtaccttacgaacctcatatataggatcgcgaccaaagcgtcgctcgcaacaccgcccgcgccatcatcgccagccatcaccagcatcacacaccgctcggtgagtcgtatgtttgcgttcacaaaaattacatgtagtgtgtctccgcgtatgcgtagcggtgtgtgatggtgtgtgatactgcacgcacacggagcagtggcatactgacggtcgttggtaactccgtaccccacgtagcggtggcaaatccgcctccgttcccggatggtgggaacgacacgccccgtcgagaagaaaaggtgcgttatcgcgggggggggcgggggtgccgctttccgaaaattccaaggtctttaccaatatcggataagaatcttcccctatccggggggacgcattcgcactttttgattaatagcataacgccttgtacatgtaacgccaggttctggcgtacgcgattgtaagagagacggacaaggctatgaagagaattgcagaatggttcgcagcggtaggagccgcagcgggcaggagaggcaagcggttagtggccgtcgttgccgccgtggcgatgctcggcggcgtcgccggcgtggctggggtaagcgccaccgccatggcggacgatgggaatgcctccacaacacaatcgcagaccaccgatgagaaggcggccgccagcgtgcctgttcctctttccgctgagggaacaaacggtgtgccagatgatccgacgttgtctgctccggcccgcgagaagaccgttaccgccaatggagacggcacatacaaggtggcattgaacgtcaccggtgcgaagagcgcgggtacgggcgagattgtgacgaaccagccgctcgacatcgtgctggtgctggatgtgtccggctcgatggccgaaaagattgcttggaaccagcctacgaagattgactcgctcaagaccgcggtcaataacttcatcaaggcgacggccgacgagaacgcgaagattaccgaccagagccagcagaaccgcatcgcgttggtgaagtttgccggtactgcttccgataatgtgggtaacgacacttattgggatcatcgttggggacagcgctataacaactcccagattgtgacaaatctgacgtcgaatcttaatggtctgacaagtacagtcgactcgctgaacgctgcgggagccacgcaggctgactacggttttcagaaagctcgagtcgcactgcagaacgcgcgcaccgatgcgaaaaaggttattatcttcttcacggacggacaaccgacgagtagtaatgagttcgagaagtcggttgcaaatgatgcggtgagaaacgcgaaggcgcttaaggatgcgggagcaaccgtctactccatcggagtgttcggcgacgcgaacccgaacaacacgtcaaccaactggaacaatcgctttaacgcctatatgcacgctgtctccagtaactatccgaatgccacggcgtggaacaggcttggcaatcgcgccgacaacagcagctactacaaggccgccacggatgccgaccagctgaacaacatcttcgagtccatccgccaggagatcaccaagacggcagagtacgccgacgtgacgattcacgacaagctgtccagctgggtcgtgagctccgacggcgcctccgcgaatggaaagcccgcgggcttcacgtacacgaagacccagcacggccagaccacggcgtgggctggcgccccggaggcgacggttgcggctgatggcaccgtgtcttggccggtcacgtccaacggcggcaagcttgaggacggcgtcacctacacggtgagcttcaatgtcaagccgacgcaggctgcgttcgacaacgctgcctcggcaacccctgagaaggacgccgcgagtgatgaggcgaacacggacgatccaaacaagggtaacgcgaacagctacttcacgaacaacaaccccggggctactgtcggctacaggaccgtggtgacctcctcgcagggcggcacgacgacgagcaatccgcagaccgccctctacccgcagaagccgaccatcacccttccggtctccaagatcacggtgacgaagacttggtccgacggcagcgagaatcacgcggatgattccgtgcaggtccagctcaagcaggacggcagggattatgccaatggttcagcaacgctgaatgccgccggcaactggactcacgagtttacggtgtctgccggccctgagggacacgcatactcggtttccgaggtcaaggttgaaggctatgactccaaggtcgataagactgacctcaagctacaaggtctgaccgcacaatccggtgccttcacggtaaccaacacaccttcttacgtggccttgcccgcttcggatgtcaaggtgacgaaggttgtgcagggacatgctgctaattcggacttcagcttcaacctgaagtgcgtggatagcacggatgcgaatgctggtaagtgtgctgacgttaccggcttggtcaacaatggactgactacgactgtgtccaagggcgaattgactgctagcggcgcgagcgcgacggttggcttcggcaatggggatctgaagttcagggttccgaccggtaacgccacgcagctcgtctacaagttcaatgtgacggaggaccgcaccaatgtcccagctggctggcgttacgacggcagcacgaagacggtgacggtgaccattgccaagaacgatgacggccagtgggcggcgactgtgaacgacaacaacccgacgttcacgaacaagtacatcgctgtttcttccctgccgttaaccggtggtcgttcggcccgtgactggctggtgtatggcggtggcctgggtctgatggccttgttggctgctgcgggttacacggtgtggcgcaagcgtcaactcgtctagcccgttcctggctcccctccctgaggggagctggccggcggagccggactgggggcgcaggagacttccctcagaccgaaaagagcaattaaagatttgcggattgcgaagccccttgtgaaaaagggttcttagcctccgtgattgcagaaaacaagtagtaaacaagttaaggaagagagggtttctcatgaagttgaggaagcttttcgcgggcgtcgctgctgcggcgaccctgttgggtggcatggcgttcggtgccgccaccgccaacgcggcggatactgaccaggccacgattacggtgaacaacgcccaggcgggttacacgtacaagggttacaagttcgccacgttcgataacgtccagggcacggccccgaatgccacgtccgtcgaggtgaacaccgtcgccgcgtggaaggacgccgtgtacaacgcggccgacgcggccaacggcgatgctgcggttcccgccgagtacgccgagaacccggccgcgtacgtggccacgttcgatgccgccaccgcccgtaggttcaccgacgagctgacgaagcgcatccccgcgggcgagcagggcactgccgccgtgaacggcgtgatcaccgccaccgagggctggttcctcgtgaccagcacgacagaggagaaggccggcaagtccgctttggtcgccacccagatcaccagcggtggcgagacctacacgaagatcacgctgaacaccgaggacggccagcacaacatcgacacgctgggccagttcaacgccaaggacgagaacgtcccgacgccgccgaccaagacggctgacggcaagggcaccgtgaacgtgggcgacaccgtgaactacacgatcaccgccgtcgtcccgcccgcagcagccggctacgacacctacaagtacaccatcaccgatgccgcatccaagggcctcaacgtggccgaggacaacgccaacttcacggtcgtcgtcaagaaaggcaacaccgacggcaccgacaagaccctggccaaggacaccgactacacgctgacccagaacggttccgcctccgacgagaacggcaccgtgacgaccatcgcgttcccgaacgtgaaggactacgccggcaagaccatccaggtgacctacaagggcgtcgtgacctctgacgccgtcgaccaggtgaccaacacggccaccgtgaagaacaataacgaccagaccggcgaaggcacgactgtcgtcaagaagctcggcaagttcgacttcaccaagatcggtgtcggcaacgacgccacgggcctggccggtgccgagttcaaggtttccgccgataacggcaagaccttcatcaagttctcccaggacgccaacggcgtctactacccggacgccaccaacggtagcgagaccctgacctcagccgacggcaagggagcacagaagacccttggcaaggtcgctgtccgcggcctcgccgaaggcgtctacaccgttcaggagaccaaggccccgaccggttacgccgagaacttcaaggtcaccttcaccgtgaccatcggcaaggacggcggcgagggcactctgaccgttgacaatctccatcaggtcaacacgaccgacaagacggtcttgaacgtcaagtccatcacccagctgccgctcaccggtgccgccggtaccatgctgttcaccgtggtcgccgtgctcctcgccggtgttgccgcgaccgtgttcgccaagtcccgctccaccaagcgcgccctcaacgcgtgaatcgagagcaatgaacgcgtggtctaattcatcagtgaattgaccccaattggaagcgagtgaagtgccaacttcgctcgcctccttttttcttagactttcaaattcgacataaccagaatcaaaggtgcagcatggcaatggatcctattacttcttcattgttgagcgatttcatcgctagcagtggtttggaacatgaaacggatataacccgccagtttgaatacttcgcgaactattgtgtggttaccaacagcagcccttcaagcgacttcgaatatacggatatcgcaacgggtgacaatgctccgggaatcgatggcatggccatcatggtgaacaatcagctggtctccagcactgaggatatagatagtctcatcaacgccaacgggcatatcactgtgcggtttattgccatctcggtcaaaacgactgccggattcaataccgggttcatcagcaatctattcagcaacgtgcagttgttctttggggacaaccccggagcgacgttcaatacgccggagatggagaatttcctcgaacttaaggactacatatacagcaccgcaatcgtcaagagatttacccgtaatcccgatctcctcgtatcactggtgacattggggtcatgggatgacagcaatgaacagttcagagcgctggtcggccagtactgtcaatctttgcaaagtacgatgctgttcaaccgtgttgactttcgtccgtatggagccgctcagattcagatgctatatcgcaaggccgtggcaaaaatcgagaatgccgtgactttcgacagggccttgatcatgtatgacgataacgacaagggcgaagaatccggatatataggtgtgctgccgttcggagagtatcgcaaattgttgttgaatgatgacggcaatgtgcttcccgtctttgaagacaatgtccgtgggtatctcggcgacgataacgaagtgaacagcgctatcgctaaatccatcactgaaggtgatgcgaatgcattttgccagaaaaacaacggtgtgaccatcgtggcttcctccgttaagagaaccggcaaccagttcgttatcagcgattaccagattgtcaatggttgccaaaccagcaataccttgattgtcaaccgagacaaaccaaatatcgataaactacttatccctattcgcctcattgtgacga

SEQ ID NO: 1190 - DNA, 3184 bp, Unknown
  R81_24m  MAG No. k141_15979
cttcccgtcccgccacaagaagggcactccgtacgctccgggcgccaacccggagaacggcatggactcccacggcatgctgccgtccatgttctccgtcggcaagatcgactacaacgacgctcttgacggcatctcgctgaccaacaccatcacccccgatggcctgggccgcgatgaagccgagcgcatcggcaacctggtcggcatcctggacgcgggcaacggccacggcctctaccacgcgaacatcaacgttctgcgccgcgagaccatggaggatgccgtcgagcaccccgaaaagtacccgcacctgaccgtgcgtgtctccggctacgcggtgaacttcgtcaagctcaccaaggagcagcagctcgacgtcatctcccgtaccttccaccagggcgccgtcgtcgactgatgaccaaccccgcgaaccgcggcaatgactaactgaaggggtggggcacggctccaccccttccttatttcccacagaccttcgcatcatttggaacaggaggacaactatgcccgcaacacccacgttccgcaccacgaccaggcatatgctcaaggaatcgaagacctatgcctcgcagactttgatgggcggcctttccggctttgaatccccaatcggactcgaccgacgtgaccgcctttccgccctgaaatccggcgatatcggcttcgtccactcttgggacatcaacacctccgtggatggaccgggcacccgcatgaccgtgttcatgtccggctgcccgctgcgctgccagtactgccagaacccggacacttggaagatgcgcgacggcaagcccgtctaccttgacgccatgatcaagaaggtcgatcgttacaaggacctgttcaaggccacgcatggcggcatcaccttctccggcggcgaatccatgatgcagcccgccttcgtttcgcgtgtgttccatgccgccaaggagatgggcgtgcacacctgcctcgatacgtccggcttcctcaacacgagctacaccgacgagatgctcgaggacatcgacctgtgtctgctcgacgtcaaatccggcgacgaggagacctatcacaaggtcaccggcggcaccttgcagcccaccatcgattttggccagcgactggccaaggccggcaagaagatctgggtacgatttgtgctcgtgccgggcctgaccgactccgaagagaacgtcgaaaacgtggcgaagatctgcgagtccttcggtgatgccgtcgaacacatcgacgtgctgggattccaccagcttggccgcccgaagtggcacgaactgcgcatcccatacccgctggagaaccagaagggacccaacgccgccacccgttcgcgggtggccaaccagttcaaggaccacggcttcaccgtgttttaaattgcagggccgaaccgcgcgtaaataccacgattcggcccgttcgcccataccctagagatatggccgacatctacgcatttcctatgggagcgtccaacgatggacgccccgtacgccctcagggtgtgccggatgaagtatgggcagctgtcgaatccgtcagcaccatgaagcgcatccatgacgtgcgctatcgggagattcccgtgccttccaccttggccgattatggtatcggcgtggaattcgaagcgggagagtgtgccctcggcgatgccttttccgccggtcttggcaacgatgccgaatcacgaatcgccacaggctggatcatgatgctttatgctcatgagctgcgcattgaccgggattccaactggcgttgcgtggcgttcgcgcgacttccgctggaaaccgccgaaaacgattccctgacccccggcatgtactgggatgacatgtgcgactatttcgacggcatcgagccggattcggtatccggcacagtcaccgtgacccaaaacacggcttttggttcgatggccggctccaccagcgccgggtgtgagattcgcgtctcatggaccccgcttgacgggaccggaccggacggtactatggacgccggcgcacaaatccgctcgtgggccgcattcatcagatccaccatccgttttgaggaggatgacgccagttgagtgacgtccgtgacaccgaaccccgactgctgaaagagcctcgcgggggagtgcccgatgtcacttcgtcgctggatggctatcatcgagcctgcgatgcgctggccgaggcgacgggctcgctggccgccgacgccgaacgggcgtccggattccgctatggacatgaggattggctgattcagttcaaacgtgaaggtgcgggcatcgccttgcttgatcccgtcgccctgacacgggccggagctgactggaatgaattcaatgacgccgtgggcgatgctacatggattctgcatgattctctgatggacttgcccggattcgccgaaatcggactcaaacccaaggccttgttcgacacggaaatagcggcgcgattgctcggcctgcaccgcttcggtctggccgccgtcaccgaacactacctcggcatcacgctggccaaagagcattccgccgccgattggtcctaccgtccgctgccgcgcgactggcgcaactatgcggcgctcgacgtggaggtgcttatcgaactcgaaaccttgatgcgtcgtgacctgaaagccacaggcaaggacgagtgggccgctgaagagttttctcacgctttggttgcgggccttgccccgcgcaaacctcatccgattccttggctgcgtatctcgcgcatcacccagctgagtcgtgatccgaggggcttggccatcgccaaatccctatgggaggagcgcgaccggctcgcccggcgatacgacatcgctcccagcctgttattgaccgattcgtcaatcatcgaggccgcgaccaacaagccgcacaatgccgcccaattccgcgcactccgatccctgaacgagcgtgtgcgcattcataccggcaccgagcaggacaaaatgttcgagcggtacgcgccgattcagcgtacggtcaagccgaaggtctggaagcaggccatcgaccgcgccatggccctgaagcccacccaatggcctaccatgcccgcccccgaacaggacgaaaacggtgtggtgaacgcgccccgatccatgcgactgtggcaacagcgcc

SEQ ID NO: 1191 - DNA, 10919 bp, Unknown
  R81_24m  MAG No. k141_16816
caggcagccgccaaatccaacgggaaccacaggaacccaacgaacaacgcaaccagcggggcagccaccaacgcgaaaccgctcacatgacgggtcaacgcgatgccgatggccgcgaccaagccaaccacgccgccaccatacgatatatagcgaggaagaatattcgacccacgataccgatcctcccggtacaggaacagggaacccgacaccagcagtacaccggccaccaagccggtcacccaccaaccacccgacgcgggttgtgccaaaggcgcaggcagacgatcagacgaccagtccacgaaatcccccggcttcaacaagccagtcgccacataccggtcccacaaccacctacgaccaacctcctggcccacaaacgaaccagccgcaagcatcgccaaggaggcgaacatcacgaaaggcacggtcagacgaggccacaaactgccaatcgcgtaaacgatgaacggagacaacgctatcgacgcaaacacaatgacgaacaccccaacattggggacggccgccaacggccaccaatcacccgccccattcgcctttgccgcatccatgaacactacctgcaccaccacggacaccacaaaaacaaacaggaaccacaaagacttcaacaccacgccacgcattccgaacgcacgacgtcccggacgcggaccatgcagatgaggaaccgtcagcgcaaacaaaccatgactctcatactccagagtcggaccaccattcgccgaggaacgaccccggatatccttctcgacagtcttcaacatatccctgaccacgggattattctgatcggaggcgagaagacgccgacgaagatcctcattcttctcatcctccgaaagctccttccaccgcgcgtaagcctcccgcccacgctcagcagcatccgatttcctgctcatcgtcaatcatccatcctttatagatcactgataccaactcgaatggcattagatgcctcagccgccccatcggacaactttcccggtgcctgatatatggtcttgaaattccataactgatctggatccggaacgagcgtcttgaaataatcctgtggcgaatgcttccactgcagaccaccatccgcagtcggattcacaaacggcttcaccactttcgccgtattcaacgtgtcatacgtcgcgttggcatacgccaaaaaatgctggccaatattcatggtgtcccacaccgtccgacgggtgtcgacagccgcgatattcttcatgtcgtggataccccgaaaatcggtatacccggttcgggcattcataattgtgttgccgatggaccacccgtggcctttgctccaatctccgaatctcttgaactgaccatcccagaaatccctcatcaccgtgttgtttgggttagaatgagcggcattcgcggcctgtttcgcatcctgccatccggagacgaaacgattccatgccctgccactgttcttcaacgaatgctggataccgactacggtgttatgcattccctcacctagagcattccatccctgccttatcatccccttggcaaagactttcgcgccgtcatgattcaaagtatccaacacatgctcccgcgtttgcattgtccactcgcttccgtcacttagtagcttatggaatccgcgattttcagaagcttcttaccccacttagtcggctgccacagtcttgcgcgtaaagctttttgtaaattgcgttaatcaccaccatgtctctcctcaataaaaaaatcatttgtgatgttctatacgtttgaggcccgtgccggcgtcgatctgagtaaggctgagattgatgtcaataagcataatcgaaccatcgacatcacgctgccagcacctactatctagtcagtttcggtggacccggattcattgagattctttgatgaagaatcttcactatttaacggcaatgaagtttcagatacagcagatgccttgaaagacgccaaaacgcagtcggaaaagaaactgaataagggggatttgttgaagaatgctaatgagcaggcaaaaacggtgattgaaaagatgtattcatctattgcagaaatggactcgtatacggtgaatatccacacaacagagccgaaaaaatagtctacattgttgccaagcgctgttactcatgctatgaggcatgagtaacagcgcttttttatggtatagcaaggtcaattatttatcgtcaaaaatcagttgggaactgatttattcttggaggttatgcagtcgcgtcataggaaaaacgaggaattgagaggactcttatgatttcctatgtacgaaacgtgggtaagacggtacttgcagcggtcgttagtttggtgttcatcgttggcgctgcaggctgcggtaacactcaaaaggatgacggtccagactatgcggatgatgaggcgatgtccataatcgcaaaagcgtatcagaagcgttcggatgttctcgaccagtacgagcagaagaaagataccgattccgtcaagcatgtcaaagatgctgttcaggctgaaatcgataacgatgagcctttgaaagagcggcagttcaaggattcgaagttgcaggagaaagtcattacttatatcaacctgcttgaggattcacaaaaagtgaacgaggattattcctatctcagctcggattacagcaccgaatggactaaggtatacgataagcgttcggcattgctcaaggattttgtcgataattacaagctcacggtagacagtaaatatcaagatccattgaatgatattgttgccaacggttcgtccgtcaagaaaaagacggaaacggaagacgcgctgaataatctgattgcctctgcgacttttgagaaaactgatgacggatatggctactacgcatactcagccgtcatcgaaaacatcagcggaatcgatttcggtaccgtcaacttgatattggctctatacgatgccgatggcgtgaaggctgccgaagtatacgccagtactaatgcttggcctgcaggagaaaaggtaaaattcgaaaccggtagcgatgccgatgcggcgcaggtgaaggcatctgtcgaccactatgaagtagacgattaagcgtatccatacacaacagatagtgatggcccacagggaatcttcctgtgggccatcactattaaacgtcaatatcagtcaacttacgccgagaactgtttgccgaattccgagaagagctgacggcgggcgaagacgagcaggccgagcagcaccagcagggagaccagcccgctgaccatcaccagcacatcccacggagcccagccgagcggaatgaacgtcagaggcagcagaccggcgacgatgtcgaacgccagatacttggcgtactggtcaatggccttggcccgcagcacgataagcagcaccacgtcaaagaccagcgaaaccagacacgtgatcggtatgacgaacatggtgacgacatgattcatcgtcgccacaaaccagaccagcgcaatcgccagcatgatatagaaatatcgaaacatgaggcgaagcggccgcggcgcgtgcagaatcgcactgttgatgaacagcacgctgatgatcagcgcggctgccgatgcactggcaatcggtatcggccacgaaaacagatagctgaagaagccatgcagcagcagaatcgcgccggttacaaacgtgatgatctccaccgccaaacgcctcggacgcagatagatctgctgcgcggggaatgcggcgggagaggcctcgccgtgcaattcgttctgacagagtgggcaacgggccatatcgccggtgaaatcgacgttgcaggcatcgcaatgcttcatgccgacgctcctttctccacatgcgcgccggcgatgttcatacggccgctgatgccctgcgcggcgagaatccgacacaggttcttgatgacgttcagatcatggtagacggtggagatgccgatgctcaggtcgtcgccaaacgagcagaccgtgaaattcaggctggccggtgtggtgaggaagctcaccgaacgcacatggcgcgcgagtcgttcgtccaaggtgactcggccaaggttcgagacggtggtcgtggtctcgcggtcggcgatgaaccgggccagctccagcacccagtccttggcaggggagggcgcgagacgcagcgccggattcttttccagcgcaatcatgcggttcatatgcgattcgacgcgctcgcgactggtggcatggtcgagctgctcctgcacatggcgggcgatgtcggccaacggctcatcggtcagcaatccacccataccgttgccgtgcgcggtgcgggcggcggactgctggccgtcgccggtcgcgtctgggcccgttgcggaagttttcgcggagtcctcatcggcttcgatatcggccggcgtgtacgccacgtaagtcatgccgtagaagttgcgcacggtctccgacctgaagaaggcgcgcaagtcgaccggaatatccacgcgaatcgcgcgattgcgggcgcgcgagggcatgacgtcgcgaatcgcgcacagtatcgcggcgatgaggtaggaggtgaggctcactccgcactgatgtgctgcaccaagcaccttgctggcgctgacgtgatattccatgaacgtgggcgcgtcccggtcgatggggccggccagccggtagatcttcgtgccgggcgcggcaccggccttgtctttctcgtagtatttgtcgaagctgttttcggctttgtcgctgtccgagccgtcgtaatccgaaggcacgcccggcacgtcgtaccgctcggcgatgtaggcgtgcaacagtgacttgaacaggttgatggcgccgcgaccgtccgaaatgatgtgcgagacctcgagattgacacgattgcggaaataactcacgcggaacagcatgcttttgggcccgtaatgcagtcgcgagcatatcggcagatgttccggctccaccagtggccggccgtccgactgttcgaggtaatgccagaacatgccgttgagcaggtgcacgttgaagctcgggaactgggcgatggcatggtcgagcgcgtgctgcaggatgtccggggcgatgtcgtccgccagctcggccgaatagcggaacacggtctgcgaggagcggccagcctgggaggagtagaacttgccgatgttgtctagtcggtaccaagtacgtcttgccacgcgtcgcctccctccggtgcgttggcggtggtgccggtgccgggagccggcaccagcggtgtgtcgtcgaggaaatgctcgatgatccggtaagtggtggacaccagccctacggccgacgtgttgagcagataaccgtggatgccgtcgtgaatccggtaacaggagacgttgtcgttcaccaattgcagacgacgggcgtacgcttcgtcctcgtctctgagcgggcagtattcggcggacaacaccagcgtgcgcggctgattgctcaggtcatgcgcggtgagcggcgcgaaatacggattggtcaggtcggccacggacgaacggtacatgtcgatgtagtcggccatgtcctgtgcggtgaggatgtagtcggtgccgttggtccgcaccgattcgaacgggctggtctcgggattgtagtcgttgccgaccaccgggtaaagcagcatctgcgtgcgcggcatgaactcgccgcggtcgcgggccatgagcgagacggcggccgcaagattgccgcccgcgctgtcgccaaacagcacgatgctgtcgggatccggtgctgggattgtcgcagatatatcgcccccgccggtgggggctgtcggcgcagccgactgggggtggtcaacatcaacagaaccacccaccccagaaatcggcaattccccagcaaacagctgccgggctacctcatagcaattctcaacagcagtagggaagcggtattcaggagccagccggtactcgaccgagatcacacggcgttgcagacgtacggccatatgcgcgcaagcctgcgtgtacaggttgatgccgcctgtggtccaaccgccaccgtggaaaaacaggatcgtgccacgcggcgtgactgagggaagttccgtgttggcattgccggaaataccgtcggtgttgccgctcgacgtgctttccttgatgggtattttgggtaggactttgggtaatacggcgggcagaatcgcggatattgccgaggccactggcgtgccattggcggaagattcctccagggcttcgggcaggggcgctccataggcgaccagcggcgtgaacactcgcaatggtacggcatatccatccgccataggcgcgaaggcgtcctcgacacggcatttcggattggcgggtgcctgcttggcgataagctcttccgccacgcgctgcaatttgtacgacttgcccgcgttgggcttgatgtagctggcggccttcatcgcggcgaacaatgcctcgttgatcggcatgacgacaggtcctttcagcggcggattcggtagtgcgaacaccccaaccttagcccatgaccggcatgaacaaaaaagggaaggaacccgagagttccttccctgtgtgccgtatcagacgcgatacgcgccgattatcaggcggcgaagtattccacgccggcctcgaagatcggctggtacttgttgccgggcacgttgacgtacaggccgttgccggaacgctccgagtgacccatcttgccaaacacgcggccgtccgggctggtgatgccctcgatggcgagcagcgagccgttcgggttcacatccagatccatgccgggggtgccggtctcgtccacgtactgcgtggcgatctggccgttggccctgagctgggcgagtacctcgtcggaggccacgaagcggccctcgccgtgggagatggccacggtgtggatgtcgccgaccgaagtcttggacagccacggggagaggtcggaggccacgcgcgtgcggaccagtcggctctggtggcggccgatggtgttgaaggtcagcgtcgggcaggcgtcggtcatcggcacgatgtcgccgtacggcaccagacccagcttgacgagcgcctggaagccgttgcagatgccgagcatcaggccgtcgcggttcttcaacaggtcacgcacggcctcggtgacggccggcgcgcggaagaacgcggtgatgaacttggcggaaccgtccggctcgtcgccgccggagaagccgcccgggatcatcacgatctggctcttgttgatctcatcgaccaacgcctgcgtggattcggcgacggcggccggtgtcaggttgttgatgatcagcgtggtcacgtcggcaccggcgcgctcgaaggcggcggcggaatcatactcgcagttgttgcccgggaacaccgggatcaccacatgcggcttggccacggaagagccgacgtacacggtcttcttcggcgcgtggaagtcgatggtctcgacggtcgcgcccttgtcctcgcccttggaacggtacgggaacacggattcgatgccggactcccaagcttcctgcacagcgttcaggtccagcgtctcgccggcggccttgaacacgtactcggaggtggtggtgccgatttcgccgatctcgaccaaattggagacggccggaagcttggcatcgtctgccagctcgacgatgaacgaaccatatgccggggtgaacaggtcgtccacggcgatgctgtcgttcagagtcacgccgatgcggttgccgagcgtcatcttgaacagggcttcggcggtggcgccatagcccggcgtggagacggccagggcatcgtggaagtcggtgagctcctcgatcacggagaacgcctcaagcagtgcatccttgtccggggtcagaccgtcggccaggtagcgcggcgcgatgcgcacgatacggtgatcggcgtccttgagttcaggggaggtggcgcgcttcatgttgcccacggccacggcgaaggagatcagcgtcggcggcacgtcgagatcctcgaacgaaccggacatggagtccttgccgccgatggcgccggcgcccaggtccacctgggccatcagtgcgccgagcacggcggccgccggcttgccccagcgttccggctcgtcgcgcagcttctcgaagtactcctggaagctcaggtaggccttctcatgctcgaagccggccgcgaccagcttggccagcgactcgaccacggacaggtaggcgccggtgaactggttcttggacatgatgtacgggttgaagccccacgccatcgccgaagcggtggtggtctcgccgaacaccggcagcttggcgaccatggccatgttcggggtgagctgacgcttgccgccgaacggcatgagcacggtgcccgcgccgatggtggagtcgaagcgctccgaaaggcccttgttggaggccacgttgatgtcggtgaccagcttgttcatacgctcggccagcgtgccctcgccccacggggtctcgtaggactgctgtgcctcgacatgcacggtctggtgcttggaagcgccgttggaggccaggaactcacgggacagattcacgatcttgtcgccgttccaggtcatcaccatgcgcgggtcctcggtcacggtggcgatcaccgtggcttcgaggttctcttcgcgggcgtagatcaggaactcgtccacgtcctcggcggccacgtccacggccatgcgctcctgggattcggagatggccagctcggtgccgtccaggccctcgtatttcttgggcacggtgttgaggtccacgaacaggccgtcggccaactcgccgaccgccacggacacgccacccgcgccgaagtcgttgcagcgcttgatcagacggcaggcatcgccgcggcggaacagacgctgcagcttgcgctccaccggagcgttacccttctgcacctcggcgccgtcgagttcgagcgattccacgttatgcgccttggacgaaccggtggcaccaccgatgccgtcacggccggtgcggccgcccagcaggatgatcttgtcgccgggggccggggtttcgcggcgcacatggtcggccggggtggcggccacgaccgcacccacctccatgcgcttggccacgtagccggggtggtagatctcgtcgacctgaccggtggccagaccgatctggttgccgtaggagctgtagccggcggcggcggtggtcacgagcttgcgctgggggagcttgccttccagcgtctcggagaccggcacggtcgggtccgcggcgccagtgacgcgcatcgcctgatacacgtaggaacggccggacagaggatcgcggatgcagccgccgatgcaggtggccgcgccaccaaacggttcgatttcggtggggtggttgtgggtctcgttcttgaacaggaacagccagtcctcgtcgtggccgttcacgtcaaccttgaccttgacggtgcaggcgttgatttcctcggactcgtcgaggccggtcaggacaccgttcttcttgagccacttggcgccgatagtgcccatgtccataaggcagacgggcttggcgtcgcggccgagctcgtggcgcatcgccaggtaacgctcgaaggcggccttgacggtggcgtcatcgatggttacttcgtccagctcggtgccgaacgtggtgtgacggcagtggtcggaccagtaggtgtcgatcaccttgatttcggtgatggtgggctcgcggccctcctcgctgaagtacttctgacagaattcgaggtcggccagatccatggccagaccgcgctcgtcgatgaacttctggccggcttcggcgtccatctcgttgaaaccggcgatggtctcgaccttgccgggcaccggcacctgggtcttcagggtttccttggtctccaggctggcctcgcgggcctcgaccgggttgatcacgtaatgcttgatggcgtccacgtcggcgtcggtcagttcgccttccaacgcgtacagcttggcggaacggaccgtcgggcgctcgccctgggagatgagctggatgcattcggcggcggagtcggcgcgctggtcgaactggccgggcaggaactcggtggcgaagaccttggcgccggcgaagtcgggcaggtcgtaggccacattgtccacctgaggctcgctgaacacggtgggcacggtctggtcgaacagctcctgggagatgccttcgacgtcatagcggttcacgatgcgcagggccttgaggccgttcagtccgaggatcgtgcgcagttcgcccgcaagctgctgggcttcgacatcaaagccgggcttcttttccacgtacacgcgaaaaaccatggaaatcctttcttgaaattattgaaaaattgaagaagcgcggtaaaagaacttggctcccctctctgaggggagctgtcagcggagctgactgaggggagttgtcatggcggtgaacgtcttgacctcccctcagtcgcctatcggcgacagctcccctcggagaggggagccagctgtatgttctgctacctgcacctaaacgacttattcggcgacttcgatgccttcggacttggcgagttcggcgaggcgctcctcgatctcttcgtaggccgggatgatgctgccgagaccacggcggaacaggtccttgtcaaggtgctcgaccttgccggagtggtccttctggtcccacagacggcaggaatccggggtgatctcgtcggccaacagcagcgtgccgtcggtggcgcggcccatttcgatcttgaagtcgaccagcttgacgtcgatcttggcgaagatctcgatcagggcctcgttgatcttgcgggccagtggggcgatctcgtcgagatcctcgcgagtgcatacgtc

SEQ ID NO: 1192 - DNA, 6892 bp, Unknown
  R81_24m  MAG No. k141_16830
cgtgctatctaaggctttggagagcggccccgtgctgctgtccattccgcaagacagcgtcagtgagactctgagttgtgcgaaatgccatcgtcaggcgcgttgtgccaagtgttccggaccattgcaactaccggccgaccgccgggactccacaccgcgatgccgctggtgcggggctgccgccatcaactggaagtgtccgggctgtgggcatgaacgtatgcgcgtggtgcgcgtgggtgctgcaggcactgcggctgaactggccggattgttccgcggcgtgccagtagttttgtccagcaagacgcagggtctggtgcgcgatgtggcttgccagccgatgattgtcatcgccactcccggtttcgaaccgcgcgtgcgtccggtcagtgccgagcagggatcggctggccatgagtatcgcgcagtggccgtgctcgacgcttggaccagcctgtatgcgttgggcgtggatgctcggttggatacgttgaccgcgtggatgcgtgcggtgtcgttgtgcgcgccgcgttcccgtggcggccaggcgttgattctcggcgaaaccgacccggccatcgcccaatcgctgatgctctgggattcgaggattcttgcagccaaggatcttgaggagcgtgtggagaccggtatgccgccggccgtggccgccgcctgcgtatggggacgccgtgatgcggtgatgacgctgatgcagcgtatcggcgcgctgggcggcgattggacggcctgcggcgagctgcccggcatgttgggcccggtgccgatcgcgcaaccggacacggtcgacgcccgggagctcgaagccacggccgaccgggtgaaggcagtaatccgtgtgccgcagagtcggcgagccgagctggcggcccgactgcaccgggaaaccgctcgtcatgtggcgtcccgcgaacccggcgagcttcgcttccgagtagatcccaaggacctgatctaatcgtcttcaacacgtgaaacgataattacagaatgaacatcgctagaaggaggacactatgaagggttggcctggagagccggatatggattacgacgtgctggtcgcggatggcgaggccgctgcgaacgccggcaagccgatcaccgacgtgatcttcgatttcggcaatgtgctgatttactgggatccggtcgccgtactcatcccccgctacagccagaagaccatcgacgaattcctcgacaacgacatctccggcttctacgatgtcaacgacctgatggacggcggcaccagcaccgacgaggccatcgccatcatgcgccgtgacaagggcgataagtgggcggacatcctcgactactacatcaagaacttccgcgactccctgaccggcatcgtgccgggcgcgcgcgtgctggtcaatgacctgaaggctgccggcatcggcgtgtggggcctgagcaactgggaatccagtctgttccacgtggccgaggaacagtgcgatattctgcagcagcttgatggcaagctcgtctccggttttgtcaagctgcgcaagccacacaaggaaatctacgaggccgcgttgaaccagttcggcatcaaggccgatggcgcgttgttcatcgacgacaaggccatgaacatcgtcggctcgaatgcggccggcatccgtggcgtacgtttccaggatccggtcaagctgcgtgaactgctcatcgccaatggcgtgaacattccggccgtgcagtgagcatcgacatttcaaggaggaccatgctcaaactcgtgttcgccggcacccccgacgtggcggtgccctcgctcaaggcctttgccaccgatccacgttttgatgtggtcggcgtcattacccgccccgatgcgcctaccggtcgcggccgcaagctcacgcccagcccggtcaaggcgacggctctggagctcgggttgcccgtcatcgatctcaaaccccgctcccccgaattcatggaggcgttgaacgacctgcatgcggatatcgccgctgtcatcgcctatggcaatatcctgcccaagaacgtgcttgatgcggtgcccatgggctggtacaacctgcatttctccaacctgccgaagtggcgtggcgccgctcccgcccagcgtgcgatttgggcgggcgacccgaccaccggcgccgacgtgttcaaggtgggcgagggtttggatgatggcccgatcgtcgcttccctgaccatcgaactgaccggccgtgagacttccggcgaactgcttgaccgtctggccgaggaaggcgcgcccatgtatgtggatgcgctggccgccgtaggtgaaggcaccgccacattcaccgcgcagccggccgagagcctggaatacgcgcacaagatcacggtgaaggacgcccgcatcagttggacggacgaggccgaggccatcgaccgtcagattcgcgcctgcacgccacatcccggggcatggaccgaactgtttgcggaagggccaatcgccgataatgacgagtcaaccgctaaatccctcgccctgcatattctcgccgcacaaccggccgaccagtccaatcccaacactccggccgagcttcagcccggcgagctgaaggtgggcaagaagaacgtgtgggttggtaccggcagcacgccgctggaactcacccaagtcaaggcgcaaggcaagaaggccatgcgcgccgccgactgggcccgaggcgcacgcctctcccccgccgcctgcgtgcgataacaagcaatatcgctcccgccttcggaagcacagtaaaggcccggcatcttcataaagaagatgccgggcctttcagctatgcaatcggcgatcagttgagaccggagagcttgttgatcagctccgggtcacgcgtcgcacccttgtcggccgagcgggcgaaggcggcgtacgccttcagcgcctgggagacgtggcggttgcggtgagccacgtagccgtcgccagcctcaagctcgcgacgacgctcgtccagctgctcgtcagtcagttcgacgttcacggaacgggcttcgatatcgatatcgatgatgtcgccgttcttgatgagcgccaccgggcccttgttggcagcctcaggcgccatgtggccgatggccagaccggaggaaccgccggagtagcgaccgtcggtgagcatggcgacctgtttgccgatgcccttgcccttgacgaaggaggtcgggtacagcatttcctgcatacccgggccgcccttcggaccctcgtaacgaatcacaagcgccatgccaggcttcagggtgtcgttcagaatgacctcgatggcctgctcctgggagtcgaccaccagagccggtccacggaacttccagatctccggcggaacaccggcggtcttgaccacgcagccgtcgggggccaggttgccgcgcagcacggcgaggccgccttcgtgaatctccgggtggttgatgtcgtggatggcgccgttggtgcggtcgcggtcgagcgagtcgaacagggtggtgtgcgtccacggctccggggagatgatgtggccaggagcggccttgtacatctgctgggcttcctcggtgcaggtcgggcgcatgatgtcccaatcggccagcttggcttccagcgtcgggtagtcgatggaatgcacgttggtgtgcagcttgccggcgcggtcgagctcgccgaggatgccggtgatgccgccggcgcgatgcacgtcggaaatctcccacttgccggacggcgaggccttgcagatgcacggcacggtgtgggaaatacgctcgatgtcgtccagggtgaagtccacgtcggcggactgggccatggcgaggatgtgcagcacggtgttggtggaaccgcccatggccacatccatggtcatggcgttctcgaaggcttccttggtggcgatggagcgcggcagcacggaatcgtcggaatcgtcgtagtactggtgagcgatcttgacgacttgcttggcggcacgcttgaacaggtccttgcggtaggagtgggaggcgaggatggtgccgttgccgggcagggccaggccgatggcctcggtcaggcagttcatcgagttggcggtgaacatgccggcgcaggagccgcaggtcgggcagacggtcttctcatagttgagcagttcctcatcggagacgctgtcgtcagcggtggcgtacatcacgtcgataaggtcggtgctcttgactgtgccgtcggcgagcaccgtggtgccggcctccatcgggccaccggagacgaacacggtcggaatgttgaggcgcagggctgccatcagcatgcccggcacgaccttgtcgcagttcgggatgcagatgagggcgtcggcgcagtgcgcgttgcactgatattcgacggtgtcggcgatgatgtcgcgggaaggcagggagtagagcatgccagtgtggcccatggcgatgccgtcatccacggccatcgtgttgaactcgcgcggaatgccgccggcttccttgatagcctcggaaacgatgcggccgaccttgttgaggtggacatggccgggcaggaactcatcgaacgagttggcgatggcgatgatgggcttcttgcccatgtcgtctccgctgacgcccgcagcacggtagagggctcgggcgcctgcaaagacgcgccctgacataatttttgcagatcgcatttcagtcatggttctattcaagcctttgcgagggacacgccatttgtcaagagtcgaataatggaatctgcaaaaacgtaatgtttctcacacattttttggaatacattcctctggcgagagtccggtatagggctgacagaagtccccccaaacggctacacttgtttcggttgagatagattttccaatgtttggagataagaacaatggcttttggtactgacccgacacccgacggtcttgcaaacccgccgatcgacgatctgatgaagcacgccgattccaagtacgcgctggccattttcgccgctaagcgcgcacgccagatcaactcctacttcacgcagctcaacgagggcctgctgcagaacgtcggcccactggtcgaataccagaacaacgagaagcctctgtccatcgccttccgcgagatcgacgagggtctgcttgaggagaccttgggcgaggacgacgccaacgagggcaactgatcgattccgacaattcgtttggattgtttggacagttcgtcgccgaatgatggtgtgagagttctctcacaactgattttgagcgacacgcttgcctgagttatcgcaatcagctataactcatcatcaggagcgaacaagacgtaaggctcgagccaccgcgctggttggcacgagcctttatttatgcccgcttccgcagtgacaagtaaaaattgacaccgtatcattgtgcctcgcatcccgcggggcgataagtcctgaagaaagggatgatatgacagaagaacatcggcttatttccgccgaatccgtgaccgagggccaccctgacaaggtctgcgatcaaatctccgacgccattcttgatgatctgctggcccaggatccgtccagccatgtggccgtggagacctccgccgccaccggcgtgttcctggtcttcggcgaagtcacgtccaaggggtactgcgacgtgcagtccaaggtccgcgaaaccctgcgcaacatcggctacacctcctccgaagtcggccttgacgccgattcctgcggcgttgtggtggccatcaccgagcaaagcgccgaaatcaaccagggcgttgcccgtctgactggcgatcaggagaccgccgccagccgcgaagaacgttacgaagcacagggtgccggcgatcagggcgtgatgttcggctacgccaccgacgagactccgacgctgatgccgcttccgatctatttggcacatcgcctcgccttccgtctgaccgaggtccgcaagtccggtgaagtgccgcacctgcgcccggacggcaagacccaggtaaccattgagtatgacgataacgataagcccgttcgtctggacaccgtgctgatctccacccagcatgatcctgaggttacgcaggattggcttgctgttgagctgaagaagcacgtgattgacccggtgcttgatgaggtgctgggttccaaggtgccgcatgacaactaccgccagctggtcaacccgaccggttcgttcatcctgggcggcccggcggccgacgccggtctgaccggccgcaagatcatcgtcgacacctacggcggcgccgcccaccacggcggtggcgcgttctccggcaaggacccgtccaaggtcgaccgttccgccgcgtatgcgactcgttgggttgcgaagaacatcgttgctgccggcttggcacacaaggtcgagattcaggtcgcctatgccattggtgttgccgacccggtgtccattaatgtggagactttcggcaccgagcagggtgtgacgcgaggccagattgccgccgccgtgcgcaaggtcttcgacctgcgccccgctgcgattatcgacgagctggatctgaaacgtccgatttatctgaagaccgccgcgtatggtcacttcggccgcacggacgttgagttcccgtgggagaagaccgacaaggtcgaggagctcaaggccgcgattgctgcggagtgaggtgctctaattaggacagagagatcataagaataccataagaatagggtgctttccgctgttgatggcggaaagcaccctatttgtttttcgcagtgtcctacgaatctgttcttatttcaatccacgcaccccagtggggtgcgacataatcaaaatcacaatcaccatacacatattccaatttcaatccacgc

SEQ ID NO: 1193 - DNA, 4314 bp, Unknown
  R81_24m  MAG No. k141_16866
cactatgggggggctgattccgattggaatcagcccccccattcgtatggtcatgagaccactacccctgccgtcatactcccctcagtccgctacgcggactgaggggagttccaccagaacacaggaccccttactgcctcagcatgccactccacataccgacgaaatcaggcaaggtcttgcgcgtggtggccacgttgatgacctcgatatcgggaatacgcagccccagcatcgcggcgaacgtggccatacggtgatcagcataggtttccatcacggcaccgtgcaacgtctccgccggcaccggttcgatacgcaatccatcaggcaattcctcagccgctcccccaacacgacgaatctcgttgaccaatgcctccagacgattcgtttcgtggccgcgcaggtgaccaataccaaccatgtctgtcgacttatcagcaaacaccagaatcgccgccaacgagggcgcaatctccccggccgccgtcaaatcgaacgtacccagcccacgcacggtgccgtcaccggtcacctcgcaatagcgcacgccgccgatggtcgggaacgatacttcggcacccatctgctccagatatccgggcaacaggccgcccggctgggtggtggtttcaggccaatgaggcacccggaccgtgccgccggcgatcaatgccgcgccgaggaatggcgccgcgttcgacagatcgggctcaacggtcaccttgctcggcagttgcattgcgcgcggttcaaccgtccatgtgcgggcggattcgtcggcctcaaccgcaccgccggcaccggtcacatcggccacggtcatgcgaatgtgcggcaggctcggggtcttctcccccgtgtgcgcgaggtgcagaccgccaggcagtttggaactaatcagcaacaggccggagatgaactgggaagaaccggacgaatcgatgctgacctgcgcctgggcagccggcaaggttgcaggcggcgtaatagtgaacggtagacggccaacctcgccgtggtaatcaaccgttgcacccagctgttccaaaccgtcaagcaccggcttcatcggacgtgcataagcctgttcgtcgccatcaaaattcactgggccatctgcaaacagggcaaggccgggcacgaaacgcatcaccgtgccggccagtccgcagaacacattgacgttgccatggaatcggccggatacaggaggagtaaccgttacggtggtgtcggttgcggaatccacgtcgcagcggacaccgagggcttcgagtgcgcccatcataaggtccgtgtcgcgcgaacgcagcaggccaatcagagtaacgggcttgctgccgagggcggcgagaatcaggtagcggttggatagggacttgctgcccggcaccgttaccgtagcgttcaacggctgtgcggcgagcggggcaggccagagattcgtgagtcgttcagtcataaggccaaatctatcaaacaaattattcaccggtcggcagcgatgcgggattcgatctgctgatcaggtgcggaagacggctgctcaaaaccgccttcgatggcctgcgcgtgcaacaactgagcggccgcgcgatcggcctcgatggcggcgatctggcgcgagaacacgatgaaccagccgaggaacgccagaccagccaacgcctccacattggtgagggtgttgtgacccatcatcatattgacccagaatgcagcgcatacgagcgcggtcaggtcggaggccaccatcactgctttggacaggcgtggcgcaagccacggcaggagcacgaacagcagcagcatgacgaacggcaggcctttggcgcatatattgtgcaagagattgtgtggcgtgtaccgaaacacgccgatgccgatgaatgccaggccggccaccatcagcaggaaggacagaatggagatgcgcagcatgaaatgtgggatttcgtagccgcgattcggatctctgttggtgcggtcgtgccagaggcgctgtagccgttcggtggtcaccagttcggagatggcgaagtagctgacgatgatgatgcatgtgccggcaagaatcagcgtggagttgaacatacgggccgcaaacgtggttctgtcgccgagctgcgaaaagttgttgtgataccagtatgggtcgtcggtggtcatgccggcggtgaccacgccggagatgacgaagaacggcaacagactggcaatagttttggcgttcatcatctccgcctgtacaaaggtcatgtaccccaccacgccggcgaaggcggcgcagacgctggagatatagccggagaagatggcattgcccatcatgtcgttggccgcaccgatgagtgcaaaagacgacaggaaaatggtcgaggcatacactaccgaaagggcgacgatttcgaaaatgcgacgaatcggcgcaaaccaaccatgtttgaggttcaatgaacgtgatttgcgcgcatagccaataatgaaggaaatgacgccgcatgccgccacgatacctgaacataccatgaatcggcgttgcgtcagctgccagatggccggcgcgtattccatgtacaggttcatcgataccgcgccaatgatggcgcaaatcaagaaggagatgagtccggaggtttctgcacgctgatgacgtcccatgccgggcctcccctatctattcgatgccgcgttatctttcaacaacaaacaaaactccccccgaggacaacgctttactagcaagccagcgggatttggctgtcgccattctactgaaaatctgaaacactacaaaaaaaaacgattatgtacgggcttcttagcctttgcgactatcgttaccgccttgccgagtaccgttgttcatgcagaaagaaagcagtattggacacaatcgaatgagcgtgtcggtatcgttgaaaaagtaatgaatgacggttctatcggttcaacctttaagggacgaaccagccgcggcaccatggcgctgatgcatgactatgccgagctcatcaatgaattacgtccgacagcagagcaattcaccgagatcgagcaatactgggtcaaacgaattcaggcgttcttcaccagcaaaccattcaagctggagtccgacaactcgctttccgttgatgcggccgtggaacatctgctgcggcaggcagcgcagcggcgaagggaggatccgggcaccatgtacgtcggcaccgtcctgcagcatctcgtcgcggcaaagctcaccatcgttgctccggaagtggaaatcaacggcgcgtccgttgctgatgatccgagtccgcggcttccaacggtgaggccgcggaccgtctcacaaaaccgtccgcggctccgccctcctgtttcgtcgcaactgactacaccgacgggttcgggcgcttcgtcacgaaaacgccattgcgatgcaccgtatacgcgccgccgtcactgccccgttccgcccggaacaggacgatcggctcccctgcgatgtcgcgcagttcgacatccgatctgccacgtgtcagatagaagtcgaatatggcgtcgtcggattgacgcacggtgtgcagaacgtcagaggtcacgccgctggcgggcgaccgcaggttggcttccggctgccggccatcctgcggctgcgcggcaagccagcctcccacgaatcgcgtcagatcgctcacgcccagatcgcagccgaggaaatacgcctccccttcgccgtacgtgttgcgggtgatcgcggccatgccgtcaagctcccactcatccgcttcttcgccggcatacgaggcaagcacctgcacatgcggtccggcgacggtcacgtcaccgagcttgtcgatgacgcgaccgagccagtcgaaattccaatggtcttcgatgggctggaggcgatctcagctgaagatggcaagggccacggtgttgacgtcggcctggcccatcaggcggatgtcgtcatcccagatttcctccggccattggtcgggactatagtcgccaccgaaagcgatgccgcgtccgtccgcggtcagcagttttggccatgcgaagtcacgtcatgcacgcacggttatctcctttggcaggcggcgcagggccacggcccatatcggataccagctgatactagctgatagacactcctggccgatagtcgacacgccgccggttccggccccactgccggaaccgacatgggtatgttcatgaccgccgaccgcaggaacgaacaggcccgtccgccacggaccgcatcttgcggttcaggcggacgggccttatgggagggatgggaac

SEQ ID NO: 1194 - DNA, 21927 bp, Unknown
  R81_24m  MAG No. k141_17565
cgccgatgacggttccagcgatctgatcgtgcgcctgtacgaggccgccggcggcaatgccacggccacactgcgccttgacgccgctctcgccgatgccaaggccagcgtgcaggaggtgaatctcatggaggagccggagctggatgccgaactgccgcgcgcgctcgccggtgacgaaccaatgcctgccgacggtgcggtcgtttcgttggcgccattccagctcgccacgctgcgtattcgccgataagggatattgggcctaggctcgatattttgggtcgcgcccaaccgtaacggaaccggaacagaccggctctgccatacggttgggcgcggcccattattgtatgagaagagggagagcgatcccgttgggcaaatatcaatgcgacacgcgacgatgaattcgttgcgtgcatgtttcgattgtgttatgtttttactaaaccgatttagttaacaggttcgcgactggccggaagctaaaacggtttagtctcagcgatgagaactgaataaaggttgtgataccacgtcaatcaccgcgacgggtgactgtgctggagcacaacgattaggtttctccgtccacagcagggcgggatgaaaaaggaatcaaaaggaaaggaaaacatcatgttttctatgaagaagatcctcgccatcgccggtgccggtgcgatgctcgtatcggtggctgcctgtggtagcggaactgcgggggatgacggcggcaagaaggagatctccttccagacctggaacctcaagaacgacaagtacaccccgtatttcgaggcgctgatcaaggcctatgagaaggaccacccggacgtcaccgtcaagtggcttgacgccccgtccgatggttacgaagacaagctgtccagccaggctgcggccggcgaactgccggacatcgtcgacggcggcaactccatcctgtacggtcttgccaaggccggcgcgctgctcgatgtctccaagcaggctccggatgcggaaaaggactactacgaaggcgcatggaagtccgtgaccatgcagggcaatggcatcgagaagggtgcctacggcctgccgtggtatgtcaacgatggcccgacctactggaacaccgagctgatgcagaagtgcggccttgatccgaacaagattccgaccacatgggatgagtacttcgccgccggcgacaccatcgtgcagaactgcaaggatgtctacctgggcaccacgatgggttacaacactgaagatctgatgaccgcaggcgtcaagtccttcatgaacgatgaccacagcaagtacaccttcaatgatgaggccggtgtcaagcagatcagccgcttcgttgagctgtacaagaagggcggcatcccgccggaggccctcgactcctcctggagccaggccgccgatctcttccagcgtggcaacctggtctccatggccggctccgcctactccgctgacggcttcaagcagaacgctccggacctttacaagaacctcgcagtcggcccgcgtatcagcaacgacggcaagtccgcttccgtggcctacgagatgctcggcatcagcgccaactcgaagcaccccgacgttgccattgacttcgcccgattcgtgaccaacgagaagaaccagatcgagttcgacaagaaggcctccgtgttcccgtccgccaaggggggtctggatgacgactactacaagagcatcgacgaaagcacccttgagggcaaggctctgaagatcacgctcgaccaggtcaaggacggctacggctctcgtccgtccgagttcaccgacaacaacggctccaagaacttccagcagcagatcgccctcgctatgcagggcaagcagaccgccaaggaagcccttgacaagtccgtcgagttcgcaaacgagaagctcgcacagtgagcaacgcggcactcgccgctgacaggtcggaggcccgcacggcctccgaccggcctgaaccgatgaacctcaaccacggcaagaagcagaatcgtagcttcggcaccatcattgccccctacctgtttgttctgccagcgttcgcgattgtgtttgtattcatcgtccttgcggcactcaacactttcaggcttgctttcaccaactccacactgctccgtccgggaaccttcgtcggactcgaaaacttcatcaaactgttccatgacgagtacttcctcacggcactgctgaactccacactctacgtgatctgcgtagtgccgttcatggtgatcctcccgttgatcctggcctatctggtcaagggcaactcccgcatcatgggcttcttccgcaccgccttctacatgccggtggttatgtccgccgttgtggtgggtatgatctggaccaacctgctggattccgccggtctggtcaactccgtgctcaaggcattgaagatcatctccaagccggttccattcctcaccgatcgatggggcgtgctcttcagctcgatgttcgtgacaatctggctgggcctcggctactacatggtcatctacctgaccgccctcgccaacatcgatgaatccctttacgaagccgcctccctcgacggcgctggccctgtccgccagttcatctacgtgacaatgcccggcgtgcgctccacgatgatgctcatcatgatgctgtccaccatcgccgcattccgagtcttcaacgaaatctacgtgttgaccaacggctccgcaggccccggcggcatggatatgacgatgtcgatgcttatcaagcgcgaaggcaccggtatccaggcccgcactggttacgcgagcgccatctccatcgtcgtgctcgtcatcgtcggcgtcatgctcatcgtgcagcagatcgtacaaaaacgaggtgaggactgatgaataccaacacgcataaggtcaccgtcggcaaagtcgtccagtatctgattctgattctgatgttcctgctgctcgtcggcccgttcgtctgggaactgtccctgtcgttcaagggcaagggcgacaacgtctacgccgtgcctccctacctgatgccgaagaccccgacgctggacaactacatttccgtgttcaagcaggtcccggtattccactacatgctcaacacgctggtggtctgcctgatctccatcttcggcaacgtggtcttctccacgatggccggctacgcactgggacgcctgaagtggcgtggccgcggactggtgttcaccatgttcatgggcaccatggtcatcccgatcgaaggcgtgatgatctcccagttcctgatcattcgctccatccacctgcagaacacactgctggcagtcgcactgcctggcctgtgcggcgccatcaacatcctgctcatgaccaacgccttcaaatccattccaatggaactcgaagaggcggccatggtggacggtgccaacctatggcagcggttcttccacatctgtgtaccgcaggtcaaaggcacgatgaccgttgtcggcatcttcgcattcgtcggtgcctggaacgacttcctgtggccgttgatcgcgatctccgatgaaagcaagtacaccttgaccctcggcatgaaccgactcaagggcatgttcatccaagatccgcgactgatcgccgccggtgcgctcgtctcgcttatcccgatcatcgtcttcttctgctgcttccagcgctacttcttccgtggcttggaacagggtggactcaagggctgagcggactggaaaaaggaggtactccaatgaaattcggagtcaactacacgccgtcgcatggctggttccacgcatggctcgacccggactgggacggcatcgacaatgatctcaagcagatcagcgaactgggtatggaccatgtgcgcatcttcccgatctggccgtatctgcaacctaatcgcacctggatcaacaagaagggcgtggcggatgtgcgccgcatggtgcacatcgccggcgagcacggtttggatgcctatgtggacgtgttccaagggcatctgtccagcttcgacttcttgccttcatggctggtcacctggcatgcgggcaacatgttcaccgatgcggacgccgttgcggccgagcgtgaactggtcaagaccatgaccgatgagctgtccaaggaacccgcgttcaagggtctgaccttgggcaacgaggtcaatcagctgtctgacaggccgcatcccacgaagatgagcgccacggaccggcagatcgacgcatggctggacgcgctgcttccgaccgccgccggtgaagggcacaacgcgctgtacagcgtcaacgatggcacctggttcatcgatgggcacccgttcactccggtgcagtccgccaccaagggtgatatgacagtgattcactcctgggtgttcaacggcatcgcgcaaggatacggcgccaccagtgaggagtgctcgtcgtacgcactgtacctggccgagctggccaaggcgttcggcaaggattccgagcgcccggtgtggctccaggaagtcggtgcgccggagaatgtgctggaaaccgactacacgccggaattctgccgcaagaccgttgaacgtgccatggattgccggaacctgtggggtgtgacgtggtggtgctcgcacgatgtgcccgccagcatggaagacttcccgttcttcgagcactctctgggcttgttcgacgagcaaggccagctgaagccgatcggccgtacgttcggggaactcgccgcacagtaccgttccgcattgccggctcagccgaagaccgtcgccgtggtgattgatgtggatgaggccggaaacccggtgaaccgcagtgcgctcggcccgggaggctcggtgtgcgacctgtggatgaagctgcaggtggcgggccagcgcccgaccatcatcacctcgcaggtggcggccaatcaagaggcgctcgcgcagcgtggcattctggaattgcacgctgacgaacacccctatgccgcccgttactacactgcggtttcggacccatcgttcgaaacggctgattaaaccgatatccggttgtggaatcatctactccttgttccacaaccggatattttcaattgcagtgcgcacaattgcagtgcgcagggcaaaacataagacccggtactcgccgaagagcgagaagaacgagaagacaatatacgagaagggggagcgctcaatgagcatcaactgcgccgcagtggaccgactcattgattcgatgagcttcacgcagaaagttggccagttgaaccagcgtctgctcggttggaagtccgtggaacgcaatgctgcgggacggctggtggcctcggacgagctcaagcaggagattgaccgatggggtggactcggcaccctgtacggtctattgcgagccgacccatggtctggtcaacattggggtaacggcatacgccctgaggagcggactgaggcgattgccgtggtgcagcaaactgtgctggaacgtggcgcgcacggcatcggcgtattacttagcgaagaggcgcctcacgggcatcaggcgctgggcggcacggtgctgcccaccaatctgggtttgggcgctacgtttgacccgcagggggtgcaggaagcggaagccgcggttgccgcagaactggccgccagcggcattcatatcgcattggtatccggtttggacatcgcccgtgacccacgctggggccgttgcgaggaatgcttcggcgaggatccgctgatggctgcccgcatgtgcgaggccatcgttaccggcatgcagggtgagcatcgcagcaaggtcggccacgggggagtggccgtggtgctcaagcatctggcggcgcaaggcgaggccgtgggcggccgcaacggacagtccgccgtactgggcccgcacgatcttcatgaaattcatctgccgccggtggccgccggtgtgcgcgccggtgccttgggctttatggcagcctacaacgatatcgattctgtaccttgctgcgccaacccgtggctgctcaaggattatctgcgcgaccagctcggtttcgacggcatcgtgatggccgatggcctggccgtggatcggctcgaagacatggccggctccattcccgcggcagggcgtgccgcactgctcgccggcgtggacgtctccctgtgggatgaaggattcacccgcctcgaagaatatgcggatgacgaacaggtagtggccgctgtcgacacggccttgcgccgggtgctggaactcaaagccatgttcggtctcttgcccgaagacggtgccgatcccgccgcaattgccatgccgagcgccgacgccatcgcgcaggccactgcggatgggcgtgagcaggccaagcgcatggcccgcgaggcgataacgctgatcaatgatggccagtctgccgccacgctcgacgatatccgcagcgtcatagctgatgctcaagccggccctgtgattgtcgccggcccgttcgccgacgatttcggctgcttcctgggcgattacaccgcccctctgcccgccgatgaacagtcaagcgtctaccggcaattggtggcacgtctcggggaggaccgggttctcttggccgccaagccgagcgatgcgccggccgatcaatgggcgcgtgcgtcgaccgtggtattcgtatgcggcagcaccagcgaacgcagctatgacagtgaattcgacgacaatggcgcggcgaaggccgtaaccgaatacggtgccacctgcggcgaaggcgtggacttgtctgacatccgcctgccctggcgtcaggatgacatgctaggcgaagtcgcggcattgaccaccgctccaattgtttcggtggcggtgtgcggtcgcgcgcatgtactgaccgatgtgctggaacgctccgccgtgacgatctgggccggatatgccggccaatatgggccgcaggccgtagccgacgtattggttgacggagccgacatgtctggccgccttcctgtgaccttacccgcatatcccgcagccattcccgttcgatacaatgaccgccaaagtgccgcgcatgtctacaaggatgcggcggaaccgatattgcgcggcttcggctatggagccggttcgctggcggcggtgacgttcagcgagatgcacgccgatacgcaatcgcatccaggtgaagtgctggtgcaggtgacggcacatgctgacgatcacggggccgcgggtgccgtgaatctgttcgcgcatgtcagcggcggccgccgcatcccacgtttggcaatgcttgtcgattcggtatacatggacttgaacgcgggagagcgtcgcgatatcgcgttccacgtgccgtgtgatcgtctgcgggatgtcggtgacgggcaagttcaggtgacctgcacgctggatggagattcgacgcatacggtcacggcgacgctgccgggggaatattagggggcctgtatgaatgtggggtgcgaagcactggaaccgcatcacacccccggatggagcctgaaaccgcaaggcatccatcctcgcaacctgcaagtctgcgggttgtcacccgatagaggaaacaacaaaggagattatatatgtgttgctcacaaggtagtgaagggcgctcgtccatcggacgcagactcgccgccgtcgcggcgggcgtagtcgccacagcactgatgctcggatgttcgctggccatgggaacggttgcgaacgcccaggagggggattcccccgttgcggcgtcgcaggagggtaacggcaacaagcatttcatggtgtattaccgcgcatggcgtgacgtgaccatgaaaggcgtgaacaccgatttaccggatgacaattggatctccatgtacgacattccatacggcatcgatgtcgtcaatgtgttcagctacgttcccagtggccaggaagcggcggcccagccgttctatgacaagctcaagagcgattacgcgccgtatctgcatgcccgaggcatcaaactcgtacgaggtttggattacagcggtgttatggtcgacggtttcaagacgtggattgctcagcagggcaaaaacgtcgatagcgcgaccgaatcggattatgacgcgtacgccgatcatgtcatcgaaacgtacatgacctcggttggcctcgacggtcttgacatcgatatggaaactttcccggatgccgcgcaggtggcgatttccgatcaggtcatcacagccctcgccaagcgcatcgggccgaagtcggataacccggaaggcacgatgttcctttacgacaccaatggcagctacactgctccgtttaagaacgtttctgattgcttcgactatgttgcctaccagcagtacggttccgattcgaaccggacggccaaggccgctgccacctacgaacagtttatcgactcgaccaagttcgttcccggcctgaccttccccgaagagggtgacatgaataaccggtggaacgacgcgaccgaaccatacctggacagtcatttctatgatgtggcctcatactcgtacgaccacaatctcggaggcatgttcgtctacgcgctcgaccgcgacggacgcacctattccgacgatgatttggcacacatcaaaccgtcgaatctgatttggacgaagacggccatcgcacaaagccaaggcatgagtctggaaaacgccaagcaggctgccaaccacttccttgaccgtatgtcctataccaaggatgttccagccgaaacgcgccaaaccgtggcagcggccaccaacctgtatgaggtgaacaaggcggtgctcggcgcggattggaacgacggatacagcaacacatatgatccgacgctcgaactttccctgacctccatcgacaccacggcacttaccggtgccatagccaaggcggatgcattgctagctgacggcgcaaccgataccgatgtgcggacaacgctgaccacggccagaaacgcggcggtcactggcctgaccagcaagctgtataccggagctgacgttgtctcctggacggcatcgctcaacaccgcaatcgcagatgcaacgggcggcaagcccaagccgcaacagccaggcacaggcgaaacggacaaacctagttccggtgacgcatcacacaacaagccacagtctgcaaccggacgtctggcaagcaccggttccgatggcaccgtcgtgctatcggtcgccgtgattatgacgctcgccggtatcagcgtattcgcagtccgccgccgcggataacaccggttcgaatgaaccgaaaaacagtatttgggatacggcgcgatatgcgaagcgccgtatcccatggcccacatcggtagggacgaagtagtacgcagacggttgatctccggcgtaagccggaagaagtcaaaggagattatagatgagattgtcactaggcgatcccgctgggtatacttctgcccgggctcaacacaggaaatggctgtgcagcggtctggccgcggtattgtcgatgaccacgctggcggcgttggccgcaccggccagcgccaccggcactatgccatgggggggtgctaggtttttgtcaactccttggggagttgacgggtcgggattccggttggctgtcgtgggcgcgcttcgccctgccggtggcgtccggcgtcctttcccgtgtggcccgattcaggctacgagggctggttcctggtagaggacgccgtttttgagcatgctgtagattacgtcgcagcgtcggcgcgcgaggcagatgacagcggcgttgtggtgcttgccctgttcgcgtttgcgcttgtagtaggcgatggacggcgggtgtttggcggacgcgacgaacaaggactgccacagcgcgttcctgaggcgtttgttgccccgtctggagggtctctcgcccttgatgctggtgccggactggccggtggccggagcgatgccggcgtaggcggccaggtgggccgcgcttttgaagttggcgatgtcgccgacgatgttccagcctaccaggacttcatgaagcagatcgtcgatcagggcatttacatccagtggtacgactcagccacatacccaggtggcggcgtaggctaccaagacatgttcaacggcagcaattcgccgtatgtgcaggatacggacaagggcaagatctctgattccatcttcctgaactactggttcagcggcaacatgcttaaggattcggccgctcacgccgagagtttcggcatcgatccgaaatatgcggtgtttgctggcatcgagtccggacagaagaagttcgacagtatcggcagcaatgcgggctatatgaacgtcaatctcgacgatacaggtaagccgtatgtgagcctcgccgcgctcggcaccgacttcgtctcccgcgaactgggcgacgacaagaaggtctatccgaaataccagaaccaggtgttcgaccgcgaacgccgactgtggaccggctcgtccaccggcgagaagggcaccaccgacatcgccgacaattacatcgacgacggcacgagcaatgacggttggaagggcttcgcttcccagatcgccgaatgctccgtggttggcggttccatgttctctacgtcgttcaacaccggtcacggtctcgaatggcgtgatggcggcgaacggaccagcgaccagcagtggggcaacatcaacctgcaggatattctgccgacatggcagtggtggatcgatgccgactccgacccgctgcaggccgacttcgactacggtaaggactacgaggcggtaccacgcttcaagtacaccaaggtcggtggttacgaaggcggcgattcgctggtgctgagcggcaagctctccaacgacaacaccattcgcctgtacaagaccgacctggatgtcgctgccggctccaagattgacctgacctacaacaagctcaacagcgatgattccaagttgcagcttggcctcatccttgccgacgaccccgagaccgtggtgccggtggacgtgacggacggttcggcaggcaacggctggaagaccgcgagcgtggacctgtcccagtacgcgggtaagaagatcgccacgctgggtctgatcgtcaagtggaatctcgccgactactccaccatcaagaactacttgctctacctggacaataccttcctcggcggccgctacgacgacaccctgtatgtcaagcacctgcccgccaagaccggcacgctcaagctctacgccgtgggcgcggacggctcgcgttcgctcgccaccgaagcgccgctgaacgaagcggcggccgtctccgacgtgaaagtcgaaccaggcaaggacggcaacgtcaaggtctcttggaccaatccgcaggtatccggcgagaaaaccgtgaccgtcaaatccgacaccggttcgtggcgttacgccgcgaagccgtattcccagaccgtcaaggtcgccgccgacaagagcaaagtgacgattgccaatgcgccggttgacagctcccgctatgtggtgaacgtcgataatgcaggtggcactaccgctacggcaacaggtgcatttgccgatgccgccattgagccgtatccggcttgctcggtgatctggaatggcgataatgtgacgctggcccgtcctgagactcaagactggcgctacctgtacatgaccgagaagtggatcggcgagaatggcaagcagcagcaggagaaccagctgggtgctagctacacctactcgcagaacactccgccaatcactggtattatccgtggtcgtaccacacctgcctcatacaccaggtccatcccccgccagtcatgaactgcgggtgcaggtcgaggattacagcggcaacaagaccgatccggtgaagattccgaccgccgacgaactggccaagtgcacggtcgccgaccccacccagccggatgccaagaagtccacgctgccgcggtcgacggttcggccgtggccgacggcaaggccatccgcacggtgcaggcaacggtcaaggattcgttcggcaatccgctggccaatgccgaggtggcgtttgaactgcccgaaggcgtctcggccattggcggaaacaccaccgtcaagaccgatgccgccggcgtggcttcgctgaacgtcgtgtccacgaaggtcggcaagtacacggtgaaggccgtgctgaacggcaatgccatcggcaagggcgtcaccgccgaattcaccaaggtcgcggtgacgccgaacaagcccggcgaccagaacaagcctggcgataccaagccgaacaagcccagccagaacgacaacaagaacaatgacaagaatggcgcttcgttgagtgccacgggttcgtcggtcattgcgattgtggcggccatggtggtgctgcttggcgcgggtgcggtggtacttcgcgctcgtagcaagacggagtagttcgtcgcaatacgggtgttgatactcgtgccataagcgggatttaggggttgcccaatgggtgccccccctaaatcccgtttgttttgtcgcaagacatatgccgagaccagtgactaaaatgctttagttatttgactaaaattattgatatcataagagttagcgcacggttgatgcatatggcccaatgcgggggtgccgtcaaccgtatcgcaatagtcgcaatgcggtcgtaaaaaggagtgttcatgagatctgctcgcgaggcatcgtcatcgtctgacggcacgcagcgtgtgagcctgaaagacatcgcagatgaattaggcatctcgcagaccgcggtatccttcgccatcaatgatcggcccggtgtttccgcggaaaccaaacgtcgggtcaaagaggctgcagccaggctcggctggacgccggtctacgccgcacaagcactgggatcctcgaagaccatgaccataggctttgcccccgcacgatccacgcaggggctcacggatgaaagcttcatgctgcacttcatggcgggtgtgcacgcctcgctcagccccaaaggctatggtttgctgtaccgcccatgccgattcctgaacgaggagatgagcgtatacaaggattgggcgtcgcgcaagcgcgtggatggcgttatcctcgtcgatttgcgagccgatgatccacgcccggaattgttgaagaatctgggtgtgcgcgcagtgcttgccggaggacccgacccgaacaattatgtgccgtcactgtccatcgatgattcacgcacgatgggaaccgtgctcgaacatttgtcgtcattgggacaccgccgaatcgcctatctttccggcgatccgaacctggattattcacaggggcgtgtcgcggcgttccgcgcatttgccaaacggcgaaagctggaatccatcaacatcgaattcaccgattttgttgcggaacaggccgcgatgctcacattggagatgctgcattcaccgaagccgcctaccgcgttcatctatgaaacggagatcctcgccgcggccagtcttcacgccatggccgaagattattccgctcggcagatggaggcgggggagggccatgcggaagtctatccgaatgggctgcccgccattgtcagttttgaagacagtttcatttgtgaggcggcgtatccgtcaattaccgccgcgcatcgtgatgccagcgaatacggtgccaaagtggccaaactgctgctcaaagtgcttgccggagagcaggtgagcggcaaccggcgaatcctcaccccgaaactggtgattcgggacagcaccgccaagcccatggataccatggcgtagaacggtcattgcatcggcttgcagacaatgacatgcgaccagtagggcgttggcccccttattccacgggggccaacgccgttgagaaagaggaagaaaaaaggatatagaggcttagatgctgtcgattattcagcgttcttcacggccgtcgcaatggacacggccgggtccaagaacggaatcagcgtggactggaaggcgtggtacaggtcggacttgcccggccagaccgtgccgatcacgtggttgttcttgtcaagctgatggaaccaggaaccgccctcgtggtcgatgacatgctcatcgacatactgggcgaatgtggcgtaccagttggcgtacatctcctcgccggtggccgcatacagcgtggcggaagtgttcaacgattcggccagcgtccaatgcatgcgatcggtgaccacgggcttgccgttccagtcggtcgtgtaggcgagtcccacggtgccgtcggcgttccatgcgtcggccacggcacgcgcgaacagatgctcggcggcgtcgacgtacggctgtgcgccgtcaaggttggcgaaggagcttaacgcccactgcgtgatcaagcgggcccattcgatgccgtgacccggcgtggcgccgtacggcttgaactgatcatccttcttgtcgacgttgcattcgaggtccagcgaccaatcggacttgaaatgttcggggatgcgccactcgttgtgtgccgcccatccgatgacgtggtcgatgatgcggccggcgcgtactcgataggcgttgtctcctgtggcatccgtcacggccaggaacgcctcggtggtgtgcatgttggcgttgagaccacggtacgggtcgagctcggtgaattcggtgttccaagtatcgacggccaaaccgatttcgtcatcccagaaatgcttgtcatacgtggcaagcgcctcatcaagcagttccttggcacccggacgtccggccagcagggcagaggatgcggcgagtatcacgaaggcatgcgcatagcagaccttgcccggagcatgggtgccgtccgcgaatacctgcgggtaccagccgccgtgctcgtcgtcatgaagaatgccggtcaatcccttgagcgccgcgtcggccagctccccggcgcccggatatccgagcatgtcgccaatcgaatacacatgggccatacggctggtgatccacgtttcgacgccgtgggatgggtcaagggtgccgtcggcgttcagccagccggaaccgccatccggcgctgggaagcctttgccgaacttcagcagctcataggtttcggaagccatgaaaatgcggttggcttcggtgccgagtgcataacgtgggttattggtcataatgattgttcctttccttaacgagaacatgcggtgggtgcgcaatgagcattcagcgggcacgtcttagtgtttcacgcgaatgccgaaatagtccatgaccagttcgcagaacatcatattcgaccagctgaaccattcgcgcgtgtacttggtcggatcatccacgtcgacgccttcgtgcatgagatgtgtaccggcgtcggtggctacaagacggtcgaggatatgcgccttgaagtccttgctgtcgctggtcatcgcctcgatagacagcgcgatcggccacacatagcgcggcggggtgtgtggtgagccgatgcccttgagatactcgccctcgtaatagtacgggttttcgtcgctgagcagcgtgcgtcgggtcgccagatacgtcggatcgtccggtgcgcagtaccccaagtaaggggccgccatcaaggagggcacattgctgtcgtccatgatattgacgtgacccaggccgtcggtctcgaacgcgtaaatcgtctcgccattgcggttcgtcgttttggcgtgggcttcgatgccttcggtgatggtgcggcgcagctcgccggcacgggcggcgatatcggcgtcatccagaatctcaccgccgaagatgcgttccagatagcccatcaccacggcggcgaacatgttcgagggcaccagatagtggtaggtgcaggcgtcgtcgctggggcggaagccggaccaggtcatgccggtgtacgccaccggcgaccccttgccgtcattgctcagcgattcggtggggatgtccgtgtcgcggatgaagaaatacggggagcgttcatgatgctgctcggtctcgaagacgtcaagaatcttcttgacgccggcaatgaattcggcgtcgaagtgatcggcgttgccggtgttcgcatacagcatccaagccaactggatggggtagcacagcgaatccacctcgtacttgcgctcccaaagccaagggctggagaaatcggaccggtcgtccttgtcccaggaggcgccgttcggttcctcgttgaaggcattcgcatacgggtcgatgatgatgtagcggaactgttgccgtatcagaccggcgatcaggttcgcaatatcgctgtcttcggcggcaagggccagatacgggcgcaattgcgcggtcgaatcacgcagccacatggccgggatatcgccggtaagcaggaatgtggtgccgtcgtcatgccgtttgaccgtggtggtcagggtgtcggcaaagcaggcattgaagttctcggcccaggcggtgtgttcggtgccacacaggtccgtgatgtgctgcatgaaatccgagaccgacttcggtatcgcggtggtcgtcataaattcaacttctttgtttgagggatatacatatcaagggaacagcattattctaaaccgctttagttcatgacacgcgaaaggatgtgaagagcatgagtgtgagcgcaccatatgaaaaaccggtgagatttcctgttcggagaatctcaccggttgcgatcagtcgattcgtgaagtcgcacgaatggcggataaggggatgggtggattacttgccgatttcagccagatagtcgggcatctcggccgggtactgcggccaggcaccggcctgggtgcagacgtaggcggcggtgttgacggccttgcggtgggcttctgccagcgtgtcgcccagcaggatgcgggcggtgaaggtgccggagaaggagtcacccgcacccacggtgtcgttcacctcgacgtgcggagtgtccagcgtggagacctcgcccttgcgggagatgatggtggagtaggcggagccggcggtcagaatcacgtagtcaaggccgaattcctcgatgaaccagcgggaggcgtcttcgccggaggtgccgcggatgtcgaacatgtcgcgcagcagcaggagttcctcgtcgttgatcttgaagacggtggccgccttgaggagttcctcgatgaggtccttggagtagtggtcgccacgcaggttgatgtcgaagaacttcatcgcgcccggcttggtgtgcttgagcagctccgtgatggtggcgtgcgattcgggggagcgcagggccagggtgccgaagcagacggcgtcagccttggagaccacgtcgatgagctggcgggtgtacaggatgtggtcccaagccacgcccttgacgatggtgtactccgggatgccgttcttcagcgcgacctcgacggtggaggtcggccaggcgttgcgctggatgacggtgttgatgccggcctcgttggccttggcaatcagttcgtcgccgagctcatcctcgccgaccgcgctgatagcccagccttcggtgccgttcttcatcgcgtggtaggcgaagttgacgggggcgccgccggctcgcttgccgctcggcagcatatcccacagcagttcaccgaggctcagaacgatcggggtagtcatggttggtttcctttcctttgtttcttttaccgggtgtttcgtatggaacatcttgtgatgtcggcgcttggtttaggagacgtcgaagaacaccgaggggtgttcgaggaattgggtcaccgccactgctgcggcaccggagaccgccgcgtcggcggacagggtggataggctgatggaagtggaggcattgatttcggggatggcccgttcggccaccgtggcgcgcacctcatcgagcagtatcgggccggcttcggacacgatgtcgccgatgatgatgtgctcaggattgtatccattgaagatggtgacgcatccgtagccgacgtatcgggcgacttcgcggacaatggcgattgacgcttcgtcgccgtcgccggctttggcgaacagggcgcgggcggcttcggtgtgggtcatatcggccgcgccgggaaccacggtgccatcggcgatgagcatgtcgtgaatggcgggggtggagcagtagcgttcaaggcagccgacgttgccgcaatcgcaggggcggccgttgacgtcgatggagatgtgtccgatttcggtggcggcaccgaggaagccgttgatgagacgaccgttgtcgatgacgccgaggcccacgccttcgccgaccagataataggcgaggttgccgtcggcgtgcaccgacgggtcgaagagataatgtgcgagggctccggcgcgggcgtcctgttcgatgaacacaggcacgcggaaagcggtggcgaattcgtcgatgaagttgattttgcgccagccctgcatgctggacaccacggcggtgcggcctacgttacgcaggtaggggccgggcaccgccatgccgatggccacaatggacgggtcgttgtcaagcagttgttcgacgcgctggtggatggtgacgatggtgtcgttgatggtgttgtcgtacaccgtgggcaggttttcaaagctcagggtgttgccgcacaggtcgaacacgccgatctgcaccagcgagcgggcgaatttgatgccgatgatgcggaaccgcgtggtgtcgagtttgagaccgatggaacggcggttcttggaaccttccaaatcgccggtctcttcaatcatgccggcctcgataaggcgtgcggtgattttggtgatggccgcgggggtgagttccagtgccttggcgatttgcgcgcgggagctgatgccgttgtgatacaggtgcttgacgatgcgggagcggttggattcggagacactggcttgggaagtggcatgggtggtgtttgttgccatcggtcttaagtcctccttgtctgcaccgttgcgagttgttccgctcgtctttgaatctgaacttgattaagatattaacgctgttaattgattgacgcaatcaatatgtcattcggtgtgtcgtgcatgtgagtgtcgtcttgggggaatttgttaagatggttgtcaatagtcggatgcacactgatatcaagcgaaacgttcgatgaagaacaggggaggactgatgtctgaaaacactatgaacaatctcaaaatcggtgttgacgtgggcggaacaaaaatcgaagctgtgctggttgacgcaatgggcacggtattgggttccgcccgtattcccgccaggcatggcaacgatgccgtgatcgaagacatcgtcgctgtagcacatcaggcagcgggtgagcgttttgacgaggtgagggccatcggtgtcggtaccccgggcacggtggattcggccagcgggcatgtgggcaatatcgtgaatctcgacgtggtctcgctggatatggggccgttggtctcgcagcgttcgggcgtgccggcccatgtggaaaacgacgtcaatgccgccgccgtcggcgcggccaccgtattgggcggtgcggacggcatggccggtaccattgcgttcctgaacttcggcaccggactggctgcgggcatcgtcgaaaacggcgtgctgatgcatggctatagcggcgcggccggcgaaatcggccatatcccagtcgaacctcatcgcctcaagtgcccttgcgggcaatacggatgcttggaaacagtctgctcgggcgcatccgtggggcgtctgtggcccaacgccgacccgccgatgcccgacctgattcgtcgcgcgaaaaagcgggaggccaaggccgtcgatgtgctggacatggtagtgcgcgccatcggcgacaccatacaaatcctggctcagtccgttgatccgcgactcatcatcttgggcggtggcatggccaaaaccggcgaaccattggtcgaggtgatcacggctgagctgcgccggcgcgaatcgcaatgccgattcctcgaaacgctggacctgccggcccggctgcgtctggcacctgtcggccaaccagtcggagccatcggtgccgccatggcggcgtagcctggcatagtgccggggcatgggagatgaggcctcagatttgtctccgaggccccatctcccacgcagtcctatatcgctttatgtcgtgctgtgccgcgcttggtcttgcgcgtttcgttgccggggtgaccggcttttatttggccaagtgttggaagaccacggcgatggcctcgccctgtacggtgatgtcaggtccgcattcgcagcgccggattaccgtgtgtttgtggaaggacgaggatgtggcggcatccagatattgctgggccgcgccgatgaacgtcgcgttgatgatgttcggctggccatagacgcatacgtctgccatatccaaaaggcccacaggcatggccagggcttggccaagatagcggcccgcccgagcaaggataccctgatgctgctccatgtctgccgcgctgagttgcttcttcaatgcggttccggaaatcatcgtctccaagcaaccgtgcttgccgcaagggcacagcggcccgtcaagatcgatggaaatatggccgagctcgccagccgcgtgcagttcgccgattaccggcgtgtccgagagcagaatcgccgaaccgatgcctctttcgatgcgcacgaaaagcatattcggcccgccttggccaaagaaacgttcggtgagcatggctgcggtggcgtcgttgctgacgtttacttcaagtccgaaatgttcggcgattggcgtggacaggtcgagattgttccagccgcgcatcgtggaggagcggaccacgccgttgtctaccacgccgggggaggcgactccgatgccgatgacctcgccatcggacatgcccagcatcttctcaatgagctcgatgatcacatccacggaaacgaatgagccggtgttcagggtgacttcggcgtgacgcagcggctggccgagcagattggtgactgcgccgtgcagcaggtgctcctgcgtcaggtcgatgctgatgatgcgcagtcgatcgatatcgatgctcagcagtgtgcctcgtttgcctttgccgccgctgggtgcctgaccggtctcgcgcagcaatccttcctccagcatccgaccgaccacatcggaaacggccacgcggctcaatccggtgcgtcggccgagctcggcgcgcgaatactggttggtggggaacaacaacctgaagataagttggcggttcttgcggcgcacatcggcgggggaagccttggccgcatggtcgtcggtcgttgtgttgagaccgagatatgacatgtttcctcctacctgatggtgagcgagtggacggcgattgttgttccatacacagcttagacggtgaagcgcaatttcgtcgttgaaactgttatgaaacttcactaataaattccagtgtacctgtgtgaagcgtcaggaaacaccgtgagtgttcatgaggtccaaaattgttactatcattaacaaatagcgaatcaccaatcggcgctacgccgaacggtggttggaacgccgcgcggcacccggacgtgacaaggatgttgccattatccgcaagacgggcggcggtacagcgactcgcatcgggcgggccgcacggaactggaggaaaccgatgccggaaatcatcattgtcaagaacgaagccgaggccggcgagatctacggccgttgcgtggcggacctgatcaaagcaaagccggacgccgtgctgggcctggccactggctccagcccgctggccgcctatcaggcgctcgccaagatcgtcaaggacgaggccattgacgtttcgggcgtgcgtggtttcgcgcttgacgaatacatcgggctgccgctgacccatcccgagtcctatcatgcga

SEQ ID NO: 1195 - DNA, 13413 bp, Unknown
  R81_24m  MAG No. k141_18139
cacggcggcgccttccatctccacggcgtcagccccggtgagtcggatgacctcctcgaccttttggggcgtgtccacgaagtagttgccagaggcgatgatgccggtgatgtgggtaatgcccgcattggcaagcgcctcatcggcaacttccagcagacggtcatcagagtggaattcctccaccggagcgtccgcagtgccgggcttccactggcctacgagccgcatgtcagtgtcgaggtagcgtagggtgccgccgagcaccacgtcgttgatgtgcaggtgggtgttgaggttgccggcgatgccgctgaaaatcacgacgtccggggcgaactcgtcaatcagcagctgcgtggtggcggccgcattgaccagtcccatgccgcctaccgttgcggcaaccttgatgacgtcagaaccgaaggagtcgaccgtgccggacacgatgtcaaggctgcccttggcggtgtgcgtcacatgcgtgagcgatttggcgatcagtgccacttcctcatccaatgcgccaataatagctacagttttcatacccatacgtaagttcctttcacaacactttcggctccccttgtcaggggagctggccgccgaatggcgggctgaggggtagtcagacgtttcgtcacattgctcccccccgagagagccgatgacgcaactcagtgccaacgccgcgtggccacggcttccgcaagctcgcgcagcaaggcctcggtttcttcccagctgatgcacttgtcggtaatcgacttgccatagaccagctgatcaagcggcgcggccttctgattgcccccttcaataaagctttccatcatgatgccggtaataccctgttcgccagctgcaattctgctggcaatattacgcacgacttcggcctgacgatgctcgtccttgccggagttaccgtgcgagcaatcaacaatcagaccgtgcgaggctgcggattcggcgggcatttcggcgcgtacgtcttccatggctttggccacggactcggcatcgtagttcgggccgtgaatcgagccgcgcaacaccacatggcagtccgggttgccaagggtctcgactgcgcaggcacgccccagatggtcaatgccgaagaacgtgtgctgctgagcagcggcgaagcaaccgttgaccgctgccttcaccgagccgtcagtggcgttcttgaagccgaccggcatggaaagcccgctggccaattggcggtggatctggctttccgtgttgcgcgcaccaatggcgccccaactcaccgcgtccgagatgaactgcgggctggtgggctccagaaattccgtggcggccgccaatccttccttcagcacaccaagcaaggttttgcgagcaagcaacaggcctttgcgaatattgtggctgccatcaatatccgggtcgttgatcaggcccttccagccgatggtggtgcgcggcttctcgaagtacacgcgcatgacgatgagcagctgctcaccgagctcgtccttcagcttggccaatcggtgcgcgtagtccagcgcggccttcgggtcatgaaccgaacaggggccgacgatgaccaacaacctgtcgtcttggccgtacaggcacgcgcgaatctcatcacgcgagtaggcgacgatttcctgagcctgatcggtcagcgggagttcagcgagcacttgcgcgggcgtgggcagcggctccagctccaatacgcggcggttgatgatgcgactgacacccacctgatcttcccagcgcggcacatcagtggcaacgagcgggttcttcccctcccccatcgcctgacgaatggcgcgaagctcttccggggtgttcaacggctgcggaccgacttgcaacggatgcagcgaatgtgctgcttcctcctgctgctgcataacatctctccttgggtcagtatctttcccaaggataaggtgtcacgggaacaaactgacatgaccaccgttattggcaaaaaatgctcactgagtgggtctcagtgagcatttttacaaagacaaagctatttagccgagctgcgagcggtgacggcgtcggctagggtgtgcagcagctcgttggtgcgttcccacggcacgcaagagtcggtgacggactgaccgtagaccaactggtcgagcggggccggcttttggtgaccgccgaccaagaagctttccatcattacgccggtgatgccttgttcgccgtgcgccagacgctcagcgatctcttcgatgacttcggcttcgcggttttcgtctttgccgcagttgccgtgggcggcatcgatgacgaggccatgctggctcgggccggacgctttggaaaccttgaggtcttccagagcttgacgcacggattcggcatcgtagttcgggccgtggctggaaccgcgcagaaccagatggcaatccgggttgcctttggtttcggcggaaatcacgcgaccgtccaagttaatggacaggaagtgatgctcgaagccggccgcgaagcaggaatcggcggcggccttgatggagccgtcggtggagttcttgaagcccaccggcatggacaggccactggccagttcgcggtggacttgggattcggtgttacgcgcgccgatggcaccccagctgatcgcgtcgcagatgtactgcggggtgatggggtcaagccattcggtggcggcgggcaggccgaggctcagcacgtcggtgagcaccttgcgggccagccacatgcccttacgaatattgaagcgaccgtccagatcggggtcgttgatgaggcctttccagccgatggtggtgcgtggcttctcgaagtacacgcgcatcacgatcacgagtcggtcttccagctcgcgcttgacggcagccagcttttctgcgtactcgtgcgcggccttcgggtcgtggattgagcaggggcccacgatgacgagcagtcggtcgtcgcggccgttgagcacatcgcggatttcctgccgcgagtggagcacgagctcgctcatctcatcggtgagcggctgctccctgaggaaggcacgcggcgcgggaatggggtcaagctgacgaatgttgacatcgacggtctcgggaaagacggcctgctcccccaaacgacgttcatcctcggaactatccggaccacgtagtgctgccattgctcgactcctttccttgtatacgtaccgtcggtatggcgctatagacgcaaaagcccaactatagcagtctgttacggggactgcttgttgggccggcggttatggactttgggtgaactcgcctgcgtggactcgcctgcggcgatgctgtgttgttgtgcggcctgcgaccgcggcctccccccccccgtcagcggcttcgcgctgacagagggagagaccctagcagccggcaggctgcgaaaaaacacagcatcggccgtcaggccgattccgggaggctggcgaagtcaggccaaggcacccatcgggtcccatgcggggagcatggtggctggctcttcgagggccttctggtattcctccggcaacagggccttcgggacggctacctcatagacgtattcggtgaaccagtcgtcggacatggtgaagtagcccttgtcggcgatcttgatgccccaagagttctccactcgccagcggcgggtggtgccgtcgtcggccacgtcaacgccggcgaaagccatggcgtggttcatggcggagtcaccgaagcgcacgcgggcttccttgtccaaatcgaagtccacgtcgtacacgcggccgtactcgaacaggtcggtggcccaagcgccgttctcacggtccatgaacgggtggcagtcggcaccgaaccataccgggatgccctgctcaacgagaatctgcttgacacagtccttcatgaactggtttggcacgttgaggtactcggtagcgtcgccgccagccacattgccgaggtgctcgatgccgatcttcttgcccttggcgtgctcggtgcgcggatcatccaccaggcacacgtagtcctcaagaccagccggacccacgtacttcttccagaactcaaccggcgtaatctcgccgtcgcggtggaattcgccatccttgtcggtccattcccagtcgaaggagaccggcggctcgcccaggtggatggtcagaatacggtggccggcagcagtggcgtcggcaataatcgcctcgaccttggaggcatcgccgtcagcggcgtacatgtgcgccacggcggtgtgcagcatgtggcgcagctgggtgttcatttcaccggtgttcttggaggattcggtctccgggaacaggtccttgggcacagcgccgtacttcttgtacacgttcatggccatggtccactggccgccatcgcccatcacgtcggcgagcaggtgctgcatcaggcgggagtcggaaggctctccggcagccaccagagcggccacatccttaaggaagtagttgacgcgctccagcttgtcgtagtacatcgcatagttctgggagaactcgaactccttcaagttcatgttcttcttggccacgaaacgggccacgttcagggagctgaacagccagcagcggccggagcgatcctgatgggtggcttcgccattgtcaacgatggtggagaaacggcgctgcatcagacgagcgcggtcataattgcgagccaccttgtcgatgccggcggcggtcaccgcgttcatggccagacggttggtgccgctctgtgcgaaatcgccgcgcagggtattcaatgcttcgccggtcagaggcgtcaattcactcatgtcatactccttctgtgatggtgcgcttgtggcgcagatccaaacgaatacggcacctggctcgaaagcgcaggtgccgtaattcttaccgctagtagtctaatcgaaggcctgtcattcgccgttctgctcagatacggctggattctcctgagtcggggcctccggttcgccctgtgtctggtgctcggacggctcagacgattcggactgctcattctgcgcagctgaatcagccgaatcagccggtgccgcatctgtctcattgtgatcgtcggcagccgactcgtttccgctcaactcacccggctgatcatcggcctcgttgtgtacaggcttgacttccgggacgggcgcgaccaccggcaatgacgccacggcagcggcttcctgactctgaccagaggccgccgcattaccaccgaaagcgaatccggagaacgcctgcgagaacatagaacgcagttccgaaacacgctgggtgatgacggactcgcgttcctgcagatcggcgatgcgcttggacagaccgtcaagctcgctttgggcggcggcacgacgctcctcgatctgcgcatcggcttcctcgcccgccttatgcacgattgcggcggcctggatgtccgcctcctcgcgcttggacgcggcatatgaatcggcttggtcgcgagtgttcttggcctggccgaccaactcatcggcttcccgcttggccgccacacgacgctcttcgaggtgctgcaggagttcgttgaccttcttcgtggcctcatcctgctgagcggcgatgtcgtgacggatctgctcgacttcggcgttgacctggctcatcgtgctggtgcgcttgacctcggcctcatcagtgatttcctgacccttggtcttggccgcatcaatgatttcgctggccttgcgctgggcttcggtcatcatcttggacacttgctcgcgcacgtcggcgagcttcttgttggcctcggcgagcgccgcctcaatctgatcgttggaatcggacttaagcttggtgatctcctcattggcgcttttgcgcattgcggcaacctgctgggtagcttccgccttcatatcggcgatttcgcgctcttgggtggagcgttcggaagccatcttcttggtgtgctcttcgcgcgcgttgctgagctcaagctcgacggtctgacgctgttcggtaatggtcttggcggtttcggagcgcagttgtgcggcgtcctcgttggcggaggtggtcactgattcggcctgattgttggcgttcgtcagaatcgaggcggccttggcattggcgtcgtcaacaatatgctgggcatccagcttggcgttgttgatcagtgtttcggcctgcgcctgagccgtggtacggatggaggacgcgtcctgcttggcgcgttccagcagttcggtactcgtctgttcggcggaggcgagcatctgctgggcgttcgctcccagggaagcgaagctgttgccttccggcttcttgttcttctcttcctgaagttgggcctgcagttgcagaatacggtcgtcatccgccgcaatctgctcacgcatgctggccaacgtctgctgcgcacgcttcacactctcctgagtagcgtcgaaggcagcatcaaccttctccttgtcatatcctcgcagcaccaccgggaaacgatccaccatcgctgtttattcctttcgcacacgcataaagctcttggcacatccttgaagcactgtagcgcatcgcactagcgctgggcgttgagcgacgcgcaatcgttacaatgcgtgcgaaccatgttctattccggcgtggcgcgcagcgtgctaggcgatgaggatgccggagctggagggcttgagatagtagcgcacggcttcgcgcaccacatcacggccagcggcgatctgctggtcgagtggcagaccatgctggctggaatccgccggcacgaccggcgggaagctgacgaatccgcccagcacccgctcctgggtggcggtccagttcagcaagttgtagaacagcgaattacatacgaacgtgcctgcgtccgagctcagggtggccggaatcgaatcgtccgtgaaatcattcaggatcgagcgcaacggcaggcgggtccaataggcggccgggccattggggtcgatgggttcgcggcgtggggtcacgttgtccgcgtccggcttgatcgcgtccatcaggttggtggcgcatcgttcaagcatcacgcctcgggctgcgtgcttgagcccggtggcgatgacgatattgggcttggtggcctcaatcgtctctttcagcgtgggccaggctttggcgaagctcaccgggatgctgacggcatggacggtgacggcgacctgctccaacggatcgtccggagcagaggagacgcccaacccctgctcggcgatggccttgggcacttcgacggcgggattgacctccacgccgtcatagtggtcgaagccggagatcacaacattgagttcacgcataatgccagtctagcgatgcatctggccggccgcttgggccagcagggcgtgcatgcgggcgcgggcctcttccttgggatcacgaccgagaatctcctcggcgatacgctcagctgtgggaatatcctccagcgtggtgatcttcaggttggtttccgcaccggagacaatggcgacgggttcatcaggcagataatcgaccacaacgcgcgtgtcgtcggtgggatggaagtccgggtcggcggcagccagatcgtaagcgtgacgaatcgtcgcgaagcggaaggattgcggggtctgcgcgcggaaggtgttcgggcggtccggcaccgacttgaccactttcaaatcgcccagatcctcggtcaacagcacggtgtcggttgaggtgtaggccacggtcgcggccgtgaactggtcgagcgcatcaatcgaaccgtcgatggcggactgttccacgaacggacggacggcgtcatggatcagaatcttggcatcgtccggaatgccagccgtagccagcatgtcgagcgcggcggcggtactgtccacacgttcgtcaccgccgtcaatgatgacgcggaccttggtgtagcccatctcgccaaccaacgtttccacttcgccgcgcaccttgggattgaccaccaccacgatgtcgctgacgcgatcgcaatgttcaaaggcatcaatgctccagcacacgatgggcttgccgcccacggagacaagctgcttgggattgtcggggtcgaagcgcgtaccgaagccggcggccagcaccacggccaccaccggcacggtttgtgccggtttggcgccctgagcgggggccggctggacggtaggcgtctcgacgggggtatcgaaatctctctcagtcataggcaccaccgtagggtgagggctggccgtccgtgaactgcatcacatcttctccacggaatgtgcccgcattctccgtttagtcacgcacgatgagggcaaggaggcggccttcgtgtgttttgttggcgagcgcggcgcggcggtgcgagtaccacagtgggttttcgagcgtgcacatgctgtggctgatgttgtcgatgcgctccgcgagctcggccgggccttcgccgtccgtacggcacagttcggcgagttccgggtcttcctcaaggtactgggtggcggcgtgcacgcgcggcatagaatcgaccacctgatgtacgccggcgaaggcgaggtcgatcatcgcggcttcggcgatgtcgatgccggcaccaccgaaacgggtcttcgtcttggtcagcgggaagcgcttgatgaactggtcggcgatctcgtcgcccacttcatagcagtcgccgcagatgcgcgggccgagtgtggcgacgatgttcgccgggtcggcacccttgctcttcatcaggtctaccgtggcgccgatcacaccacgctccagaccacgacggccgcagtgggccgcaccgatgatgccggtgaccgggtcgcccagcagcaccggcaggcagtcggccgcgaacatgcctagggcgatgccggattgtgcggtgacctggccgtccgcctcgatgacgtgcggagtgtcagtctcaccatgtgtgccggacacgtcgaagccgaagggggtgttgatgacgaacgagtcgtccacgtccacagccacgccggaatgtacttgggagaccagcgataggcgggcttgcaccgcttcggcgagtgcgatgcggttcgacagtacggcctcaggttcgtcgccggacttgccgccgaggttcaggttgccgtaatcgccggcgctcaggccgcccagtcgcgtggtgtacaccaccttgatgccgggggccagtgcgatggggatggtcaccggaatagggcgaccggctttatcggtagagctgatgctgttggaatcgaggatttcttcgctgtattcaggcataaggcattctttcttgggtgcgggcggtgttcatgattcccatgaccacccccagtcagcgggggcggagtggtaggttattcggctttgagggtgggctttttggtgcgcgagcggatggcggcgttgatgggcacctggtgcgggcagggcatcgagaacacgtgcgccggattattgatggcgggtactggcgcgccatcggcatcgcgcaggccggtttccggcacggtaaagaccaatggtctctcgccaggcagcaggaattcaacctgttgaccgggctcgatcttgttacggctcatcagcgtgacacgtccgccttcgtccgcgctccagctcagcacttcgcccactaccagccatgagcggaagtaggcggagcggtcggtgttctgtgtgaccttgtgctccgggtaatagaagccggtggagtagtcgcggtgggccaccttgtcggtttcctcgagcagccattcgggcagttcgacgtgcggggccgggcgaacggccgcatgcttccaatcggtctcgatctgttcgaccgcggtgttggacttgcggcgcgtggagcgggcgtgggagctcatgccgtcgggttcgacggcggtgccggccgacgtaccagaggcagttgagtcggcggcatcagcaaccgtcacgcggtcacgttctgcggcaaccgagccggtgaccgaatcggcaaccgcagtatcagagccacggtcatatccctcatcggccacaccggcgaacgcggcatcggcattgctcatcacttgatcttcggttccttggccaaaatcggggtcgcccgggcgaatcacacggtcacggaaaggcttcagaacattgccatcagcgtcttcaaaaccgcgttgaatcatgtattcattaaccgcggttttgtaggcgttggtcatggcggcgatatagtaggcgcttttcgcgcggccttcgattttgaggctggtggcaccggagtcaatcaaatcatccaagtgccccagcatattcatgtcctgcgaattgaacagataggcgccgttctcggtctgctcgatcgggaagtactggccggggcgcttctcttccacgatcgaatacttccagcggcatggctgcgcgcattcgccatgattgccatcacgcccggtcagatagttggagaacaggcaacggccggagaacgccatgcacatcgcgccatgcacgaagcattcgatgtcgaggtcaccgggaatgttggcgcgaatatcacgcacggcctgcaagtccatctcgcgggccaacaccacacggcgagcgccaagctcatagaaggcgttcgcagcttggtaattggtgacgccggcctgcgtggagacatgcaattccaggttcggagccacttggcgggccatcatcatcacgccgatgtcagagacgatcagcgcgtccacgccggtgtccttgagctggccgacgtactcgcgcatggcttcgatctcgttgttgcgcggcagcacgttgcaggtcacgtacacgcgggcgccgcgttcatgggcgtagcgcgagccttcctcaaagtcctcaaggcttaggtttttgggggccgatcgcatgccgaaggctttgccgccgcagtagacggcgtcggcaccataatcgaccgcggttttcaggcccctcaggttgccggccggggacaacacttcgggctttttgcgggtggggaggttcatcgtcgtattcatcaccgcaatagtgtagtggtggccgtgtaatgcgggcggggctaccgttaggctggataacatgaagatcgatatcgtgagcgtgttccccgaatactttgaggtgatgaacctcagcctgatgggcaaagcccaggccaagggattgttggagatcaaagcgcacaacctgcgcgactggacccacgatgtgcatcattcggtggatgatacgccagtcggcggcggggccggcatggtgatgaagcccgaggtgtggagcgaatgcctggacgaactgctgggattctcgcggccgtctgaatcctccgccctatccggcacaccggtgctcatcttcccgaacccatcggccccgttgtttacccagcgcgacgccaccgagctcagccatgccgaccatctgctgttcggctgcggccggtatgagggctacgatgcgcgcatcccggactactaccgctcccagggcgtcgacgtacgcgaatattcgatcggcgactatgtgctgaacggtggcgaagtggcggtgtcggtgatgcttgaggccatcacccgcctgatgcccggattcatgggcaacccagattcgattgtcgaggaatcctacaccggcgaggacgcactgcttgaacatcgccagtacaccaagccggccgtgtggcgtggtattgcggtgccggacgtgctgttgtccggcgaccacggcaaggtggaccgttttcgccgcgacgaagcgctggcccgcaccgccgagatccggccagaccttatcgcggcactggattgcaaagcgctggataaggccgaccgcaagaccctgatggccttgggctgggaggtctccgccacccatccgcgccggctcgccgattaattcaccacacggtgggagattcactacgcggcggaatcgtcggaacgctctatatccgagtcgtcatccgcgggctcgatgtagaagacggcggtttcgccgtagttgcggctttcagtgatttgccagccttcgggggcggtgggggtgtcggagcgtaccgagcgttcgagcataatcacggtgttctcgttggtggcgctgcccaccgccagattggccaacaactgattgcattcagcggtctcataggcgtagggcggatcaatgaatatcacgtcaaaggattcaccaaagccgccagccacttgctcggcctttttggtgaatacacgggccttgagcgaggcatcccacgaacgattcttctgtaactgcgacaaggtcttggtaatcagcgccgccgcaggccgggaactttccacggccacgagttctcgcgcgccacggctcagcgcttcgatgcccaacgcaccagtaccggcgaacaggtccagtacacgggcgtcatccagcactccccatgagtcgaggtgcgagaaaatcgcctctttggtgcgatccgtggtaggccgggtacccgttttcggcgtagcaagcgccacacccttgaatcgtccagaaattacacgcatagctttcactgtacaggttcatctgcgcataccaatcgtggaaaatggcggaatctcctttcccatcaaaaaaagattgcggaccgtcctcctctattaggaaagacggtccgcaacatttagtaacggatataacgcaatacgttaacgccggatggttcccttgaatggcttatccggagacaatgcgacacgtcccatatcagtccccagaacgttcagcgtaatctccgtgggcttcgaacagcgcaacgtatattccactgtctgatccgtccatgtcgcatccacttggattccacctcttgcgcggagcgcatggaagcttccctcatgccaatcctccggcagggccggaagaacgcgaatccagccatcgtggctttggacaagcatctccgacaaggccgccgggaatccaaggttcccgtcgatctggaacggcgggtgggcgcataatccgctgtcgtacactcctccgcccagcagattggtttcagcgttcgcatccaccggccgtaggaacatgcctatgattcgtttggcgtgttccgcatcacgcagacgagcccacatgatcatgcgccatacgatgctccagccggaaccatcatcgccacgcacttcgagggattttctcgcggcttcctccagacgcggagtcttagacgtgatgcctgcaccaggatgcagttcgtaaaggtgggacagatggcggtgctgtggatcggattcgatgaattcgtcgttccattcaaggactcttccatcagctcccaatcgcgtttcagccagttgggaacggacggattccgcttcacggaccagagcgctgtcctcttcgtcaaggttttccaaatcgtgagaagcctgaatcaaatcatcaagcagattacg

SEQ ID NO: 1196 - DNA, 4504 bp, Unknown
  R81_24m  MAG No. k141_18337
gcgttacgttaccgcgttgcattgcggttcctcgcgggtggcggcgatgccatctccggttgtcattgcgttgctgcgtttgtgttgcgatatgtgatgcggcaacgcagcaatgcggcaatgcaatgtgatgtggcaacgtggcaacgtagcgatgcaataacgcggtaacatggcaacatggcaatgcagtaacgcaacgcagcattcacgccttgatcaaagcgccgatgacgctgtcgaacgcagtgagactgaggggagccaaagcccgaaaccggcaaacacagcaccggccatgagccgatacaataaaggatttgattaatatgactactcatagagcatttaggtggccgtccctgctgacggaatccggccgcggcatcgcgttcggcggcgactacaacccggaccagtggcccgaggagacgctggacgaggatatccgtctcatgggtgaggccggcgtgaacgtcgtatcgctggcaattttcagctgggacaagatcgagccggtcgagggcgcgttcacgttcgagtggctcgaccatgtgatcgacaggctcggcagagccggcatcgccgtggacttggcctccgccacagccgccgcgccgctgtggctgtacgaatcccatccagaggtgctgccggtagaccggtatggtcataccgtcaacgcgggctcacgccagtcgtggcagcccacaagcccggtgttcaaggaatacgcgctgcgcctgtgccgcaaacttgccgaacactacaaggacaacccgtatgtgaccgcctggcacatgggcaacgaatacggctggaacaaccgctacgactactccgacaacgccttggccgcgttccgcacgtggtgcgaggccaagtacggtaccatcgacgcgttgaacgaggcgtggggcacggccttctggtcgcagcacgtgaacagtttcgacgaggtgctgctgccacgtcacatgggcggcgacgccatggtcaacccgtcgcagcagttggattacgagcggttcggcaacgacatgctgctcgacttctacaaagccgaacgcgacgccatcgagcagatctgccccgacaagccgttcaccacgaacttcatggtctccaccgaccagtgcgtcatgaactacgccaaatgggcggatgaggtggacttcgtgtccaacgatcactacttccatgagggcgaatcccacctggacgaactcgcctgctcggacgcgctcatggactccctcgcgctgggcaagccgtggtacgtgatggagcactccacctcagccgtgcagtggaagccgctgaacacacgcaaacgggccggcgaactcatgcgcgactccctggcccacgtggccatgggcgccgacgccatctgctttttccaatggcggcaatccaagtcgggcgccgaggcgttccactccgccatgctgccccacgcgggcgccgattccaaggtcttccgcggcgtatgcgagctcggtaaggcgctgaagaccctttccgacgccgggctgcagggcactgagctcgagcgtgccggcacggcgatcctgttcagcgcggaatccgaatgggccacacgctccgaaaccctgcccagcatgaaactcaaccactggcacgacgtgcgcgactggtaccgcggcttcctggatgccgggctgcgcgcggacgtggtgccgctcgcctacgactggaccggctacaaaaccatcgtgctgcccaccgtgctcagcctgtccgacgaagacgttctccgtatcgccgacttcgcgaaggccggcggaaccgtcatcgtcggctatgccgccggcctgatcgacgagcacttccacatcggcctcggcggctaccccggcgccggcaacgggctcctacgcgacatgctcggcatccgctccgaagaattcaacatcctcggtgaagaagccgaaggcgagcccagcgaaatcagcctgtccaatggtctgacgacccgcctgtggcagaacgacgtgacttccgtagccgcggacaccacagtgcttgcctcttacgcaggtgagtccgccgccgactgggagctggagcgcacccccgccatcaccagccgcccctatggcaacggtaccgccatctacgtgggctgcgacctcaaccgtcacgacattgcccagttgctcaaagcacttggctcccgatggcaggagttgtcggcgcagccgactgagagtggtcaaactccaacctatcccaccacagatccccgcatcctgcacaccatccgccgatccgcagacggctccacccgcttcgatttctacctcaaccgctcaaaccagcccgtcgccatcaacggtgtggaaggtgatcccatcatcgcccaccgttgcgagactgacgccgttggatatacgctgaaccgcaacgccattcttatcgctaaaacgtcctgctaaaccgcgctagaatggcaatgttgtccggatagaggagtgcggcatgagcgacgagaaaacagccaagcgtcgagtgacgctacgcgatgtcgctcaggccgccggtgtatcgctcaaaactgcgtcgaacgtgatcaatggctccgggcgtatgacagatgagacccgtgccaaggtcgagtcggtcattaaggacctcgactaccgagtcaacgtggccgcccgcaacctcaaccgcgatcacaccggcttcatcaccctcgccgtgccttcgctgattccgccatatctggccgagctcgccaaccgcaccatcgaggccgcccgtcagcgcgactattccgtatacgtcaccacgtatgcggaaggctccgcgaaaggcgcgcgcgatctgctgaagaagttcaactccacggtgtccgatggcatgatcctttccatgagcgaggtggaaaacatttcgcccgatgatctgaaggttgattttccgctggtcatcgttggcgcgcgtaccacgtggggcattgtggatcacgtgaccccagacgatgtatccgcagccgccatggccgcaggctacctgtatgaccgcggttccaccagacttgcagtgatcggtgcccgtgacgtttacgacgaagatgcattgctgaatgccgtagaaggcaacgcgcagctgcgtctgcgcggcatcatcgaagagacccgtaggcgtgggctctccttggatccgcagctgattggcaacaccgatcaggattggaccatcggagccggtgcccgtgtgacccagcggctcattgattccggcgtgccattcgacggtgtgattgccttgaacgatcagttggccatcggcgcattgaccgctctgcgcaccgctggttatgaggtgcccgtgcaggtgcaggtcatcggcttcgataacaacgaggaagccccctacctgcagattccgctgaccaccatggattcccgccttgactggacggctcccacggcagtggatcgcatcctcggacgcatcgacggcagcatcaccaagtccgaactgctcaccaccgaatcccaggtcatcgcccgcgcctccacacgctgaacgacattgctgtaatgctggtgttgctgtactgggccgtacgaggcgttgatacaccggttgaccaacacggcataaagcgctaaggtgacgattgtgtggtacacagctgtaccgcgtggcgcataaggaaaggaagcgccaagcatcactgggcgttcgttctgagcgttcaccattcaaaggagaaaaagcatgcgccgaaataccgcgcttactcgcattatggcatccggcgtggccgccataatgctctgcgcaggaggcacgttcactgtaaacgccgccgaagaagaaccagttaaagccgacgtctcggtcaaggccatccaaggcttaagcgatgatttcatcggcggtatggacgtctcatccatgctctcgctggaagaaagcggcgtcacgttcaagaacgccaatggcgaggtcgaggatttgttcacgttgctcaaggaatccggcgtgaactatgtgcgtctgcgtgtgtggaacgatccgttcaccgcagacggccaaggatatggcggcggcaacgtcaacgccgatcgcgcactgaccatggccaagcgagccacggcagcagggctgaaagtgctggtcgacttccattactccgatttctgggccgaccccagcaagcagcaggtgcccaaggcgtggaaatcctttgaaggcgacgcggacaaaaccgccgacaccgtatacgactacaccaagcagactctgaccacgttcaaacaagccggcgtggatgtcggcatggtgcaggtcggcaacgaaaccactgcgaaaatcgccggcatctccggctgggacggcatgtccaaagtattctccgcaggttccaaagccatacgcgaagtgctccccgaagccaaggtcgtcattcatttcaccaacccggagaaagccggcacctacgccacttacgccaaacagttga

SEQ ID NO: 1197 - DNA, 11745 bp, Unknown
  R81_24m  MAG No. k141_
caatggagtctgcgtcgctgcgcactgcgtccagctgttgctgggcatcgtcgcgctgggaagtcagcaagtcgcgttgggaggcataatccttggcgcggctggtcgccagttgcacggcggattcctcgcgggcgatgagttcgcgcagtcgggcgatctgcgcatcgcgctcctgtgcggttttgcgcagttcagtcaatgtctggcggactgaggcaagcttcttctcgtcgtcggcgcgttcctcggtggccttgtcgagtgcgatgcgtgcatcggccacggccttggtttgtgccgcggcctgagactccagttcctcggctcgtttgacgagcatgccgggatcctcaccgaagttggtgacgatctggccggtgagtgaccggctgcgctcttcggccaactgggcgagcgcgttcagtcgttcacgggtctgtgagaattcatgccagtattggttggccttggcgatggccggactggattcagagctcaacgcctcgacctgttcgatgcgtactttgacttgggcgagttcacgctgggcgacggccagctggttgcgcacatcgccaagctcttgacgtaccgtgtcgcggcggttcatcgagcgttgggcgtcttcggcatacaggcgtgcttgggcgtcgcgtacggatatctgaatcgcgtcggcgcgccgggagatgcgtgcctggcgtccgagggggccgagctggcggtgaatctcccccagcaaatcgtcaagtcgactcaggttcgtttcggtattggccaacttgcgcaacgcgcgttccttgcgcttgcggtgcttcaggatgccggcggcctcttcgatgaacgcacggtgaccggacgggtcggccttcagaatcgcatccaatcgtccctgacccacaatcacgtgcatctgctggccaagaccggtatcggagaggagttcctgaatgtcgagcagacggcattgcgagccgttgatcgcgtattcggagcctccgttgcggaagatggtgcgggatatggtgacttccgtgtaatcgatatcgagcgtgtgatcggaattatcgatggtcaggctcacctgtgcacggcccaatggcgggcgggaggacgtgcctgcgaaaatcacgtcctccatcgaagtgccgcgaaggtttttggcaccttgctcacccatcacccaggtcagggcgtcgacgatgttcgacttgcccgaaccgttggggccgacgaccgccgtgatgccgggctcgaagcgcagcgtggtggcggaggcgaaggatttgaatccgcggagggtgagttccttgagatacatggcgtgagactgttttccgtatgtcgggcgtccgggtatccgatgtgccttggatgcgggttaccggacgtcggcggaatcgtcggtgacggcgcctgtgtcggcgctggccgtgccggtgccggcgttaccggcgtcactggcctgttccttgccgaggccgaggacgtcgaacacgtcgaagtcgtccgggctcaccgaatcctcgaggttgtcggcggcctcatcctcggccttgtctgccagccgatccgaatcgtccgggtcgaccgccggctgatggacggccatggcctgcctcatcgtggggctggcatgctcctcaagcatcaggcgtgcgtcgccggcggtgacgaagctgccgcagataagcacgccgtggccgtagcccacgcccagctcgtcctcggcatcgaccatgttgacggcagtctgaatcgcgtcgggcaggttcgcttccttgatcacacggtcacggccgaacacgtccacggcaatcttctcgagctcatcggccggcatcacacgctcgcgccacgagttctcggtgaccaccacggagctcaggatcggctccagaacacccagatattcctcgacttgcttgtcgcgcatcatggcgaccacaccgaccagctgcttgaagtcgtagctttcctcgatggccttgcgtagggcttcggcggcattcacgttgtgtccgccatccagaatgatggtcggcgaggtgcggatctgttcgatgcggccgggaatcttgaccgagctcaacgcctcggccaccaagtcgccgtccagcgggccattgaccggaatcaccacttcggcggcgacgagcgcggcaagtgcgttatgggcctgatgctcgccgaacttggcgatcggcacgccctcgtaagtgccgttgggcgtggtcagggtggcgacttgtccgccgactgcggccatgcggtcggacacggtcatttcgtagccgtcgcgcacgagcgtggcgtggttgcgttcggcggcttcggtgagaatcggcatgacggcttcctcatgcggctgcgggccgatgatggcggtgcagttcggcttgatgatgccggccttctcggtggcgatctgttcgacggtgtcgcccagccactgcatgtggtccatgtccaccggaccgatgatggccgcatccgcgttgagcacgttggtggcgtcccacaggcctcccatgccgacctcgacgatggccacgtccacgggcgtgtcggcgaacttccagatggccatggcggtgagcacctcgaagaagctcatcttcggcttgccttgctcctccatcttggcgtccaccagggccacgagatccttggtctggtcccagatgtcgatgaaatcgtcgtcggacagctgctggccgtcgatggcgatacgctcgttgatcttctccagatgcggtgaagtgtacaggccggtgcgcataccgtaggcgcggcagatggcctcggccatgcgtgcggtggagcctttgccgttggtgccggtgatatgaatcacgcggaacgactgctccgggtggcccaggatgtcgagcatcaggttcatccggtcgagatccagattggtggtgttatgctccggcgggcggctcatgatgtccagttcgacgtcccgcatgctctcattgttccgattcggatgctcgaatgacatatcctcttctgacctctgctcgtgttgctgttgaaccgttcggagtgcgtatgccacttacgtgttcgtgccattctcgtcatgtctacgcatgcccgcatatattccgcttccgcatgcgcaggaagctcccctcgcacaggtttgccctgcatggttcgggattcttgccttcacgcgtggagccgcactccctcaattccctctatcctagccgccggggtggtttatcgtgcgcgcacagtgaaaccgtctcatatgtcgccgccgcgcgggcggccttttcctgcagcgcgcacagtgaagccatctcatatagttgcaatgcggctcttgccgtcggcatcccattcttagtcggctgcaatccaaaacttgtatgtccggcgacgctgatgctattcagcgtcggtacagtgccagcttctggcggtacaccgacgctatgatgctcttgcgagtcggtagctggccaaaacctggattaatcccgactccatcgcctctcagtgtcgtctcctcgccaaggcatgccattctgccgtcgctgagaaatttcaacatcgtcaatcgaccatgtcttgccccggaaacgactctcacaaacgtccgctacatcatcttttgaactcgcagaggctcattcactgttatgactgctctcaccgtcggcagccgtccaagccctggatctatgccgccaataaattgcagcaaatcgtcggccacgatacaaccattggactcacgccgacgctagattccacactcagacagaagccagccaatatctgaaccagcaccgacggcgtacaaagcataagcaccgttaaccgtcaattcgccgccctctaccagctacatccgccttcgccgatgatatcttgttcgaatccccaaagcacgttgttcgaatgacattactgatggtggataagttttgtatgttatccactattccgaattagcggcctaataccttgaaattatcgggaatatctcactccaagacagccaagctccgaggctagaaccacaatggctgaaattcatacttacgctgcttcgttccggctacgctcgacgtcatgaagacacacaaagcagtggcctcgctcatatcagccgcgcagaatgagctgagatgcgtctattcaagaaatgaagcggaacagaccgctctacgccgccgtgcccagagtggcgagttgttgaaagtgtatgacggcattcccagtctttatgcaaataccgcatactgggatggtttgacgccgccggagcgaacgttgcatatggcccgcgctcttgcgcaagagcatcctcagtgggtttttggcggcttggtggcagtaagcgcctatggattcgaacatcaatggcatttgcatgatggctgcataaccatcgtgacttccgatcatggatctcgtcaatgccatcagcgcttacgacatgtctatatgcccgatatgaacaatccgaagacacattacgaggcctccggcctatccctgatatcaccggctagaaccttggtcgaggccgctatagaccttgattttcggtttgcgttgccgatctttgattcggcccttgccaagggaataaccaaggaagagatagccgccgactgcgttcaatggagaatcgattatgcccgagtattccgcctgctgcgctatgcaaacgaaaggagcgagaatggtggagaatccctcgcgcgaggcaccatcatcgaggatcgcttcctcacgccgcgtattcaggtaacggtgaccgacccgcagacgaataccgagcaccgcgtcgatttcgtatggaagctcgatgacgggcgcgtgatagtggccgaatacgacggcacacaaaaatacgtggacccagccatgaccgataaccgcagcattcaggaggtggtggccaaggaacgagcacgcgacgagggactgaaacgagccggtgccaccgaaatcgtccatttcacatacgccgacgtcatcgaacgcactccgctgcgggtaaaactgctcaaagccagagtgccccagatggaggcatccgcagagcagcgggtcccgtgatgcgatgaaccttcatcgcatgggttcacatggattcagcccgcaaaatatgccaatatcaatcggcaagctccagcccatgcccctccttccctaccgagaacaataaacgggcccgcattccagcccgatgcactcgccatatgggcatgtccggaagaccgtccaaattccgtacttggttttaccgtcagccgtcaatcgtggcacatcgcataaagccgactagtatgaggtgggaatcgatgattcgacaacaactacatacaggagagtggcaatgggtgaagtgatcaccgccaaggacaaggaatatgaggccgaggagcgcgctacggcgccgggcgcgaaccagtcgatgagcgaccgtgtgaacaaccgctcgctgcgcccgcagtcggctgcattcaaggagtttatgaagtccggctgggccgacgatgatccggagatcaagcctctcgaatcctccaagttcacgccagcccgccttgaggcgctgggcaaagccttcccgggcgagcgtctggtcattccggccggccagccgaaggtgcgcaacaatgattgcgattacatgttccgcccggacaccacgttcgcctactacaccggtctgggttccgattacgaggccggcgccgtgctggtcctgaacccggtcgaccccgactcccccgaagccgccgccggcaagacgcacactccggaactgttcgtggcacctcgcgccgacaactccaccgaggacttcttcatgtccgcccactacggcgaatactgggttggcccgcgtgctggtctcaaggagatgcaggcgatgaccggcatcgagacccacgacatcgcccagctggccgacgccctgtccaaggacgtgggtgccgaggccggcgccgtgcgtgtgcgcgtggtcagcgagaccgatcccgaaatcacctcgatggtcgagtccatccgcgaggccaacggtttcgccgatccggacaagaactccgcatccgacgacaagctgcacgagttcgccgccgaggcacgcatggtcaaggacggctacgaaatcaacgaaatgcgcaaggccgtggacgccaccaagcatggcttcgaccgtctgctctcctcgctgccggccgcgctcgacaagccgcgttccgagcgtatcctcgaaggcgcgttcaacgccgtgtcccgtgagctgggcaacgccgtcggctacgactccatcgtggcctccggcccccacgccccgattctgcactggatgcgcaacaccggtgtggtgaagaacggcgacatgctgttggtggatgccggcgttgaggtcgattccctgtacacggccgacatcacccgcaccttcccgaccaacggcaagttcaccgacttccagaagcgtctgtaccaggccgtgctcgactcgcagcaggccggtttcgaagccgccaagccgggtgccacctactccgacatccaccacgcctgcatgcgtgtgatcgccgaacgtctgcacgattggggtctgctgccggtgagcgtcgaggagtcgctgtctccgcaaggccagcagcaccgccgttggctcgcctgcggcgtggcccaccacctaggtcttgatgtgcatgattgcgcgcaggcccgctatgagtcctatcagggcgcgaagatcacgcccggcatgatcttcaccatcgagcccggtctgtacttccgcgaggatgatctgctgattccgccggaataccgcggcatcggcatccgtatcgaggacgacgtgctcatgaccgagaacggccccgaatggatttccgccggcatcccgaagcagatcgacgacgtcgaagcgtggatgcggagccgtaaagcaatcagtccggtggactgattgtaggcgacgccgaacgctgacaagcgcgaggaaaatgaaatcatgcgcgaagcgcaccatattaagcaggctgcccaagccaagtaacccttaagctccctcatcagagggagctccttttttctactaaggaggcaatgtgcctactccggaatttgtgttggaattgcgtaagaagatcggccatgatctgctatggctcaatggcgtgaccggttgtgtactgaacgaacatggtcaactgctgttgggccgtcgttcggacacgggagaatgggcgatggtctacggcatcaacgagccgggcgaacagccggcggacacggtggtgcgcgaaatcaaggaggagacgggcatcgatgccatcgtcaccgatttggtggccgtcacctcgtcaaacaaggtgctgacctacgccaatggcgacaacaccatgtacatggatcattcgttcctgtgcgccctgaagcccggcggcaatgccgagccgttcgtgggcgacgaggaaagcctcagcgtcggctggttcgatctggatgatctgcccactcccctggcggccagcacgagcgagcggctggagctgttccatacttacatcgagaacacacagcacggcgacgcccacgccctgttccagttcgatgggcagcagtactagcggatataaagttagctccctctgacgagggagctccaatgctatgcgattacgcctcttgggctaggagctcgtggaggtgggcgcggtgttgctgctgttcgcgcgggtcgggcacgggcagggaggccagcagcttcttggtgtacgggttctccgggtgctgcataatctggtcggcatcgccgtgctccacgatctggcccttatgcatcaccatgatgcggtcggcgagcatatcgaccaccgccaaatcatgggtgatgaacaggcacgcgaagccgatttccgcctgcagtcgcttgaacagctccaacaccttggcctgcaccgacacgtccaatgcagaagtcggctcatcggcgatcagcagcgacggcttcaacgccaaaccacgcgccaaagacgccctctggcgctggccgccggacagctcatgcgggaaacggttcatgtaggcgcgcggcagctggaccatctccagcaggtcgcccacatagttcttggcctcggccacggaaccgtacttgtggtgcacgagcagcggctcggccacattctccgcgatggtcatcagcgggttgaacgaggagcccggatcctggaacacgaaaccaatgtccgcgcgcttgggcttgaagtcacgctccttgacgccgttcatctcgatgccaagcacgttcagggagccgccggacaccttctgcaggccggcgatggcacggccggtggtggacttgccggaaccggactcgcccaccaggcccagcacttcggagcggtggatggtgaagttcgcgccgtccacggccttgaagtcgggctgcatgagatggcccgggtacgtgatggtcaggttcttggcctcaacggcgatcggctgttcgcgccaatcggccttgcgctcgatcggcttgccctcgcggtcgcgcacgaccagcttctgaccgatgcgcggcacggcacccagcagtcgcttggtgtagtcgtccttcggatggtagaagatctgctccacgtcgccctgctcgaccacgtggccgcggtacatgacgaccacctggtcggcgatgtccgcgatcacgcccatgttgtgggtgatgatgagcacggaggcgtcgaactcgtcacgggcgaggcgcagcaggtcgagaatttcggcctgcacggtcacgtcgagggcggtggtgggctcgtcggccagaatcaggccggggttcagcaccaacgccatggcgatgacgatgcgctgcttctggccgccggagaactggtgcgggtagtagtccacgcgggtttcggcatccgggatgccgaccttcttcaggatgtcgatggccttggcgcgcagttccttcttgtccttcatgccgtgggcgcgcaggccctcttcaatctgccagccgatggtgtacaccgggttcagcaccgaattgggctcctggaacaccatcgcggcctcggaaccacgcacttcgcgcagctgttcgccgctcagggagagcacgtccagcgaatcggagccatcgcgcttggacaggtagacggcaccggaggtggtggccgtctccggcagcagcttgatgatggagcgcgcggtcacggacttgccggaaccggattcgccgaccacgccgaccacggtcttgcgcggaatggtgaagttcacgtcctcgacggccttgatggaaccggcgtcggtcatgaaggagacggacaggtccttgatatcggcgagattcttgttgtcttcgctcatctctcactccttgccttccggcttgccttcaccggtccattcggaggcgacgatggtcgggtcatggtcggtgacggtggccggtgggtcgacgttcgcgtcgagttcggcgatcacctcgttgcgtgcggacggcttctcgtttgggtcgacggacgtgtcttcgatcgatccgaccacttcgccggcggacttgcgggcgcgcagacgcgggtcggccagatcgttgagcgattcgcccacgagcgtgatgccgagcacgataagcacgatggcgatgcccgggaacacggcggtccaccagatgccggcggtcacgtcggaaaccgaacggttcaggtcgtagccccattcggcggcggcggtcggctcgatgccgaagccgaggaagcccaggccggcgagggtcaggatggcttcggacgagttcagcgtcaggatcaccggcagcgtgcgggtggagttcttgaacaggtgcttggtcatgatgcgccaggtggaggcgccgaccacgcgcgcggactcgacatacgcggattccttgatgcggatcacttcggcgcgaattgtgcggaaatactgcgggatgtacaccacggtgatggagatgccggaggccagaatgccgctccacaggccggactggccgtgggagatcatgatggccatcagaatggcgagcagcagcgaggggaaggagtagacggcgtcggcgatcatcaccaggatgcggtccacccagccaccgtagtagccggacaccagaccaagcagcacgccggcgaagatggagagcagcacggccacgacgatggcgatgacggcggtgcgggcaccccacaccacacgggagaacacatcgaatccggcggcggtggtgccccagatgtgttcggcggagggcgcggcctgcgccgggaaggacgtgccgtcggcggccttgatctgggcgtggccgtagggggcgatcagcggggcgaagagggccacgagcaggaagaacgcggtgatcgcgagaccggtgatcagcatgcccttctgccagccgaccgccacgcgcagttccttgatgattggaatcttggtccagaacggcgtcttggtgctgacgttgagcttggtgaggcggtcgtcaccggggacggtgatcttgtcggaggatgcggtggtcatctcagtacctcactctcgggtcgataagcgcggcgatgacgtcgacgaggaagttgacgacggccacgatgatggcgataaggatcacgatgccctgcacggccacgaagtcacgggccttcaggtactgggacagcatgaagcccaggcccttccattcgaaggtggtttcggtcaggaccgcaccggcgagcatcagggcgatctgcatgcccatgacggtgatgatcgggatcagggccggccgccaggcgtgcttgttgagcaggcgcttttcggagacgccgcgcgagcgggcggcctcgacgtagccggaattgtaggtggagatgacgttggtgcgcaccagacggatgaacacgccggcggtcagcaggcctagggcgacggccggcagcacggcgtggcgcagcacgtcgacgagcacgttcatgtcgccgagctggatggcgtcgatgatgtagaagccggtcggcgataccagacgggtgaactgcatttcggagttcaggtcggagcggccggaggctggcaggatgttgagccagacggcgaagatgagcttcagcacgaggccgaggaagaacaccggggtggcgtagcacaggatggcgaagatgcggatgccggcgtcggcggcacggtcgcgtttgcgggcggcgagtcggcccaggccgatgccgacgatcagcgccacgatcagggcgaggaaggccagttcgaatgtggcggcgccttagtgcgtaaggatgctgatcaccggctggttatcggtcagcgtcgtgccgaggtcgccgtgcagcaggccgccaagatagtcgacgtattgcacgatcagcgggcggtcatagccggccgcgtggatgcgctgctggagttcggcgggtgtcaggcggccgcccagggcggcggaaatcgggtcgccggtggcgcgcatcacgaagaacacgatggtgaccagaatgaaaacggtggggataatgaggaggaacctcgtcagcacgaagcggaagaaactacctgacagtcggttcttcttcgtcttggctttcgccggagtggtgctggaggtcgctgtggcgctgtctgacacgcgatgctccttggtgttggtaatcggtatataaagcaataaaggctcccctctccgaggggagctggcggggg

SEQ ID NO: 1198 - DNA, 5069 bp, Unknown
  R81_24m  MAG No. k141_18532
  misc_feature (5069)..(5069): n is a, c, g, or t
catctggcgcagctgggagacgagatctttccactggcgcatcctcagccagctgaagtactcggttttgcagatacggcgcagcgcgttgttgctcgggtcgccgtccgcttggaacacgcgatcccagatgttcagggccgtcaggaaatcggaagtctcatccgcatatcggttgtggatacggtcggcatcctcacgcttgtcgtccgggcgttcacgtgggtcctgcaagctcaggaacgccacgaccacgagcacctgggccagaagattcggcgaaccggttttcgcggcctcgataaccatacgtcccagacgcacgtcgatggggatgcgcgccagctgacggccggtatgggtgagcgtcacctcgccgcgctttcggccgatggccttgagctcggtgagctcattgaaaccgtccgacacggccttcatatccggcggatcgatgaacccgaagttcgtgacgtcctcggccgtgcgggccacgcccaccgacagcatgtgaagcaccacggcacccagcgaggtacgcaggatttccggctcggtgaagcgcggtcgggtctcgtaatcctcacgcgaatacaggcggatcgcgatgccgtcggccacgcggccgcatcggccggacctctggtcggcactggcctggctgatcggctcgatcggcagacgctggacctttgcggtcttcgaataccgggagatacgggcggaaccggggtccaccacgtagcggataccgggcacggtcagcgaggtctcagccacattggtggcgatgacgatgcgctgatgcaaatgcgattcgaacaccttgtgctggtcggcggcggacaatcgcgcgaacagcggcatgatctcgatggcgtccggtcggcgcatgtcgtcggcgcgcggaccgtaatgatgccgcagtgcggcctcgaactcgtggatgtcgcgctcgccggaagcgaagaccagaatatcgcggggaccgcgctcatgggaggagtggatcaccagttcggcgcaggctcgagccacggccgtgggcatatcggtgatgccgtcatcggcataggagtcgccggaccggccgcggggccggtcggaatcggattccgcgatggcgctggccagctcgtcgtaatcggcgtcaccggggcgagcgcccaccgcgaatcccggcacttcgcgcatcaacgcgggcgcggtgccaagcggctcatagaccacctgcacggggaaggtgcggccggaaacctcgattaccggcaccttctcatgcaaggcgtgctcgaaatgctcctggaacttgaccgaatcgatggtcgcggaggtgatgatgagcttcagatcgcggcgctgaggcagcagtgccgtcagatagccgagcagaaagtcgatgttaagactgcgctcatgcgcctcgtcgatgatgatcgtatcgtattgggtgagtttcggatcgcgctggatctgggcgagcagaataccgtcggtcacgactctcaatcgcgtgctgggcgagctttcgtcggtgaaacgcacctgatagccgacctcgtcaccgagcttcacgcccatctccgaggcgatacgttcggccaccgtgcgcgcggcgatacggcgaggctgggtgtgcacgatctgcttgccgtgcgcgccacggccaagctcaagcaggatcttcggcagctgtgtggttttgcccgaaccggtctggccggacacaataacgacttgggaacgtttgaccgcgctggctatctcatcacgcgcggcagatacgggaagttctgcaggatactcatatttcatgacggacttcaatgatacggaagcccttggagctcgcgtatttgctcgcagtgaacccctcgccgagcgcatcgtccagccaggggatcagcgaatcggagccgagattcttctgcactacgagataggcggcgccgcccaccttgagcttcggcagccaagccataagcaatgtatgcagcgcttccttgccgacacggatcggtggattcgaccaaatcgcatcaaacgtgaggtcgcccggcaccgtctcgcagaacgccggctggttctcggcgggcaggggagtgctggactcgtccacctgagccgtatgaatgttcgtgcggccgttcgcctgtgcgttggcatgggtcaggtccagcgcgcgctcgttgacatccaccgcccacacgttcgcttcgggcgactcaaacgccaatgtcagggcgatagggccccagccgcagcccaaatccaggaaatcgccggtaagcggcggctcgggcgcatgcttcagcaataccgatgtaccgaggtccacgcgcgagccggagaacacgccgttcgacacctgagcggtcgcctcatggccgcgcaacgttacgttcaatgtgcggcgcacgtccttcgacgcgggttccgcagagaaatactgttctgccatggtcgctccatttctgcgggattcgccgctctcgtatgccgacctgtatcagccggcctatgccggtacgtgccgatctatgccagcatgtcacctcatgtgatgataataaaggaccatagaagaatcgtgaaccattccaaccaaacgaggcgcacttgaccgacaacacccagtacaccgacatcgaccgcggcaacaacgacgttacccctgaaggtgtgctggccgggcagtccgaagtgctgctcgacgacagccagcgcgcgaccggctggcacgaggacgccaaccaggaatgggaggagcgcgaggcccgcaacgagctcaagcatgtcgctggtctcggcgagctgcaggacgtcaccgaagtcgaataccgcaaggtgcgtctggaacgtgtggtgctcgtcggcgtctggtcgtccgccgtcaccacgcaagccaaggccgaggaatcgttgagggagttggcggcgctcgccgaaaccgccggtgcggtggtatgcgatggtttgctgcagcatcgctccaagccggatgcagccacgtacgttggttccggcaaagccaaggagattgccgacatcgtggcgcgtgaggaagccgatacgattatcgtggacgacgacctgccgccgtcacagcgccgtgcattggaggacgcagccaaagtcaaggtggtggatcgcaccgcggtgattctggacatcttcgcccagcacgccacctcgcgtgaaggtaaggcgcaggtggagttggcgcagctcgaatacatgctgccccgactgcgtggttggggtggttcgctgtcccgtcaggccggcggtcgcgcggcaggcgcggatgcgggcatcggatcgcgaggcccgggcgagaccaaaatcgaaatggaccgtcgtgtaattcgcacgcgtatcgccagactgcgccgtcagattcgtgagatggctccggcacgtgaggtcaagcgcggttcacgccgtcgcttcggcctgcccacagtggccgtggtcggctacacgaacgccggcaaatcctcgttgaccaaccgtctgaccggttcggccgaactggtggaaaacgcgctgttcgccacattggacacggccgtgcgccgcgccaaaacccgcgacggacgcgcttacgcctacgtggacacggtcggcttcgtgcgccgcctgcccacccagctgatcgaggcgttcaaatccaccctggaagaggtggccgaggccgacgtgatcctgcacgtggtcgatggctcccaccctgacccgttctctcaggtcgacgcggtcaatgacgtgttggcggacatcgaaggcacggcctcgattccgcgtattctcgtattcaacaaggccgatcaggcggacgaggcgacacgtgaacgactcgccgcactgcagccggatgcgttcatcgtctccgcctataccggtgagggattggacgagctgcgtaccgcggtcgaaagtctgctgccggtcccgcatgtgcatgtcaacgctctgctgccgtataccgctggctccctgatctctcgtgtacgcgaatacggcaaggtggacaaggtggagtaccgcgatgatggcatacagcttgaagcggacgttgacgcccatcttgccgctcaggtggtcgaacagtccattgactaacgtgataaacatcacagtttgtttgtgagcgctaacaaccgttggaaacattaccataccgttatcagacagggtggtgtgctggtagcaaaacgtcttagcgggtttatagagtgaagacgttagttacaaggcctgccattcatcagcagaccgcctttgaagagaggttcatccatcatggcggaaactaccgttaagcccacgaagcttgctgttattggtgccggtgccgttggctccaccctcgccttcgccgctgcccagcgtggcgtcgctcgcgagatcgtgcttgaagacatcgccaaggagcgcgtggaagccgaagtgctcgacatgcagcacggctccagcttctacccgaccgtgtccatcgacggttccgacgatcctgagatctgccgcgacgccgacatggtcgtcatcaccgctggtccgcgtcagaagccgggtcagtctcgtcttgagctcgttggcgctaccgtcaacatcctcaaggccatcatgccgaacttggtcaaggtggctccgaacgccatctacatgctcatcaccaacccggtcgacatcgctacccacgtggctcagaagctcaccggtctgcccgagaaccaggtcttcggttccggcaccaacctggactccgctcgtctgcgcttcctgattgcccagcagaccggcgtcaacgtcaagaacgtgcacgcctacatcgccggcgagcacggagactccgaagtcccgctgtgggagtccgccaccatcggtggtgtccccatgtgcgactggaccccgctgcccggccacgatccgctcgacgccgccaagcgcgaggagatccaccaggaagtcaagaacgccgcttacaagatcatcaacggtaagggtgccaccaactacgccatcggcatgtccggcgtcgacatcatcgaagccgtcctgcacgn

SEQ ID NO: 1199 - DNA, 25083 bp, Unknown
  R81_24m  MAG No. k141_18710
attccaacggatatgacgaagccccgaccatgtttcgagcatgattcggggcttggtttataggtaagtcgcgcgtttttgcgctctcacaacgtggacgttggcttacgcaagaatgccgtctacgaagccttcgggatcgaacggcgccagatcgtccgggccctcgccaagacccacaagcttgaccggcacgccgagctccttctgcacgctgatcacaatgccgcccttggcggaaccgtcaagcttggagagcaccacaccggtaatgccgatggcttcggcgaacaccttggcctgggccatgccgttttggccggtggtggcgtcaagcacaagcagcacctcgtccaccggcaggttcttttcggtgacgcggcgaatcttgccgagctcgtccatcaggttcgacttgttctgcagtcggccggcggtgtcgatgatgagcacgtccgcgttcgcttccttggccttggcggatgcctcgaaggcgacggatgccgggtcggcaccgtccttgtcggagcggacgaccggaacgccgaccttggcgccccaggtttcgagctggtcggcggcggcagcgcggaaggtgtcggccgcgcccatcatgacctgcttgccttcggaaacaagcaggcgggaaagcttgcccgcggtggtggttttgccagtgccgttcacaccgaccatgatgacgacgctcggcttgttcgcgccgtccttgtcggcgttgagccggcggtcgatgtcagtgccgacgagcttgagcagtttgtctttcagcgccgcgcgcacttcggccggatcggactggcctgcgattcgggcgtcgttgcgtagttcctcgacgagctgttcgctggcttccgcgccaacatcggcgagcagaagggtgtcttcgacgtcttcccaatcggcttcggagagctgatccttcgcaagaatgttgaacagggccttgccgaacggattgccggatttcgacagccgcgccttaagacgctgcatgcgtgtgccggcggattcgggggtgtcacgaaccggttcgggcttggcttcggtggctggtgcaggagccgccgtttcggaagaggaagcttgagctgaggacttctgctgactttcagccggagctttttcagctgcatcaacattggaatcaacggacggcttcaccgtggaagaatcagatgcggccgactccgcttccgcagcaagacgggcgtcggccttggctttcgcggcttcggtggacttggccacggcagccttgcggctcttgccgaaccaccatccgccgatcaccagaattgccgcgatgacggcgacggcgacaatcgcaataatcacattcgtatccatggctccagcctaagaagcgcaacggacacaccggctccgccccgcggacgcaccacgaatgtccgattcgccagggggataaggtgctctgccatgcaaggcatcgataatgcgatcttgacttcgatacatctggtgacgtttttatagatcatgaagagtgattcttttgtcttccgctgtctgctttgaaggactgcttcctttctttagggaatttgcgtagcgaatcagactcctcgcgatgaggaagaccagaacgaatacggcgattacgcctaggatctcaatcaataatgcaatccatgtccagctcatgattcatcctttctctttctgtactcgtctatgagtattcgagccgtgtcgacgtcgtatctatcgtcaatggcgagactcttcaccaagaggatgaatggatcctccgtatcgttgtcgttcaaccgtattttttcgataagcctgtcaagccggatcctcatggtcgggtaagagacttgatacagctgggacatttgcttcagagatcctgacgatagcacgaagttcttgatgaaggccaaatcctcctccgtaaggctggccaaccattctggtagacgatccacatcaccctctttaataaaatttattatttattaaatatattaaagccgcgatgaagcattgtcaatatgacacacatgtccgattcactagaatcggacgatacgtgggggcggacggtcagggagctatccacggggcgtgaaaaactggacagcatggccaatacatccagaatgacgtcgtatcagcggcgcgagcagctcatcgaaatcggtcgttcgctgttcgcgtcgaagggttttgaagcagtgagcgtggaggagatcgccgcccccgcaaaagtatcgaaacccatcgtatatgagcatttcggcggcaaagagggcctgtacgccgtcattgtggaccgtgagatgcgcgcgttgaccagtgtgctcaccgccgcgcttgacgatccgaccgtgcacccacgccagatcgtggaacgcaccgcactcgcactgctcacctatatcgaagaggacgccgagggattccaggtgctggcgcgcgactcgcccagcaccgaaccgtccggctcgttcagctcactgctgggagacatcgccgtgcgcgtcgaagacatcctttccgaaacattcaaacggcagaaactctccaccaaaggcgtgccgtactatgcgcagatgctggtgggcatgaccgtgttcaccggccagtactgggccgaccggcccaaggtgagcaaggagcagctggccgcgtacatcgtggacctggcatggcatggcctgagccggctcgattccaagccgcagctgttgtttgaaggcgtcaaggcccggaaggaggccgagcgccgggccaagcgcgggatcgatgccgaaacaccggccccggacggcaaggcatcatcgcccttagagcagacggacctcgaccacacgctcagggaagattcagggttgcagaatgtgagttcaggggcacaggttgcgcaacactctgccgagtcgggagacgaagtgctacggtttgaacaggaaactgaacagaacgactaaatatgtgaggacgtaagactttcatggccagcacggcaaagacgctcacctttgtgatccccgcatacaatatggagtcctatctcgaccgttgcgtgaactcgctgctttcggcaagcgacaccagcgacctcgaggtactgattgtggacgacggttcgaaagacggcacgctggagtacgcgcgcaaactggaacgcaccaatccaggtgtcgtgcgcgcgattcaccaggagaacaaaggccacggcggcgcggtgaacaccggtatcacggcggcgaccggcatgtatgtcaaggtggtggatgcggatgattgggtcgacccgcaggccatcgacacggttctggccacgttgcgcgcgcaacgtgaggccagcgagccgatcgacatgctggtgaccaactatgtgtatgacaaagtgaccaagcgccacaagatcgtggtgaacttccgtcatgtgatggaggccggccgcgtgctcggctgggatgacctgggcaagttcggtctggcgcagtacatcatcatgcatgcgctcactttccgcacgcaggtggtgcgcgattccgggctgaagctgccggagcatacgttctacgtcgatttctattactcgtaccagccgttcccgtgggtgaagcgcatccagtatctcgacgtgccgttctaccactacttcatcgggcgcgagggtcagagcgtgcagaccgacgtgatgattaagcgtgtggatcagctgcggctcgtcaatcggctgatgaccgaggccacgcccgaacgtggtacggtgccggaggggctgtaccggtacatgattcacttcctgacgatcgaatcatgcgttacctcggcgttcctgattctctcgcgcgatccggccaactacgttaagaaaaccgagctgtgggatgcgattgacgcctattctccggccatcggcaaggatgtgcgctcgaagctgatgtcccgcgcgctcaatctgcctggtaaaaccggccgctggatcgtgcgcaacggctatctcatcgccgaacgcatcgtcggcttcaactgattcggattgcggctttgccctgctgacgcgttatcagcagggcatccctattacctccccagccgaggttttgctactcggcccaacggtcggacattgcgaagctgttgtgcatcaggttgctggaggtgtatagcacgtcgttcagcagcttggttgtatgctcgcgcaggtagtcggccatctcgtcgttggccgcttcgagcacatccgccacgccctgcacatccttctcatcgccgtggccgccatcgagcggccatgcattcgtacccgtcgattcggcatcgcttcgagcaagcaactgctcatccgtgcgctcgatgagccggtgcccgaacgcgcgcacgccttccgcatagccctcgatgaaccggttcgtctcataccaatgcgcgtcggccacgacggcgatcaggcggttcgtccaatacaggttgccggtggagacttcgggcgtggtgtcgcgcaggtaggcaggcgtgtcgttgacgttcgcgtagaacggcgcggcggcggtgaacggaccggagccgaacgatacccacatcaccgtgcgattggccgccggcacatacgggcggacctgaatcgccaccatatggccggtgcggttcacgccgatcggacggtaacggtggcgcgattccgccgtgccggtcgtgccgtacgggtcgtacggcgtgccttcgaagtgcgaggacagcaggaaatcaacgtcttcgaggctcaccttgtcttccggcacgcggcaccacgggatgtcgtcggattcgggcgtgtagtgggcggccggcgaatcccagtcctcgctggggttgaggcggcgttgcatgtaccaggcacgcggcgtgttgtagatatggtccttcggcgtcgcggtgccgaaggccttgcgcgggttgaagcgggtgggaagggcaacggttgttccgaatccggcgctatgcacgtgacggccgttggaagagaccgacgttcccattgtgcggtcaaggtgatgcgtggccatgaactcgcgcaggtcggcgctgcataggtattcgcgctgctcgccgaacgcatcggcgaggtcgaagtcgtcgatgccgagctggttggggatcgtggcatagcagtcgtcgggcactcggcgggcgatccaatgatggccgccgatggtctcgacgtaccagatctcgtccgcatccgaaataatcacgccgttcgattcgtaggtgccgtaggtttcgagcagttcgcccaaccgcgcgacgccctcgcgcgcggtggtgacgtacggcagcacaagggtgatgatgtcttcctcaccgataccgccgggctgctcggcctgataatcggtgctgtccggcccgccgacagccggccgcaactcgaccatcgggtctgcaccgagcacgcgctcgttgacagcgatggtttcggtggcgctcatcgccacgttgtgttcgttggcaccggcttcggccagaatgccacgattattcagcacgttcggtgcgatggtgtaccggcaaggattgtccggtagttcgatttcgacatggctcagcacgctgcggtagtggcgcggctggtcgtcgggggcgacggcgacgaagcgcttgggatcgtaacggcccgagcccgaatcgtcatcgcgggcgatgatggtggaaccgtcgtaactggcatttttgccgacaagaatcgtggtgcatgacatggggcaccactctaggagccaggctggtcgaaacaaaaaatccttggaaccattgcgattccaaggatttgttgtgccccctgtgggattcgaacccacaacccacgacttaaaaggacgctgctctaaccgttgagctaaaggggcaactcttctaaaatacacaccgttttgggatatttcaactacggcgttgcgtacacgtttgcgtacgcgattggcccaacgcacggcacagcacacgcaatgtggcccaaatcgcagcccaaatcgcatatcgcctctagcgatagatagccgccggcggctacccttgtacattatgagtgaatcccccaattggagcaatcccctgcgcgattcgcgcgacctcagactgccccgtatcgccggcccgtgcagcctcgtcattttcggtgtcacgggcgatctggcacaaaagaaactgctgccggccgtctacgacctggcgaaccgtggcctactgccgccgagcttcggcctgaccggcttcgcccgccgagactggacacaggagcggttcatcgaattcgtcaaggccgccgtccgggcgcattgccgtacgccgttcaaggagtcgacttggcgcaatctggccgccggcatccgcttcgtgcagggtacgttcgacgatccggaggccttcgagcgtctgagcgccaccgtgcaggagcttgaccgcgaccgcggcacgcagggtaaccatgccttctacatgtcggtgccgccgcgcgccttcccgcaggttgccaagcagttggccgcctccggcctgtcgcgctcgtccgagggcgcatggcgccgcgtgatcatcgagaagccgttcggccatgatctggccagcgccaaggaactcgacagcgtggtatccgaagtgttcgacccgagctccgtgttccgcatcgaccactacctcggcaaggaaaccgtgcagaacctgctggccctgcgtttcgccaacgccatgtacgagccgatctggaacgccaactatgtggaccacgtgcagatcacgatggccgaggacatcggcatcggcggccgcgccggctattacgacggcatcggcgccgcacgcgacgtcatccagaaccacctgcttcagctcatggctctgaccgccatggaggagccggtgagcttcaccgccaaggacctgaccgccgaaaagaccaaggtgctttccgccgtgcgcctgcccaaggacctcgccgccaacaccgcgcgcggtcagtacgccaagggctggcagggctcgcacgaagtggtcggctacttggaagaaaaaggcatcgaccccaagagcaccactgaaacgtacgccgccatccgcctcgatatcgacacccgccgctgggctggcgtgccgttctacctgcgttgcggcaagcgcctcggcaagcgtgtaaccgaaatcgccgtggcgttcaagcgcgccccgcatctgccgttcgagcagaccgccgtgcgcgaactcggcaagaacgccatcgtgattcgcgtgcagcccgacgagggcgttaccatgcgcttcggagccaaggtgccgggcggctccaccatggaggtccgtgacgtgaacatggacttcagctacggccgctccttcaccgagaactcgccggaagcctatgagcgactgattctggacgtgctgctcggtgatccgccgttgttcccgaccaccgaagaggtgaacctcagctgggagatcctcgatccgattgaacaattctggtccacgcttggccagccgcaggcctaccgcgccggtacgtggggtccggcacaggccgacgaaatgctggcgcgcgacggccgccactggaggatgccatgatcatcgatatgccgaacacccgcacccgcgagattgcgcacaaaatcgaacagctgcacgaggagcgcggcgaatcggcgaccggccgcgtgctgacgctactcatcgccaccgaggacgcggacctagagcatgcgctggaaatcgcgaactcggccagccgtgagcacccgtgccgcgtgattgccgtagtaccggataccaatcctgccgatcagtccggcgaaggcgaaccgaacgagaccgaagtggccgccgaggtgagcgcgaatcgcgataatccggccgtcgatttgaccgacggcccgaacgatccgaacgattccaacctgaacgcccaagtgcgattcggcgcggacgccggtgccggtgagattatcatcttgcgtccgcgcggtggccttatcaaccacccggatacgctggttatcccgctgcttgtgccggatgcgcctgtagtggcgtggtggccgaccacaccgccgtcgaacccggccaaggatctgatgggtgcgatggcccgcagtcgcatcaccgacgcgctgcactccaataatccggaggccacgatcgagcgtttgcgccgcaattggacaccggaagacatcgacttgtcctggacacgactgaccgtctggcgcgcaatgctcgcctcgatgctcgatcagccgccgcacctgcccatcaccgccgtgaaggtgaccggcaaggccgacttcctgcctctggaaatgctgtgcgcatggctgcgtctgaaactcggcgtaccagtcgaaactgagttcgtgcccgacgcgcaggccgtgaccggcgtgtacctgacccgtgaggacggtgtgatctcactggaacgcccgtatgaggaccaagcgctgatctcgctgcccggccagactccgcaggaagtgtccgtgccgatgcgcaccatcgaggactgtctgaccgaggaactgcgccgcatcgatcccgatgagatctacgccgaggtcatcaacgaaggctgggatctgattcgtcactgaagtcggtagaaccgttgccacagcggcgttggcatgagttcggcaattgtggtcgagccatgccaacgccgttgctcatcgtttcctacctcatgcgatgccgaagctcatgaccgcggagtaataaagtgacatatgcgatgtcgcacaatgtacattgtgttgtcaactgacaacacatttcattgctgcaaatggctggattcccggcatgccacccgtattatgcgttgtcaactgacaacacaatccacattgcaaagtacgacacataccccatataaggaccatacatggcaactcgaaaactcattgtgtatccgaataaagatctgatgattcaggctggcgcgcaacgttttgtcttggcgctactcgatttgctcgccgaacgattgcctgatggcacgcatcgcacacgtgtggatgtggcgctgtctggcggttcggccgcacagccgttgggtttggcgctgaacgatccactggctgatgcggttgattggtcgcgcgtgcatttctggtggagcgacgaacgttttgtgccggcttacgacaccgatcgcaatgctctggaggcccgtcgcctgctgcttgaccagctggtggcggatggcaagctgcctgaatcgaatattcatgagatggcggccgatacccgttcagccgatgacatcgccgatgtgatggatcaggccgatagtgatgacgcttccgttcgcgccgccgccgatgccgcgaatgatgcgctgctggacgatgccgcgagcgactatgagcgcgagttggtgaatgaattggggccggaaccggtcatcgatctgatgattctcggcatgggaccggacggtcactatgcgtcgctgttcccgggtcatgatgaggtcaaggttaccgataggctcaccgtgggtgtgaaccactcccccaagatgccgccgttgcgcgtctcgttgaccgcgccgctgattgcccgctcgcgccgtacatggttcttcgccgccggtgccggcaaagccgaatcgctggcccatgtcttcgagcggcccaacaacccggattacccgtcctcctacgccaacggagtggacgagttcacctggttctccaccgaagaaaccgtcaccgagttgtgatggcgtctcctgtgggccgaaccctgaatgaggggcccggcccacagattgtcgcagacgctcaagcctgctgttcctcgggctggccttcctgcgcccagagggtgtggaacacgccgggcttgtcgacgcggccgtaggtgtgggcaccgaagaagtcacgctgggactgggtcagggcggtgggcagacgcttggagcgcagaccatcgtagtacgccagggagctggagaacaccggggtcgggataccggcctccacggcacgcacgattacacgacgccatgcatcctgcgattcgccgatgatcttctcgaagtacggatcgaacaacagggaagccggcaaattatcgcccttgaaggcctcggtgatgcggtcgagcaggaactgggcgcgaataatgcagccgccacgccaaatgcgggccacttcggacaggttgatatcccagccgtattccttagcaccgtcctgaatctcgttcaggccctgagcataggccacgaccttggaagcgaacagggccttgcgcacgtcctcgacgaacgcggccttgtcttctccggccagatcgatggtcttgttcgggccagccagaccttctttctgagcgtcttcacgcagctcaccgtgcgaagacagtgcacgagtgaacacggcttcaccgatagcagccacaggagaaccaaattccagaccagcctgcacggtccaagtaccagtacccttcatgccggcatgatccacgaccacgtccacgaacggcttgccggtctcggcatccttgtggtgcagaatctcagcggtgatctcgatcaggtaggagtcgaggtcgcccttgttccattcagcgaacacgtcgccaatctcctcggtatccatgccgagtccacggcgcagaatgtcatacgcctcaccaatcacctgcatatcggcatactcgatgccgttgtgcaccatcttgacaaagtgaccggcaccatcggtgccgatgtgggtcacgcacggttcaccgttcaccttggcggcgatggactgaagaatcgggcccaaggtcttccaggattccgcagtgccaccaggcatcagagacgggccgttgagcgcgccttcctcaccaccggacacgccgcaacccacgaagtggaagcccttggcacgtacttccttctcacgcttgatggtgtccttgaagaaggagttgccaccgtcgacgatgatgtcgcccggttcgaacacctcttccagctgcgcgatagttgcgtcggtcggagcaccggccttgaccatgatgatggcggtacgcggacgcttcagggacgcggcgaattcctcgagcgtttcggccggcacgaagttaccttcggcgccatgctcgttcatgagcttctcggtacgcgagtagtgacggttgaacaacgccaccgtgttgccatggtgcgccagattacgcgccagattggagcccatcgtggccagtccaatcacaccaatgtttgctgtagcttcggccatgcgccttgcctttcgtttgattgtcccatcgtcatcacgcgcgtcacaaaacagcacatcagcggagggaatcattccttcaacgcttgaaagtgtatcccacttaccacccacacgcgaaggctgtcttaggttctacgcaccttctgcccgcgaagcgtaattacttgccagccattcacatacgcccggccttggaagggtcgatatgcatggtctggaagcgattggccatgtaagcgtcgctgtagcgttcgctgaaccacatcgcgaccggtgaatcctgcggctggccggccatgcgcccataccagcaatccaaggccatcagcgtgaaggcaatgtcgatcaccatcagcaccgtgcataccgcagtcagcgaataccgtactttccatggaatgcgattaatcagagccagcagtcgcggcaacagccacttgacccacaccacaccaatcagtccccagaagaacatgaattggcccgaagtacgtccgtcgatggacagccaacggccggtgtaatcccacgcggtaataccgaacgccacttccatgaaccagctggtgcagtattcgaacgcgccgccgatcaccgccgaagcgcagaagatcaagaacggattcgccttccacaggcgattcaggcacacggttaccaataccgcaccacagccgtaaatcggcgagaacgggccccacagcaaacccgcgcggtcctgaagttcaccgttatacagcgccatatggtagatcgtctccataatcaggccacccaccgaagcgatggtaaacagccagaagatattgaagaagtccagtgcaatatagcccttgccggattggtcgcggcccagcatgccggccgccaccgccgattcataatcatcgcgatcgtccatgcgtttgagcgcgcgctgcaaacggcgttcctcgctcagggagggatcggcggtcaccgaaatcacgacgagaataatcatctgaatcagcggcagcagcaggttgaagccaaggccggtcagggccagcgacagcatgccgtcggccaacgtcaacggcatcagcacgtaggtccagcgcgcggcataccggcgatgattgcgcagcagcatcacgccgaacacaatcaggcatgcggcactgactaccagcaccaccgcatgaatcgcggacaggatgaaagtcaggctcatcgcatcgacgtgcacatgaccatccagaatctcgcgcacggcatagaggatggaaatcaccataatcggcaatgtggcgagtccgtccagcagcacgaccgcgccatagatgcgcgccagaatcggtaatcgcttggcgttcgggttcaagccgacgtcgtccagttcgacggccaccagatcagccacgactgcggactcggcgtcacggttctcccgcggcttgccaggggtagtggccgtgccatcgtccttgaattcaaccatggtttcctccccacatagcgtctccttacactatcacccgattgcagttttgccgaacttgatggacagccggtacatgtctgtctacattgccggacaccgagcccgctatcgctttcaggaaacatccaaaaaccatccagaaatcttgtcaataagttccagaacgcctttcgctccagccaaggcactgatggccagtccggcaccggcagcagctccggcacaggttctgatacttccggtaactccaactccgaccagtcatccagccagaacgagcagtcggccattgatggtcaatccggcaccatcgaaagctgatacaacggtttacccatggggcggtagctctctcatgaggcggtaattaccccatggggcggttagcccaaaaccgcattccgcggaataaagccattttaagccaccgccccatgggaattttaccgccccatgggccacttaccacccaatgaaggttttaccgccccatggagggcagcctcacaccaacacacacagcacacccggccacacagcaccccagccacaaaaaattaggcacactgcccagcgacacacgataagccgctgggcagcggcgttattccgccaaaaccatcatcaatcaccccaataatctccggcagccgtattacgctactacaaccgtagcgctacgattaacgtatcgctacggaaaacgtagcaatcaagcaacaccaagctccggaggtatcagtgggcaatatcttcaaggtcctcaaacgcgacttcctgcgcctgttcaaggtgccggccgcatgggtgatcctgttcggcatggtgtttatcccgccactgtattcgtggtacaacatcgtcggcttctgggacccgtacggcaataccaaaggcatcaccgtcgccatcgccaacaatgacgacggcaccgacaacgcgctcatcggcaagcaaaacctcggcgatcaaatcgtcaagcagctgaaaagcaacgaccagctcggctggaccttcgtcaccgaagccgaggccatggaccaggtggaatccggcaaggcatacgcagccatcatcatccccaaagacttttccgacgatctcgccggcgtggtgaccggcggcaagagtcggcccactctggagtattacgtcaacgaaaaagccagcgccatcgcccccaaagtcaccgacgtaggcgcgtccactgtggaccgcacggtcaattccacattcgtctccaccgtatccgaagtacttaccgaagtcatcaatacggttggcggcaaagccatcagcaccgaagacaccaccaaagccaaggccctcacggcccttgccgaggcctccggcgacgtgcagcacacacgcagcaccatcgccaagctcaccaccaaactcaccgataccccggagcagacacgcaccgcacgtcaggcgctggacgacgcgcgcgcacttggcatcgacaccgcggaaggcctggccggtgtctccaccctgatcggcactacccaagccagtctgaacggcttcgtcacctccacgtccgaagcgcttgaccaaggctcaagcctgctgagccaagccgcagcacaggccaaccaaagcgtgggcacggtagccggaaccatcagcgccgccaatcagcaggtaggcggactgatcaatacggcggaagacatcaaccaagcgaacgccgacatcatcgaccaactcaaagggctgccgaacgccgatcgagaaccgctgcaatccgccattgccacactggaaagccacaatagcgagcttgccggcgcactgggcaacctcgatagcctgaacaccactatcggcaacgcctccacagacaccgccggattggcgcagcatctcaataccgccacccaaaccacggtgcgcgaggccaataccgctcgcggcaccatcatctccggcgccattcctcagctcaacaccggcctcaacaccctcagctcgaccgccaacactctgtcgaccggcatcacgtcgcaaggctcactcatcgatcagtcgaagagcaccctcgatcaactcgacaaagccgcctccaccacggtgaccgccctgcacgacaccgataaggcgctggccggcgtgcaaaccaagctcgatacgctgaccaccgacatcaaagccctgagcatctccagttcactcagttccctgatcggcaccgacggcaaactggatgccgccacaatcgccgacttcatgctctcccccactgttatcagcgaacgggccgtctacccggtcgcctcctatggttccggcatggcaccgctgttcaccaccctgtctttgtgggtgggcgcgttcgtactcgtggtcattcccaaactcgaaaccgacgacgagggcatcgacgatctcacgccaacccaaggctatctcggccgtttcctgctgctggccacgctggccgccgtccaaggcctggccacggccatcggcgatcttgtcatcggcattcaatgcgcgagcgccccggtgtttctgctcacctgcgtcatcacctcactggtgtatatgtcggtgattttcgccctctccaccacgttcatgcacgtgggcaaaggcgtgtgcgtggcgctggtcattctgcaggtgccgggtgcctccggcctgtacccgattgaaatgatgcccgcgttcttccgcgccatctatccgctgttgccgttcacctattcgattgacgcaatgcgtgaaactatcggcggcttctacgacggcctctggttcgcctatatcggcaaattgctggttttcgcggttctggcctttgcgcttggcctcggcgcccggccgaaactggccaatctcaaccgcctgttcgcgcgggaaatcaaggaaagcgacatgattatcggcgagccggtgcacctgcctggcagcgaataccgtgtcactcaggccattgcggcactggccgaccgcgacgaataccgtcatgccatcgaacgtcgggccgccaaattcgcctaccgttatccccggctgctgctgggtgcgcttatcgccggattcgtggtgccggccgcgctcattatcgtgtttgtgctgaccaccagcgagaaaatcgtggtcatgggcacatggctggcatgggtgctcatcatcatgggcttcctgatggtcgtggaattcatgcgcgattccatccgccgccaaaccgagctcggcaacctctccgacgagtcgatccgcgccatgctgtacgggcataaggccaagcgtcgcgacacctccgccgaacgccacgaagaagcggacccgagcgccgccgttaccgcaatcatccccactattccgccgaccaaggaaggcaggcacgcacgatgaacaccatgtggaaactatttaccggcgacatcaaacgcctgaccagcaacgtggtctccatcatcatcgtgatcggcttggtgatgattcccggcctgttcacctggttcaacgtggccgcatgctgggacccgttctcgaatatgaagaacctgaaattcgcggtggcgaatgtggatgaggggtatcgttccgacctgatcccggtgaaagtcacggtcggtgatcaggtggtgaacgcgctgcgcgccaacagtcagctcgattggacgatcacgtccaaagccgatgccgtcgagggcgcacgatccggcaaatactacgcggccatcgtaattccgaagtcgttcagcaaagacatgatgaccttcttctccgacgatgtgcagcatgccgaactgacctattaccgcaacgagaagaagaacgcgctggcaccgaatctgctcaacgagggcacagacgaggtggcggcggaaatcaacaccacgttcgccaagaccatcacttcggcagggctggaaatcgcgtcttcgctggccgatcagctgtccaagcccgaagccaaagagcaactgaataccttcaacgccaatatcgccgatttcgccacacggcttgacgatacggcggatttgcttggcacatacagcgcattgaccgatacggccggcgccttgcttgacacctcgaactcgctgatcacgcaggtttcctctgccgccaaacaaggaggcaaggatctcgccagcgccaagcagggagtcaccgacgtggtcggagccttgggcaccaccgctgacgcgatgagcagctcactggacgcgagcgcctccagtttcggcgcggtgtccgattccatagacaagctgtattccgacgcgaatgatggtgccaccacggccgccgacgaattggaccgtcaagccacgtccattggcaagcagacggagaaatacactgaaattcgcaacacgttggccggcatactgggcaacgactcatccatcatcacggcgattgaccgttcaatcgcacggcagaacaggctgcggcaagcgctgaatacggcggcgaccgatattcgccaaggtaatcaggacgcgcaggatcagcatgcgcaggtcaaggatctggccgatcaagcgcagaacagtatcgccaatatcaagtcggatttcacggccacggtgaaaccgcaaatcgactccctgtcgtccaccgtctctgacgcctccggcatactgagttccggcgccacccagttgggctccacgctcggcgacctgaaaaggacttccgacgacgccagcgatatgctcagcgacgctcgcaccaccttgggcaaggtgtccggcaaactgcgttccgccggtgccgaactggcttcgttcaacagcacactgagcgacgcactaaacagtggcgatatgagcatggtcaaagaggtgctgggcaatgatcccgaaacgctggccagtacgttggccgcgccggtgcagctcaggcgcaaggccgtattcccggtggcgaatttcggttcgtcgatggcgccgttctacacgctgctgccgttgtgggtgggcgcgctgctgatggtggtgacgctgaaaaccaccgtgtctcgccggacgcgcaaagcattgggcgagccgcggccgcatcggctcttccttgggcattacggggtgttcgcgctgattgcgctgctgcaatccacggtgtcgctcggtggcgatctgctgttcctgcgcgtgcaggccgtgcatccgctgctgtttatgttgtccggatggctggcctcgctggtgttctcgttcttcacctatacgatggtggtgagtttcggcaatgtgggtaaggcaatcggcgtgcttatgctcatcgtgcagatttcgggtgcgaacgctgcctacccggtgcagatgttgcccgacttcatcgccaaagtcagtccgttcttgccgctcacccatgcggtgacgatgatgcgtgcggccatcgccggcatctacgacatggattactggcgggccgccggaatgctgctggcgttcgtgccgccgctgctgttgcttgggctgttgctcaggaagccactggtgcggttcaaccagtggtatgtggccaaagtcgagagcactaaagtgctgggctagtaggtattatccgggggttgcctacaaacggcatggacttaccaccctcagtctggctttgccagtcagctcccgccaacgggagcgtacgggagcatatttcgaagagaagagatgacggagatgacaggtacgacggcgacaccgcgcggtgagcgcacgcgcgaggcgacggatcgcaagctcatgcgagccacgctgcagattgcggtggaccgcggcatcagcggcgtgaccatcgaggaggtggcccggcgctccggcgtggccaaaaccacgatttaccgtcgataccataatgccgacgagctgctgcgcgagatcagcgcgatgtatctggccatcccggattccgacccagtgcccagccccacgcgtgagcatttcacgcaactattgcagcgattggtcgattgggtgcgcgacaacgacatcgacgtcaagcgcgtgggcattgtattgtccagcgaggccgagttcttccagcacatcgtcgaccaggtggtgaccccgtggctggagcatgtgggggcgttcctcaagcagggagtcgcgcagggcgtgtttcgcgaggacgttgacgagaagttgctgttgtccacgattatcgggtctttggtggcgtatgaggccatcgagggcaaagcgatggacgacgacaccgcctgggcctcgcgcatggccgatctgctgtggccagcattgctgaagtagcggtcttactcctgaatcgaagcctcctggcgggcgacttcgagggctttgttgaaggcgtcggaggtccagctggcaccggcgaccttgtccactttgagtcccttcaggggcttgccgtccactacgccgttgatggctttggcgaagtcgtcctgatggttcttggaaatcgtggtgaacgggtgcccaatgattttgacggtctcgacgttgccgtccttgatggtcagatggacgtcgatggaatcctcgccgaccgggccgtactggccgttgatcgagtagttgccgtccttgtagttgccggtgtccttcttgtcggacgtggtggtggacgggtcgttgtgcgatgagccggaatcggagccgtcggagctatcggagccgttcgactgggattgcgactgctcttcctgcgacttctcggtctcgcccgagttgccggcgtacgcatcgtccatcggcgtggccttggattcgccgcacccggccagcagcgcgccagccacgaccagtccggccgccgccaatgtcgcggatttcttcaacgtattcttttcggtcatattcacgctccttaagccccctctgacgagggggctgtcagcgaagctgactgggggagagaccatcagcttgccatgtattcctcacatactgctcgatgcccctgacggccctactcctcgccgccggttttcgcggccttggtggggtcagcgaaaccaatggcggtctcgccgttctgcgcgccctcgacctgtgcacccgtggaggcgggcttgccgccggccgcctcgtaggccttgcgcgcatcctcgtcattccacttctcaccgacgagcacgccatggttgagcatgatctcgcgctgcgcgcagctggcgacaagcgcatcgtgggtgaccacgataatcgtggtgccctgctcgtgcagcttgcggaacaggtcgagcacgattctctcgttcttctcgtcgaggttgccggtgggctcatcggccagaatcagcttcgggtcgttgatcagcgcgcgggccacgcacacgcgctgctgctcgccgccggagagctggccgggcaggtggtgggcgcggtccttcaggccgaccttttccagcgcctccatggcctgcttctcatcgaccaccgaatggtagtactgggccaccatcacgttttccacggcggtcaggtgcggcaccagatagaacttctggaacaccagtccgatgaggttcttgcgcacgtcggccagctgcgtggcgttcaggtcctccagcttgcggccttccagcttcacggagcccttggagggcgtgtccatgcagccgatcatgttcatcagcgtggtcttgcctgagccggaggagccgacgatggcgagccattcgccttccggcacggtcaaattgaggtcgtccacggcatgcaggtcgccgtagatcttcgagatgtggtcgagttcaagtagcatgacgtttctctttctttattcttcgcgaagcacgacggcggggtcgatgcgggtggcgcggtggacgggcgggatggaggcgacgatggcgaccagcgcgctgaacagcacggagatcagcgccagccaccagttgaatccgatggagcgttcgaacaccgccacgcacagccaactggcgagtccgtagccgattgcggtgccgatgaggccgccgatcaggccgtagagcgatgattcgatgtagaactcggtgccgatggcacgcgagctggcaccgagggccttgcgcaggccgatctcgttgcgtcgctgcgagacgatcgagctgattgtggtgccgacgccgacgagcgtcagcaccagcaccaccaacgagacgatccagaacagcgtctgcagcatggtgatgatgcgggtgtcggaggcggtgatcttggtgacctgctgcgccttgacgtgcatggaggtcatgtcgttgatgctggacaccagacctgcgaggtcgctggcgccggccgaatactcgatgacgtccacgccgcgcgtgatgccggtgagcttgttgacgtcggcgttggtggcgtagatgatcgagtcctcattgccgccggtgtccacgatgccggccacgcggaattcggtgccggaggtgtccatgatgtcgctggaaacgcggccgtctttggtttgttggtcgatcgaggagttcgacgaagtgccgttggtgctggcgttatcggatgcacggtagccgatggtgatggcggagccgattctcagaccgatggcgtcggcgatgtcacgtccgaccagcaccttgccgtcggtcggccacgagccgtcgaccacccagtgatggttgaggttcttgacctgcgccgcattcacgccggccatcacgtacggcgaggcgttgacgcgcacgttctcgtatcggtaggtggcgtatttcgcagaacccttggccttgaccatttcagtggtgtgctgcaccatcgccttgtcgatgccggccttgccgtcggcattggtcgattcggtgggtgtgacaatcaggttcgcgccgtacgcacgcatctcctcgttcatctgctgcggcacggcgaggcagatcatcgccaggcagaacagtgtggccgcgccgaccagcgacgccaccacggccatcaccgcgcgcgaacgccggcggaacacggcgctgaacagcattctgaagaacataccggtgttggtcatcggtttcctccttccacacctacgtagataaactcagcggccatggagcacctccgcgggcttgagattcagaatcgaacgaatcgaggaggcggacgccagcagcacggtgacagccagcagcacgaacaccagcacgaacaccatcggccgcatcgtgatgccggaaccgaataccacccggcctatcagctgggccacgccggaaccaagcaacgcgcccacaatcgcgcccagcagcgagattgccgccgtttcggccagcatcaggcgggataccgcggcatcggtggcaccgagcgccttgagcagcgccagctcgccagaccgttcgccgatcgaggcgaccatcaggttggccacggccacggctgcggcgatcaggctcagcacggtcatcagaatcatcacggcctgcgtcttctgcagcacattgccctgcaacgcggcgacctgacgcacctgcttggccaccgcgcccggaatcacctcttcgatctggtaggcgatcgagctcgggtaggcggtgcagtaccaggtctcccattcctcctggctcagcgcggccgggttcgcggcggccttacgggccaggtcgttctccggcgtggtcagggccttgacctcgattttgtcgaccgaatcgggcaggtcggcgagcacctgggccgtggaggaggcgatgtagagcgagccgttgtcctcgtcgccggaatcgtagacgccggtgagcttgattttctgctcgttcttcttgcccgaggcggtggtcttgttgagggtgatggtgtcgccggtggtcacaccgagttcggaggccagcgtcttgccgatcacgccctgatcggaatcgtccttgggccacttgccgtccagctgccaccacgagcgcatgccttccacgcccacgacggtggtctcgccggtggagatcttgaggtccttgttgaaccacgtgccgacgaccggcacgttggcaccgttcaccgtggcgtggatgttgagctgcggcgcgaagttggtgatgttgaacgaccagaagatcgtcttgatcttggccgcgtccgactccttcagaaaagcggtcgggtcgctggtggacgccgcgccgcccgactcggtgttgtacaggtcggaaacgaccgcgtccgccttgggctgcacggtgatgttcgaaccgtaggtggacagctcggcgttgagcttgtcgcccacgtcgaacacgacgcccagcatcgatacggacacggtcgccgacaggcatacggtcagcgcgataagcaggcgccggcgcagctgtcgggtgaacgagcgagtaatcatacgcagaaagaacatgattcttgtctcctgcctgactcactggaagtgggcgctcagcgcgtccagatccgtagtctgaatggtgatcttgccgtggccggtcttgtacgggaatggtatcgggttgcagccacccttgaagccgatggtcgccaggttgatggccacctcgcacttcttgcagatgatcttgccgtccttctcgtagtagccggcgtcgccgcagttctcgcaggcgtccaggccgatgccgtacgcgccaccgttctttcggatgatgatgaagcgcatgacggtgccgtccttggccttgtattcgaagcggtgcaggtggccgtcctcgacctggctgaaggggatggtggccacgccgtccttgagcgagtaggcttccggcggcgaaagagtgatggtctgatgggtcgcggcgacgccgacggtgagggtcagcgtgacgccgatcatggccacgaggctccagacggcggaggccacggcgcggcggcggaacgccttgtgcttgcggccgatggcttcgttcgcgccggtcagcggcatgcggaagccggccaccacggaggcgacggccggaatcaggaacacgaacgcctgggccatgatcatccagtcgttgtggttgatcgaccaggcgagggccacgaatcccgtgtggcctatcgggaaaccgcgtgcctgcaggatctgcatgacaccggtcaggtgctggacgaacagaatcaccagcaccgcgagaacggcggcggtgaacgaggcacgcaccgcggtcgaacgcatcgtgcggaagatcgcggccacgatgatcgacatggccaggcccagcgcgaagccgagcgcgcgcagcagcatgtcggacgtgaagatcgggtcgccgggctccacccagatggtcagctgcaggatcacgtccggcagcgcgtagaacagggtgagcgcgatgtcgatggcggccacggcgttcgcaatgtgcatgaacaccttgtgctgctgccaattggtggtgatgcggcgtgcgaacaccaccacgacgatggtgaggatgtcggcaatgatcgcgcaccacagcaccggatagttgacgaacgtgcgctggttgatcacggccgaggcgcgcaggccggcgaatgtgatagcggcgatcaggccgacggtcaggccgatgagacgccaatgcgagcttatcggcttatctcgcccctcgccgaccgtgagcatcacgctcaggctcatcaccagcaatgcgggggccaaggtgcccggcatcactgccacgaattgttcaagcattcgcgtcctttctctgttcatcttaggctcccctccctgaggggagctgtccgcaaagcggactgaggggagtttttagaccgtcctaagaattatctccctaaagcggcgtaaagccccctctgacgagggggctgtctgcttagtcaatcaccactgacgcggggtgtagtcccagttgtcgaaggtgacctcgatgggctcggtccagaacttgtggttcttgacaccggtctccgggtcaacgtggagcatccagccgttcttctcaggggactcgatggagagcttgagttggtaggtgccggccttgtcgagcttgacgttggcgccgtagtgcgggccgtcggaggcgttcatctgcatgaaggtaccggaggtggcctggccgccctcgacttccttgccggtggacttgtcgatgatggtgtagttcacagtaaggtcagggacgaagtcgcccttgccgtagccgtagtcggtgccttcctgggaggcgtggatgtcggcttccaggtggaaggaagcgtcagcagccttcagacccatggaagcagggtacatgtcgatgggctggaagtagacggcgcccacggtcagcgggccagcggccttgtcctgctccttggcggtgccggaggggccgaccgggacctcttcgaagccggaggtctcagtcggggcgtcggccttcttggagtcgtctttcttggcggtgtcggaggagctggtcgagga

SEQ ID NO: 1200 - DNA, 4933 bp, Unknown
  R81_24m  MAG No. k141_18935
cctgattcggcatacgccgacctacgcggtggcaacctggacttcacgaacacgattcctgacaccgcacttacctccttccaatccgacaagtcgctgaaggcatacaacgagcccggtggcaatacgctcaccttcaccattcctgaatggctggaacacttcggccagaacgaggaaggcaacctgcgtcgtcaggccatttccatgtccatcgaccgcaagaccgtcgccgagaagatcttccacggcaccgccacgcccgccgtcgacttccttgcagccccaatcagcgcctactccaaggaactcaagggaaatgaagtactgaagtacaacccgtccaaggccaaggaactgtgggccaaggccaacgccatctccccgtggagcggtgagttcggcattgcatacaatgctgatggcactgcgaagaactgggttgaggcaatctgcaactacatcaagaacacgctggatatcgatgccaagagcatcccgatgtccacttccgacgaattcctgtccaatgtggattcaggcaagatgacctccgcataccgcagcggttggggccctgattatccatccgcggacaactatctggtacagctgtacgattccagttcggccgacggcaagggcggcaacagcggcaactacaagaaccccgagttcgatgccatgatggacaaggctctttccgccccgtccaccgaggaagccgacaagtattatcagcaaggtgaggagattctgctgcaggaccttccggctatcccgttatggaaccagaatgccaccgcagccagcacctccgcagtctccggcgtcgcattcgactacggcggcggcccagtgttcaccgcactgaccaagaagcagtaagcagtaagtaataaacagacagcgctagccccccgctggcgggggctgtcggcaaagccgactgggggtggtctcaaacagcagaccacccctaatcttgttatatgagcgagctcccgtaagcgggagcaatcgagaacatacaggagcacattaactatggaattcaccgtatccggcactaccgtgcgattcgatgaacgaacaatgcagttcgcttttacgcgcgacggtgccgaatggaatacctgcgctgatttcaagccgaccctgcaatgcgcgcaaggcaccttcgcgttcgcggatgccacttccatcacccatgagcagcgtgaaaccggcacgggaaccggcattcgcagcatcttcaccggctttgggcacagcgcatactcctttgaaacctatgtatgggtggagcgtgcctcaggcgatgtgctcttcgaatggattccgctcaatgagcaaggcctgaacatcaccaatgtgacgtggcccgcagccatggacttcgattgcgccgacgaccatgacacgacactcatcacccatgagcaaggtgtgatgatccccaacacatggcctaccgccgtgagcaccaaagatatcgccttcgacggccgcttcgaaacggctggcggttacatgccgtggttcgcgcagctccgcgcagacggacacgggtatatcgccatctgcgaaactccatggaatgccggttacggcatcgaccatcccagcgatggcccgtacacccatatcaatacttggtttgagccaagcctcggcacaatgaattatcgccgcgtggtacgctaccagttcctcgaccacgccgatcacacggcggtgtgcaaggcctatcgttcgtacgtcaatgaacgaggtcgcttgcgtacgctcgtcgaaaaggcggcgcgcaatccctccgtgcgtgacctgattggtcgttcatgggtgcacatcggcatcaaaaccaaagtacagcccgactcgtactactacgataaggaccaccccgagaaaaacgagtcactggtcaccttcgcacagcgcgaaaagcaaatgcgaacattgcacagcatgggtgcaggccgactgtacatgcacttggatggttgggcacagcccggatacgacaacgcacaccccgactatctgccggcttgtcaggaggcaggcggctgggaaggcatgaagtcgctggtcgacgcctgccatgagcaaggcgatattttcggcacgcatgaccagtatcgcgattactacttcaccgcgcaaacctttgatgccaacaatgcgattcggctggcagacggtacgatgcccgaacacgcacgctgggcgggcggccgccagacctacctgtgcgccgagctcgcaccggactacgtgcgccgcaatttcgccgaaatcgccgcacacggcatcaaactcgactgtgcatacttggatgtcttcacctgcaacgaaggcgacgaatgctcgaaccccgaacaccgcatgacccgccgcgaatgctttgaccgccgcgccgaatgcttcgaatatctgctctcgcacggcatcctctcctcgtccgaagaggtatcggactgggcagtgccaagcctgatattctgccattacgcgccatacgacttccagatgcgctcacctaacgagccgcgccaaggtgtgccggtgccgctgtataacctcgtctaccatgattgcgttatcgagccgtggatgatggagcgtgtggtggacggcgacgattacatgctgtacgccttgctcaacggcggagctccatacctgattcgcgatgccgcatacatcggcgttgacggcgacatggacgacgaacagcgcgctcgcacggaaaacgacatcgaacgctgccatacggtcgctgcattccatgagcgggtcggcatgcaggaactggttcgtcacgagttcgtggatgatgatccgctggtgcagcgttcggtattcgcggacggcactgcggtcacttgcgacttccatacgcaaacctatcgcatcaccgactgcccgcatcgctgactgaaaatacaatgacacacagtgggttccgatggactggtggcaaattgccgccgataagcgagtaatatagccaacagtgtcaccgtcgaaacaggagtagtggaatgccgaatcgtgcagaacgccgtgcccaagccaaagcaggccgcaggggagtgccgtcgcagtatgaccagacccgtggccgcggtcgctcgggaatgattgacgaataccagctgcagcagaagtcccagcgtctgcaggacggcaccgacggcaccgaatggaagcccagcggcggtacgattgcggacaccgaaaccctgctgaccactaacccgaactacacgaatccgaagatgttcaaggcaccgcattcgctgcgtcagtggttccgtgtgggcagctggacgctgatcgccatcgcgattatcgcgttcttcgtggttatgtggctgccaagccatccgatgtggctgatcatcaccgtttccgcggtgttcattgtgggtgtgctgagcctgttcttcacggctggcgattccaagcataatccgaatttggatcagaacggcacggcagtctgatcttttgcccggtaaatccggcttgaaaagcaaaacgcacgacggaagttgtgcgttttcttgtatgcggtgccctaaagtaagaagtgcttgagtttctttctgacgcacgaaggagaggcagtccgatgaaagttgatattctaacccgcgaatacccgccgcatgtctatggtggggccggtgtacacgccgaggaactgtccaaggtgcttgccgagcgcatcgacgtaaccgttcgtgcgtttgatggcaagcgcaccgaggcggacattcctgctatcccgaatgctgccgatgctaagggcagcttgaaggtcgtcggctatgacacgccttttgagctggctgatgccaaccccgcattgaagaccttcggcgttgatttgcagatcgccaatgatgtggacgccgacatcatccacgcgcacacctggtatgcctgcttggcgggctacatggccaagatgctgcacggcactccattggttattaccgcgcactctctggagccgttccgcccgtggaagcgtgagcagctcggcggcggctacaatctgagctcctgggctgagaaggatgcttacgagcacgccgatcgtgtgatcgccgtttccggtggcatgcgcaaggatattctggctgcttacccgaacctcgatccgaacaaggtggttgtggtgtacaacggcatcaccatggccgacttcgctaccccggcaccagacgatccgggttggaaggtgttcgagcgttaccacatcgaccgttcgaagcccaccctgctgttcgtgggccgtatcacccgccagaagggcctgccatacctgctcaaggcactgcacctgatttccaaggacattcaggtggtgctgtgcgccggtgctcctgacaccccggaaatcgccgaagaggtcaagactgcgttcgccaagctggatgaggaacgcggcaacatcgtctggattgaagaaatgctgccgaagcctgagctgaatgctttggaacacggctgtgatgccttcatctgcccgagcatctacgagccgctgggcatcgtgaaccttgaggccatggcctgcggtctgccggtcgtcgcatccgccactggcggcattccggaagtcgtggtcgacggcgaaaccggctatctggtcccgatcgaccagctgcacgacggcaccggcacccccaccgatccggacaagttcgtgcacgacatggccgccgccatcgacaggatcatggctgaccccgaactcgccaagaagatgggtcaggccggctacgaacgcgcccgcgacgtgttcagctgggagaccatcgccgacaagaccgtggaagtctaccagtccgtgctcgacgagcagaagaagtaagtagcgctgcaacgagtgctcccctcagtccggctgcgc

SEQ ID NO: 1201 - DNA, 21707 bp, Unknown
  R81_24m  MAG No. k141_18959
gcgttcgcgaacgctagtgttcggtactttatgtcttctgtgttaccgccggcagacaccggtcgatacacgaaagccgaagtgcgctcatgctatcaaagcaaacgcacttcggcttgttacgtctcgaattcgcgggaaaaccgcaaacatatagacggttgatgagatgccgatcgcccatcacaggccaatcaggcacccgccatacgccaaacgccaatcagaggttggtgcgatcggtgaagatgatcgggccgttctcggtgatggcgatggtgtgctcggagtgggcaccgcgcgagccgtcggaggcacgcagggtccagccgtccttcggatcctggaagatctcgtcggtggtcttgaggaaccatggttcgatggcgatgaccaggccttcgcgcagcttgtagccgtggtgggcgcggccgtcgttcggtacgtgcgggtcgccgtgcatgatgtggcccacgccgtgaccgccgaactcgaggttgatcgggtagccgtattcgcgcgcgatgtcgccaatggtgttggagatgtcgccgagacggttgccgggcttggccacgtcgatggcggcggcgagcgcttcctcagtgcacttgatgatgcgcaggtcttcggggtccgggtctttgccgaccacgaagctgacggcggaatcggccacccagccatccacggagatggcgagatcgagggagacgaggtcgccgtccttcaggctgtaatcgtacggcacaccgtgcagcacggcgtcgttgacggaggtgcagatgtagtgggcgaacgggccggtgccgaagtcaggagcatagtcaacatagcaggattcggcgcccttgcggtccacgatcttcttgtggacgaactcgtcgatttcgagcagattggtgcccaccttggtggtctcctgcagttccttcagaatgccgccgacgaaacggccggccggcttcatttcctcgatttcacgaggggtcttcaattcgatcatgaggttctttctaccttgttgagacttgttctcaactctagcccagcccggggtcaaccgccagagcatcacccgtggtctgcctagggtccgctagtagcctatcaacggccaaggccgagaaaaagcgcccggcagatacataacctgcacgggcgctttggattgattgtccggagattgattgtctggagcgcgagattacttgcgacgcttgccgaaagtgaacgcgcgaatcactgaagtaatccccatcaccaccatggcacatccgccgaagataatcatgaatacggcggagctcagcgggctcatcagcaccacgaagccggcgataatcgagatgatggcataggcgatggcccagccggagcgcgggatgcgccatgattcgactagagccatcacgccttccataatccaaccgaaaccgaccatcagggtgatgagtaatgccaaggtctgaccggtcataccgtagtttcgtacgactacgacgcctccgaaggtcagcagaatgccgacgaacacgtccagcacacgccagccgcccggcagacccggctccacgagagcgctgacgatgcgcaccacgccggaaatcacgaaatacacgccgagcaacaatgcggccaaagccagcgtcttgttcggcaccaacaacagcgcagcgcccaaggcgatggcagccacgcccaccacgccgtaaatgatgcgaatcttggtcttggccttttccggcagccattcctcgatcaggtggaatggactgaaattgccgacataccagttggtctgctgccagccgggttgactttgatcgccccatgaaccattcggctgcccgtccgcttggctattcgattggccgtccgcctgataccgccgaccgtccggaccccatgctggctggccgttcgggccatagttcggattgtaggcgtacgggccgtagtacgggttctggttcggtccgccttgtggctggccgttctgcgcctgctgattctgagtgtcttgcgctcccggcgcaccttgcggaggatattggccgccatgattgctgtcatacgcgccatactgcggttggcccggttggcccgccggattcggctggctcggctggctctggttgggctggcccgtctggccattccactgaccctcgtttggattgctcatcgtaactccttaactcaaggtccatattcaggttccacataccatgttaggcaagttacctaatttgaaccatcactacagttaggcaatccgtctagttcactgacagcgcaatacccataacgcaatatctgcatcaccaacgcttctcccccgccgcgattaggcttagggccatgaccaacgaaaccgaaacgctgacgtcgggcatcgacccggcatcgttctcctccgtcatcaagccgaccaatgacctgttccgctacgtgaatggtccatggatcgacacctaccgcctacccgacgatcgttcgcgctacggctccttcgacaagctcgccgaagacgccgaaaaccaagtgcgcgacatcctcgacgccgacgactgcccggccaccaaatcgcaggctctgtatcattcgttcctgaacaccgacgccatcgaggccgccggccttgacccgatccgcgatgagcttgacctcatcgattccgccatcgacaaggccgctctcacgcgcgtgctcggcaccatcaacccagccggcggccccgacctgttcggcttggccgtttacggcgaccccggcgacccggaccgcaatatcgcccaccttgagcaggccggcctttgcctgccggacgaagcctactatcgtgaggaccactacgtccccgtgcgcgaagcatacgtggcaatggtcgccacccagctggtgaacgccgggtacgcgcccgccgccgaatccaacggtggcgatgaactgccggccaacaccggcgatgacgagagcaatgctcccaccacggttcccagcgaagccgcacttgatatggcccgacacttccttgccgtggaaaccaagatcgccgccaatcattgggacaatgtggccacgcgcgattcggtgaagacctacaaccccaccgattacgccgatttggccgccacgctgaagaacttcgatctcgcttcctggatcgacgcttggcagaccgcctatgacgccaccgaggccgccaaggctcagccgatcgatttcaagtctgtgttcgcgcgcgtcattgtgcacgagccgagcttcctcactggtcttgatgcgttctgggccgaggccgatctggccgaccttaagctgtgggcccgtgttcacatgattctgggcttcgcctcctccctgtctcgcgacttcgacaccaccaactttgacttctacggcaaggtgctctccggtgccaagaagcagcgcgatcgttggaagcgcgcggtgagcctggtcaacggcgtctgcggtgaagatgtgggccgcgagtatgtgcgcctgcacttccccgaaagctcgaaacgccgcatggaagagctggtcgccaatctgattgacgcctaccgcgtgtccatcgccaattccgattggctgggcgaagacaccaaggccaaggctctggagaagatctccaagttcacgccaaagatcggctacaccaaccactggcgcgattactcggcactgagtgtctccgcggatgcgctgcccgccgagaacgccaaggccgcgaacctgtacgagaccggctatcagctggccaaggtcggcaagtcggtcgacaaggacgaatggctgatgaatccgcagacggtgaacgcctactacgagccgagcatgaacgtcatcgtgttcccggccgcgattctgcagcccccgttcttcgacccgaaggccgaggatgcggcgaattatggcggtatcggcgcagtgatcggacacgagatcggccatggcttcgacgatcagggttcgcagtatgacggcgacggcaagctcaacaactggtggaccgacgaggatcgcaagaacttcgaggcccgcaccggcgcattgatcgcccagtacaacagctttgtgccgctgcagctggcagagaagtacgctgacgagtctgataaggcgccgcacgtgaacggcgcgctgaccatcggcgagaacatcggcgatttgggcggcgtgaacatcgcgctcaaggcgtatgcattcgcgctcggcaaggcggcaggtaagcccgacgccgaagaagacggctcccccgccgccatcaaggcactgctcgataccgcccccgaaatggacggattcaccggcctgcagcgcttcttcctgagctacgcctccatctggcgcaccaagaaccgcgacgagctggccgaacagtacctgcagatcgacccgcattctccagccgaattccgcaccaacggcatcgccagcaacgtggacctcttctacgatgcctttggcgtgaccgaaggcgacgccatgtggctcgcgcccaaggaccgtgtgagcatttggtaatccccgttatgtaagagaaaaccgctgtgcttgcctcgattacaggcgaacacagcggtttttcatgatgtatggttggcactcagaattcggattcgccgggatcggaagattcggcgaaaccgtcgacgtaggtttgttgggctgcggactgtggctgattagcgccagcgtccggttgcgacatgacggcatcggccatggacgcagccgctgactcggttgatggcgacggcgattggccggaatcggaggtgaccccaaattcgacggggccagattccgacgaggtcgcatacgggtcaatgcccacaccggatgcggcaccgtccacactatattgcgttggcctcatgtgcggtgacgatgctcgttgcccgtttccgccatccatgccttcggcggcaccgttggcattgccgttaccgttgccaccattgcctccgttcccattaccggcacgctgtggcttgatcagcgacgtggtgccgaaggtcaggtcatgcccaatgttggtggcttcgagaacggttctactgcgcggttcgccttgctcattggtccactgctcggtgatgagtgagccgaccacaatgatgcggtcaccgcggcgaaccgaactggcggcgttcacggccaaagcacggaacgctttgacgcccacccatgcggttccgtaatcctcccattgtctggtagtcgggttgagtcgactgcgggtgctgcccatacggaatgtcagcacgcggaaactctcagttccgcctagtgtcggatcaccggccacaaagccggtgacggtcactgctgcttgttgatttgccatgatcggtcctttcctcggcctgctggcctgttgtttggatgtggaccgccggagcctgtctccggcttcattgccggcttgcacgccccagcggcacctccactgtgaggcatgacgtttgaagtgcacaagggcaactggcaaatgtggatactgtgacgcagttgaaattttaagaatgtggataagtttcggttatccacaacaaagtgccattctgcgactgggcagaatggcgcttgatgcgattaacgccgaggctgagtaagtgggactcagctgagggcggcgaagcgctcggcgagcgcgtcggcggcttcggcggcgggcacggcgaccttgttttcgccgttgcggtcgcgcagttcgatggtgccgtcgttgacgtaatcgcggccgaccacggcgaccagcggcacgccgatcagctcggcatccttgaacttgacgcccggagacaccttcttgcggtcatcgtaaataacctcaaggcccttggcctcaagctcggcgaccagcttctcggcaccttcaaacgccacggcgtccttaccggtggccaccacgtgcacggcagccggggcaatcacggacggccaagccaagccggcttcgtcgtggtgtgtttcggcgatgcaggccagcacgcgggaaacaccgatgccatagcagcccatccacaccggcacggccttgccgttctggtcgagcaccttcaggtccagtgccttggagtacttgagacccagctggaacacctggccgatttccacaccacgctcgaagctcaacggaccggaaccgtccgggctcatgtcgccgtggcgaacctcaacggcttccaccacgccgtcggccttgaagtcacggccgtacaccaggttgtagtagtcgacctcgttctcatcggcaccagtgaaccaagcggaacccttgaccacgtgcgcgtcgaccaggtagcgaaccgggttcttcacgccagcagcctcggcctgcgggccaagcaccatcggtccgatgtagcctggcaccagttcggggtgctgcttcaggtcttcttcagtggcctcctcaagctcggcgggagcgaactgggcttccagtcgcttcatatccaccgtacggtcgccgggcacgccgacgacaatcacttcacgccacggctcgtcatgctcttcatcctcagggtgcttgacggtaatcaccacgttcttgaggatgtcggaagcctgccattcacggccatcagtacgcggatggtcggcgttggcacgctcaatcatgttatcgatggtcttggcatccggggtggcttccttggaagcggcgggagtggcggaagcatcgatttccggcagctccggagtgctcagggcctccacattccatgccttgccggaaggtgccagcgcgaaggtatcttcgccgatcggcatcggagccaggaattcctcggatgcggagccgcccatcgggccggacatggcgaacacaggtacgtacttcaggtcgaggcgctggaagatacgctcgtaggcgccgcgctcgtcatagtaggccttgcgcatgccttcttcatcgatggtgaaggagtaggcgtccttcatgatgaattcacgaccacggatcaggccggcacgcggacggaactcgtcgcggtacttggtctggatctggtacagggtgacgggcaggtctttgtaagaggagtacatgtccttgaccagaagggtgaacatctcctcgtgggtgggggccagcaggtaatcggcctcgtggcgatccttcaaacggaagatgttgtcgccgtactcctcccagcgatgggtggcctcgtagggttcgcgcggcagcagggccgggaagtgcacttcctgggcgccgatgccgttgatctcctcgcggatgatggcctcgatcttgttcagcacgcgcagaccgagcggcagccaggtccagataccgggtgcggccttgcggatatagccggcgcgctgcagcagcttggccgaatcgacatcggcatcagcggggtcctcgcgcagggtgcgcaggaacatggttgacatacgaagggtattggaagtcatgtgttccaagatattcgcgtgaaccgacaagcccgcctgctattcgcactattccggccttcatcttggcattcggactcattcgtacaacaatgatggctagaagggtaggagggcacgatgacgcagccgaccgagcaacaggggaatcagccggaacccgcggagcaaccggtgtatcaaccggcccagcatgggccccgcaattttctgctgcaaccccgcaattcccaacggcagttccgcgacaaccggtatcgcaacagccaatggccatgccaccatttgcgcaatcgcctatgtcggtcccggaacaagcggcctgtccggagcggccgcgctgattgtgggtgtgcgtttgctgcaagcaccgttgatctacggcacggtgattcttatcgtcagcacggtgactgtgctgtggccatggcgggccgaattctcccgccactaccggtgggtgtggcttgctttgggcggcatcattctgattgtggcagccgcgcgctatgaggcgagcctcaaatcgatgaggacgatcgccgcgcgtattggcgatctgcgctaaatcgcgcgggcgacctgaggcagattaccaacgtccggcgatagcagtcctgcatacggggcagtgcccattgccactgtatccggcagataaacggttggcaatgattcgataccaatcgcgttccacgagcttggccctgcattcagggtttgggcaatatgtggtatcgccttcacgatcatgcacgttgccggtgtacacataattgagtccctcttcgagggcgatgcctcgggcgcgggtcagagtctcgtgcggggtgggcgttacgtccatcatgcggtaactggagtggaatgcggaaaagtgcagcggcacgtccgggcccaagtgctcgcgtatccatgtacattcagcatgcagctgggcgtcgtcatcgttgagtccagggatgagtagcgtggtgagctccacccacacgtgttcgccttctggtgtgcgtgcctcgttgaccgcatagtcgatggtttcgagcacatcggccagatgcgtgccggtcactttccaataaaattcttcggtgaagcctttgagatcgatgttggcggcgtccatggcggcgtagaagtcgggccgggcttcggcgctcatgtatccggcagtcacggcgatgggatgaatgccgagcgctcggcaggcttcggccgtgtcgatggcatattcggcgaacacgatcggatcgttataggtgaacgccaccgaatcgatgccccggtcggccgcgacctgcgcgattttctccggactggcttccacgccgagccggtcgaaactgcgggctttggcaatatcccaattctggcagaatcggcaaccggaattgcagccagccgtgccaaaactcagcacgctggaaccggggtggaagtggttgagcggcttcttttccactgggtccacggcgaagccggagctgcggccgtaggtgtcggagacgatgagtccgtcgtggtttgagcggacgaagcaaaagccgcgttggccgggcttgaggacgcagcggcgcgggcatagttcgcagcgagcgcggttggtaccgtcgtggaattgcgtttgccagcgggctatggcggggttacgaacatctgtgactgacgccgtatgaccgcacgattcccggtgcccaccctctgattctcgatgaccatcctccggcgcttcgcgccacctcccgccagcgggaggaaccgtagaagccgtgggcaaggaactgcggcgtttcccgccagcgggagaggacatggttgctgcgttagtgctcggcataggcggtcacctcgtagcgttgacagtcgatttcgccatcgttccagtcgtaggacgggcggataccggctttggcgagcaggtgagcgacgaaatcgtgcggattgggcagctcatcccacacttgtggcaggaatgtggcgctgcggccacgacggtcggcgagaatcagaccgtctttgccggggcgtaatacttcctcaagttcagtgcgcgaacgtaccgggcgttcgacgttgctgccgtcccgtttgacggcgtcggtctgaggtccggattgcagcgatgccagagtcgcggtcttcgagccggtatcgcgcgaatcggcgtcacaggagttcacggtaatcggctcgggctcgcccaagacggatacctccacgttgagcaacgggtattccacggcggtgaccgggttgaaacgtgggtcacgggtggcggcgtccaccgcatgtgcagctatgtccttgccgagcgagcggtgggcggccagcgaaccgatgcacccgcgtagccggccaccctcggtcagggtaacgaaacaggcaccggactcgttcagccatgggtttgcggcaagaatggacgcggtcgaatcggcggctgttggatgttcaatatgcaaccgttcccggatagcggcacgggcgagtttcagcagcacatcaccatgggctgttcccgattcgcctaagtcatctgcaccggctggagcatctgcttctggtttggattcccacgcggcaaacgagacatatcccactaccggctcgtcggcgtctcgcattgcggggcgaggttggccggcaagcgccaccacgccgtcgtcgccggaagtggaacagccgagctcgaagagcttcatgtccttgcggccttttaacacatccagaaggccgttgatcgggtatgcgccacaggcccggcgagggtgaatcggcagatgcaaagccgcaatgtccgcaatggtctggtcatccaacgcgcgggcgacttcgtgcggatgatagtgcgagagatccgaactaatcacgatgacggtttccgggccaccccacaaagcacgcaacacatcacccgcctcttgtggcgtggcatcgcccgcgttcaacggcacaatagtgaggtctgggccgagcacggtttgcaggaacggaatctgcacttctaccgcatgttcttgtgcgtgggttgggccattgacgatcattgcgggagccgacgcgcccggacgggcatgtgtaccggagcgcaatggctcattgacagacaggcccagagccttacgctcggctgcaatgtctaccggcacagtgcccagcggcgtttcaaacgccgctgccgtggaacaggcgacgcctcgcacggccacacggtgagtcggtcccacgattaccgcgcgagtcacactcccccgccctcgttcgagcaaagcataggcaagcgcggccgccgtgccggaatacacataaccggcatgcggcacgattacagcctttggcactcccgctggaagcgtgggctccaactgttgcagaacctctcgactgtaatccaattgatggttaatgagttgcttgagcgttgtgcggtcagcggggtagaacgaaccagccaccgctgtcggacgtattgcgccagtgattttgccgctgccgtctgccgcgcttgctgcatctgacgcactagccacactaaccgtatcgatttgcacaccggcccgggcggcctcgcgaacctcattgtttccacgaaatatctcggatagcaccataactaccacctcttattccatggtagccgttcagttcctcaatgaagacaagttcgcagtgtcttcttcggcttcaaggggccgattccgcctcttggagacatctacttgcatttcgaggggctggtcatccgctcaatcgcacatagaaacggcttcataccaacgtcattccgccgtttttaagcgctgtctacttggacatcagccccttgaaacggaagtagatgtcccgaaaactcaaaatccgcccctcgaagtgcagaaacactcaaattagcggtcgttcgatatatcgaccgtcagaataacgcgtcctgggcgaagtcatcatcgggattgacaccgaattcgtccggctcggcgggtttgaacgcgcttgcaccttcatcggccaactggtcggaagccgaggccgaggcttcgcgcaggtcgccgtcgagcaccacggcatcgggcgagacgaggaacatgcgttcgttgacgccagccaaatacagtccgcccagcgattcgacgcgggacaacgccacatatcccatgcccggcgcgaaggtgcgcttcagatccatgaccgcacgatcaagcgtcatgccttgcgacttgtggatggtgatgccccacgcgcaacgcaacggcacctgcgagacggaggcgagcacggtgtcgccgtccatcatttcccatgtggcctgtttcatggtgacgatgttgccgttttcgaattccacgatcggccagccgcccttgttctcctgcgcgaagccgcgcacggtgccgagcgagccgttgacgtactggcgatcggtgtcgttgcgcagggccatgacagccgcgccttccttgagtaccagtcgctcgggggccaacatgttcttcttgagtcggtcgaccaggttggcagggcctgctgtctcggcgtggaactcgtgcggctcaagcatgatctggttcaggcgcatgtcgttgagattgtcggcctgccggttcaccgggaataggtggacggcgacctggccgggctcgggcagtttgcccagacgggtgacgagcacgtcacggtcggactgggtcacgtcgccttcgcgaatgtcggtgagcacggtcagcagttcgccggtgtcctgacggtgctgttcggtcagatagcagatcaccgggttgagttcgggccataccagcgattcggtgatgaagccttcggggttcaagccggcacgggcataccgttcgcgactggcgatgaattcgggggtgggggcgatgaggtcgcggttgcgcccggacaccgaaaccggcggcagttggaagaagtcgccggacagcacgacctggatgcctccgaacgggcgtgggtcgcgacgcacttcgcggcagacttggtcgaccatgtcgaacagccatgcgtgcagcatggagacctcgtcgatgacgaggatgtccgtagcctgaatcttgcgtttgcgccgggatttgatgagtttgagcagactcgggctcagggcggtggccacgccgacgccgctccacgaatggatggtttggccgttgatatgcgtggaggcgatgcctgtggacgcggtgactgccacgctggcgccgtcggcccgagcctggcggatgaactcgttcaagacataggtcttaccggcaccgggcgcaccggtcagaaacacgttcgcgccggcgttcagaatggctagggcttcggtttggcgcatatcaacctctctagactcccctcagggaggggagccaagtacggcagactacttattgagaatgctggtggccacgatgtcggcggcgatggccttggaggcggcatcatccgggccggggacgggggccatgaaggccttacggtagtagcgcaactcgtccaaggactcgatgatgtcggcgagggcacggtggccgccgttcttcggcggacggttctcgtagacggccgggtaccagcggcgggcgagctccttcaaggtgctcacgtccacgctgcggtaatgcaggtggctcatgaggcccggcatgtagtggtcgaggaacttcttgtcggagccgatggtgttgccggccagcagcgggcgcacgccttccggcgtgaagcgcagcacgtattcggtgaccttctgctcggcctcggccaggctcaggccattctcccactcgttgatcaggccggaacgggtgtgcatctggcgcacgaaatcgttcatgtggttcacagccttctcggacggcttgatgacgtaatccacgccctcgtccagcacattcaggtcaaagtcggtgggaaccacagacacctcgacgagttcgtcgccgccgaagatgtcaagtccggtcatctcgcaatcgatccaaatcaggcgcgagtccttcgcgctgtacgtttccgcgtcatggctgtcgaccatggtgtgcctcttttcttcgctggtcatcgcttatgcagaacagttcagactataccccagcgcatacaagctatctcgagccacatacgcgaaaagggcctgcataagcagacccttttcacaaggaatcaacccctaactagcgcaagctagcgggcatcaaccgatcagttgttgtggaagccggagtagttcggggcttcggcggtcatcacgatatcgtgcgggtgcgattcgcgcagaccggcgtcggtgatgcggatgaacttgccacgctccggcatctcggcgatgttgtgggcgccgatgtagaacatggactggtgcaggccaccgagcatctggtagagcacggcgttcagcgggccgcggtacggcacttcgccttccacaccttccggcacgaccttgtcgctggaggtcacgtcggcctggaagtagcggtccttggagtaggacttcttgccgcgcggggccatggcgccgagggagcccatgccacggtacagcttgtactgcttgccgtgcaggagcaccttctcgcccggggcttcctcacagccggcgagcgtgccgccgagcatcacggaggaggcgccggccacgagggccttggcgatgtcaccggagtagtggatgccaccgtcggcgatgcagggcacgccagcggcacggcaggcctgggcggcctcgtacacggcggtgagctgcgggacaccgacaccggcaacgatacgggtggtgcagatggagccggggccaataccgaccttgacggcgtccgcgccagcctcaatcatggcctgagcaccggagcgggtgccgacgttgccgccgatgatctgcacgccgtcgaaggcggagtcgtgcttcaggcgggaaatcatgtcgagtgccagacgagcctcaccgttggcggtgtcgaccacgagcacgtccacgccagcctccatcagagcggaggcacgctgccaggcgtcgccgaggaagccgacgccggcggccacgcgcagacgaccctgctcatccttggtggcgtccgggtactgctcggtcttgacgaagtccttgacggtgatcaggccggtcaggtggccttcctcgtcaacgagcggcagcttctcaaccttgtgctgagcgagtagacggtgagcgtcgtccttggagatgttggacgggccagtgaccaggttctccttggtcatgacatccttaaccttcagggtgtcgtaatcctcggaggcgatgaagcgcatatcacggttggtgatgatgccgacgagcttgttgtccttgtccacaaccggcagaccggagatgtggaacttgccgcacagcttgtcgaggtcggccagcgtgacctcggggttgacggtcagcgggtcggtgatcataccggactcggaacgcttgaccacatcgacctgagcggcctggtcgtcgatggacagattgcggtgcaacacaccgatgccaccgttacgagccatggcgatggccatctcggactcggtcacggtatccatggcagcggagaggaccggggccttcatcacgatcttgcgagtcagatgagtgctggtgtccacttcggagggaatgacatccgtctcgttcggcaacagcaacacatcgtcataggcaaggccgagcttggcgaaaatcgggggaaggggagcatacgccgactgggcgtttaattcatcaaggtttgtagccatgtaaacactatatgaaaatgcgctgaccttcacgacacacgcttgtgagcgctcacttatccgctgccgggtcctgcacctcacccacctgcgagtcccgcgaatttgcaggcgaatcagtcatcgaatccgctgcctgagagccaatcgaatcccggctctcccctactgcagactgcgatttaggcactgtatgctgcgcgtttttacgtgcggattcgaacgtcaggttctcggcttggatctcgggaatacgatgccgcagataggggtacatcgtggctatggtcagcaccaccacagcgatggccatgcccacggccacgtgctgcgctttgaagaacagaatcgtcagcgaaccgaatgcgatcaacgcggcccatccccacaggatcagcacggcgccacgcaccgaatgcccgatcttcagcatgcgatggtgcaggtgcatacggtccggatgcatgggcgactggcctttggccaaacgccgcacaatcgccagacacatgtcgagcacaggcaggaacaacaccagaaccggcagcagaatcggcatgaacaccggcagatagatgctggcatgaatcgaggccgggtcaagacgtccggtcatcacaatcgaagcgcaggtgatgagatagccaagcagcatcgaaccggaatcacccatgaacagtttggcgggatgccaattatgcagcaggaagcccacgcagatacccaccatcatcacgtcgatcagcgtggccaacgaagcataactcggggaagaccgggcgatgatatacgaataggcggcgaacgctatgccaccaatcgccacgataccggccgccagaccatcgaggccatcaacgaaattgaccgcgttgatcgaggcgacgatcaggaatgcggtgatcgccatggacagactcggcgaggcggtaatcagcgaaccacccaaaggcagtgagatgatctgcaatccgccccaagccacgaatacggaaatcagcagctggccggcgagtttcagcatccaatcgagatcccacaggtcgtcggccatgcccagcagactgatcatgatgccgccggcaagaatcacccacatctggtaattgccgttgaacaatcccgagagaaaaggcagccgactggcgaatacggtagccacggcaaaaccgatcagcatgccaaggccgcccatgcgcggcgtgggaatggtgtgcacgtctcgggcacgcacctcaccaaccgcaccgatttcgatggcgacgtggcgaatcagcggagtcaccagccaggtgacgccaccggcgatggcggcaatcagtaggtagattctcatgcgccgagtcccccgccgttgaggtggagggccttgcgaatcacgttttgggcgatgacgccttcacgcaggatctcgatgccgtcgcgcgcgtacggatcggctttgacgacggtgctggagacatggccttgggtgggaccgccgtccagatacaggtcgacttcgttgccgaacgcgtcaaccgcctcctggacagtctgtgcgctttcgtcgccggaacggttggcgctggacgcggccagcggaccagtggccttgagaatcgcgaggcacagcgccgaattggggatgcggatgccctgcgtgccggggcgaccatcggcggtgtcggccaaagtctccaacgtgcagtcgggccgggctacggcaatcggcgagaacgcgccgggcaggaacgccgccgacaaacgattcagtggagacggcaggtcgagaccgagttcatcaagctggtcggtggatgcgagcagtacctgcaacgccttatagcgcgggcgacgcttgagccggtagatacggtcgatggcggccttattacgcggatcgcacgccactccatataccgtatccgttggaatgacgaccaatccaccatcccggatgacacgcgccgcttgtgccagcgattcatccgtgactttcagcgttgttccgccctccacgctcacgacacctccgttcgcctgtgtattcacaatctaccattgcaccattgcgccccgacttgcatagttcatcatcgctcgtttgccgtactgctgttttccgattcgccccatacgcacagaccgtagatacaatgagttcgtccatgctctttcgcgaaattacaggagtgttcaatgagcggaatcaatgctgaatccaccaccatgcctcccgtcgaactgcgtatgccgcgcgccagcgagcgcgtgttcgccaacttcaacttcactgtgctggattgtcgcccggtgacgattggcgagggttgcgtgatcggtgccggctcggtggtgacgcgcgatattccgccgcacaccgtggccgtgggcaatccggcccgtccgattcgcgaaatcacggacgcggacgcctccgccctgcagtattacgcgcagtagcagcggcggccccgcgcctgtggctacttctcggcgaagagatagcggtctcggccggtccaatctttgccggtggaggcggtggcgaaacctgtggccttggcataggccactaatcgctcgccttgggtgagatcatgctccataaccaatacgccgccgggcttgagcaggcgccaggcgcgctcaataatgcgttcagggatgagcgtgccgtctgccgaaccgccgtatagcgccagttccgggtcccagtcgcgtacttctggttgttcggggatgtcggtttgtggcacgtagggcgggttggtgatgacgatgtcgatggtgccgtcgagttgcgccagcgtggccagtgacgtggcgtcggcgacttccagttggtaattggaggcgatggaggggtatcgtttcgcggttaccgccagattgcgccgggtccattcggcggtacgcggggataattcgacggcccatacttggctgccgggcacttcgctgactatcgacaggccgatggcaccggaaccggcgcacaggtcgaccatgcgcgggtggatcatgctgtgccgggtcagccagtcaagaccggcctggactacggtttcggtttccgggcgcgggataaagacgccggggcccacctgcaggtcgaggtagcggaaaggcgtgtggccggtgatgtattggagcggctcgcgtttggcgcgtcgggaaagcatggcgtggaaggcggcaaggatattggtgacggggtcggcctgaccacccccagtcgctgcgcgacagcccccgccggcgggggccagcgaatcgaggccctcccccatcagcatggccttgtcgatatcgcgtagctcagcgtccacggcctcggccagcaacagtttggcatcatgttcgggcgtctcgatgccggcttcgcgcaactgcgcggcggcttgacgaatcaggtcggctatcactgctggttggccagacggtcggcttcgtcggcttggatgtcggaatcgatgacggcctgcaggtcgccatcgagcacggcgtcaaggttgtaggccttgtaattcgtgcgatgatcgacgatacggttttccgggaagttgtacgtgcgaatacgttcggagcggtcaagcgaacgcacctgcgagtgacgcatgtcggcggcttcggcggcctcctgctcatgtttcatggccagcaggcgagacttcagcacacgcagcgcggcggcgcggttctggatctgcgacttctcatcctgcatgttcactgtgatgccggtgggcaggtgggtcatgcgcacggcggaatacgtggtgttcacggactggccgccggggccggagctcatgaagatgtcgattttcaggtctttcggatcgatctcgatctcgtcgtcatcctcgtcggcttcggggaacacgatgacgcccgcggcggaggtctggatacggccctgcgattcggtgacggggatgcgctgcacacggtgtacgccgccctcgtatttcatcgaagcccacacgccgtcttcgggagcgggcgtgcccttggcgcggatggcaatctgcacgtccttgacgccgccgagctcggtggtgttctcggactgcacgttcacactccagccacgcttctcggcgtaacgggtgtacatgcgcagcaggtcgccggcgaacagtgcggcttcttcgccgccggtgccagccttgatttccatgatggtgtcgcgtgcatcatccgggtcacgcgggatcagcgcggtgcgcagcttctcttcgacaccgggcagttcggcttcaagacgcttggcttcctcggcgaagtcggcgtcttcgccggccatctcctgagcggctgccagatcgtccttcacctgcaaccaggttttgtaggcgcccacgatggcacccagttcggcgtgacgacggcccagcttgcgcagcttgtccgggttggacacgacttcggggctcgccatctgttcttcgatggactggtactcctcaagcgcggttgccgccgccgggaactgttcgtctgccataacacgctttctttcgtacggtggtgtctattcggttgtgcaggtcaaaaaaaaaatgtcaaagaatacaaaaacgccagtcctcgatcgggtatgccggagcatgccgaatcgaatcggactggcgtgaagtatgctacttgctcttcttgccgtagcgcttctcgaagcgagcaacgcggccaccggtgtcgagaatcttctgcttgccggtgtagaacgggtggcactgagagcacacgtcaacgaacatgtgatcttccttgccagcggtgcgggtcacgaaggtgttgccgcacgagcacgtcacctcaacggggtggtaatcaggatggataccctgctgcattttacgtctcctatggattcgggggacccgggtcgtcatgcccctatggcaggacgtgaaccggaacctaagggattgtacgcgcctatctggacgtgaagacgcgctgtgccgccgcaggaggcgacgcaaaagagtggggccgcaggggcttgaaccctggaccgggcgattatgagtcgcatgctctaaccgactgagctacggccccacgttcgctgcgtaaaacagccaacttgcaaagtgtagcatgaacccaccaacgccggcacacgcgccatgcacccatgccatgcacccgccagcacaacaagcagcatctcccggcgctacttctcccccatgtaccccaacgggttctcgatgaaccgtcgcaagcccatttcggccgcgccatatagcgagggatgcagcgccaccggcggcacgaacacgcggatcttcacattcgggtatcccagaatttccgaacgcagccggccttcaagcacggtggccagctcgtcgccgaagtgcgtccacagtccgcccaacagcaccgtatcgacatccaccagattcacggcggaagcgatggcggaaaccagcgcatcagcggcctgatcgaccactttggccacgtctggatcccccgcacgccaacgctggaggaatgtatcgatggcctcgctgctggtggcatccccatcttcggcaatgccggcagcctcgaccaaggcgcgacggcccgcaaacgcctcaaggcacccgtggcgcccgcagctgcacaacggcccatccatcgccacggacagatggccgatctcgccggcgaatccgtgcgagcccatcaccacttcgccgtcacgcaccaccgcgccgccgatgccgatatcggtagacaggtaaataaaggaatccgtgcgatccaccacattcaggaaggacgcacgttcggtggcataccccggaatctgagcgatggcggccatcttcgcttcgttaccggccaccacatccagccggcgtaccacgttgaaccgggtgaggttgacgttttcccaacccagattgcgggccaccaacagccacatgtcgtcggtgacgatgcccggcagcgcaagcccggctcccaccactttgcagccacgtcgtttgagtcggctttccaacgggaaggtcatcgcatcgagcttggcgaagatctcgtacgggtcagtgccggtcatatcctcactcacccactcctgaccgagagtgtcgccgttcagatcgagtgccaggcaaccgtagccatcggtgttgatctgcaggccgatgccggcgatggacccgccatgaatctccagcggcgtgctgggccgcccatatgtggtggagacgaccggctcgccttcctgcaccacgccactatcgatcagcatcgaggccaacagcgaaagcgtggccttggtcaggcccgtttccttggccaagtcggccctgctcatgggtttctccgcgcgcaacaaagtgtcgagaaccaccgacaaattatggttgcgcagatcctcctgattgatcctgcgtagacttgccataggctcctacctccttgcacccatagtctcgaacgccgcacaggcgccccatccgtctatcgcacaatgatattgtgcgtcaaacgattgaaccaga

SEQ ID NO: 1202 - DNA, 7186 bp, Unknown
  R81_24m  MAG No. k141_19675
ccacgtcttgatgacgttcttggtgcccttctcgttctgctcgtcgactttcttctgcaagtgggcgtcgacgaaggggcccttcttgatgctacgagtcatcttctcgatactcccttacttgcggttcttgccggacggacgacgacgaacaatcatcttgttcgaagccttcttcggacgacgagtacgaacctcgcccttgccccacggggagaccggcggcttaccaccgcgggtacgaccgccgtgcgggtggtcgaccgggttcatggactcaccacgggtgatcggacggtggccgatccagcgggcgcggccagccttgccgagctgaatgttggcgtggtcctcgttgccgacctcgccgacggtagcgcggcagcgcgcgtcgacgttgcggatttcgccggacggcatacgcagctgggcgtaagcgccatccttggcgacgagctgaacggcagcaccagcggagcgagcaatcttggcgccacccagcgggcggagctcgatggcgtgaaccacggtaccggtcgggatgttcttcagcggcaggttgttgcccggcttgatatcagcctgagcaccggtctcgatgacgtcgccctgcttgatgcccttcggcgcgatgatgtagcgcttctcgccatctgcgaagtgcaggagggcgatacgggcggagcggttcggatcgtactcgatctcggcaaccttggcgggcacgccgtccttgtcccaacgcttgaaatcgatgagacggtactggcgcttgtggccgccgccgcgatgacgggaggtgatacggccgtaagagttacgaccgccggtcttggacttcttgcgaaccagcgacttctcaggcgtagaacgagtcagctcggagaaatccgagacggacgcgttgcggcggcctgcggtcgtcggcttataaacgcggatagccataatgtagttcttcctttaacttttctcggctaaccttcagttaccaaagatgtcgatcgtctggccctcggcgacggtcacgatcgcacgcttctgggaagcgcgctggccgaaaccggtgcgagtgcgctgcttcttgccagcgcggttgagggtgttgacgttcgtcaccttgaccttgaagatctcttcgattgcctgcttgatctgcaccttgttcgcatccggagccaccacgaaggtgtactggccacggtcggaagcggcgtagctcttctcggagacgacgggcttaagaatcacgtcgtgagcgggcttgtgaatagcgaccatctaaatcaggcctccttcggctcggtcttggcagccacgaaagcctcgaaggcttccttggtgaagaccacgtactgcgaggtaatcacgtcgtacgtgttgagctgatcgacgaaaatcgggtgaacggtcgggatgttgcgcacggagagccactcgttgatgttgtcgcgagtgaagacgaccgtggtgaacttgtccgcggtgatcggggccagggcggcgacagcggccttggtggacggctcggtgataccgaactccaccacggcaacgcgaccggcgttggcgcgatcggacagggcgtagcgcagagctgcggccttcatcttcttgggggtgcgctgagagtagtcacgcggctgcgggccgaacacggtgccgccgtggtaccactgcggtgcacggatggagccctgacgagcacgaccggtgcccttctgcttccacggcttcttgccgccgccggaaaccatgccacgagtcttggtggcgtgggtgccctgacgagcagcagcgagctgagcggtgacaacctggtggatcagcgggatgtgagcctggacatcctcggcggaaacgccgaagagagcctcaggagcttcaacggtgccggtggcctggcccttggcgtcggtgacgttcagagtaacgtttgccatggtttatcaggctcccttcacagccgagcggacgagaacgatgccgcccttggggccaggaatggcgcccttgatggcgaggatgccgttctcgacatcagcggagacgacggtcaggttctgggtagtggcggtcacatgacccatgcggccggccatacgcttgcccttgagaatacggctcggagtggcgcatgcgcccacagaaccgggacggcgctcgttcttgtgagaaccgtgagtacggcggtaggacttgaagccccaacgcttgatggtaccggcgaagcccttacccttggtggtgccggtcacgtcgacctcagcaccctcttcgaacaggtcagcggccagttcctggccagcctcgaactgatcgacgtcgtcggtgcgcacctcgacgaggtggcgacgcggggtgacaccggccttggcaaagtggccagccagcggcttggtcaccttggtggggtcgatggcgccgtagccgagctggacggccttgtagccgtcagattcctcggtcttcacggcggtcaccacgttggtggacacgtcgacaagagtgacgggcacgaagaagccgttctcgtcccacacctgggacatgccgagcttcttgcccagcagagccttgcgattagacataatgcttcctcctcccttacagcttgatttcgatgttgacgtccgcaggcagatcgatgtgcatcagggagtccacggccttgggggtcgggtccacgatgtcgatgaggcgcttgtgagtgcgcatctcgaagtgctcgcgagaatccttgtacttgtgaggagaacggataacacagaagacgttcttctcggtcggcagcggaacggggccaacaacagttgcgcccgcgttcgtcaccgtttcgacgatcttcttcgccgattggtcgatgacctcgtggtcataggacttaagcctgatgcggattttctgtcccgccattgccgtccgccctttctagcgatgttcgttgtactgtttaccaacctgcttctagggcaccggcgcgcatggcctcccttggacatacgtcctctggcggtcatccgacatcagtgcgcggtttccggctgtcacttcacttgaagtggctcccggcccgcgctcgcttttttaattccaatttgcgagcccaaatcaggcaacttgtttattcaagcattgaggtgggacagcgcggaggaattcgcgcgtgtcgcgctcatgccgttcgtattacctcgcggcatagccgctcggcgtcgcctaccaacatccttctgagacttacctatatatagtggcacagctcacgttggcgaatatggattgattaattgagttggacggtaacgcgaattactcttaaggctcgtgacacaatcactggcaaagaacatcaaacctattcgtgagcacggtgccaacgtgttatatcagcacggcactttggccttactcgtgccggggctgctggaaggcaccaccaccatcggcgaattgctcaagcatggcgacaccggcatcggcaccggcgagggcttggacggcgagctcatcatcctggatggcgtggcatacaaggtaggccaatccggtgtggccgaacgcgtgccggacgacttcaccatgccattcgctaatagccatcgcgcggccttccagtaccagtgcgagcgtcatgatatcggcctagaagagctcaacgaaaagatcgtcaaggcgaacggccgcgcgaacacgttcttttcggtaattgtgcgcggcacgttcagcttcatcaagacacgtgcggtcatcaagcagcaggcaccctaccccacgctggtagaggtggccgaccggcaggccgtgttcctgcgccacgacgtcaagggcaccatgctcgggtacttctcccccgtgatgtttcacggcgcggctgtggccggattccacgagcacttcctgtccgacgacaagacgttcggcggccatgtgctcgatgcggtgctcgagcgcggcaaaatctacagtcaggtgttcgataccttggtgcagcatctgccggtggacgaccctgattatcgcaaccacgacttcagccaagatccgatagccgaggccatttccagcgccgagggcgatactcaacgagattagtctcacataaacacaatgtgagccaaatgaacatttccgaacaatcgcacatgttgcataatggcggaagcactggcttctcgcacttcctatgttcgattgtcgcaatgcaggtctcacatctttcttattgagaaccattcgctgcgatatcatgacagatatgacttcccgccgcaagactcttaaacgcgattggttcgacaaccaacctggcgcatgggtaatggttatgctgcccgctgtggctggcttctttatcggcgggcctaatcttgatacgctttggctgttggcgacgtgggccgtgtgctattgcgtgcagttcagcgccgcgcactggttcaaagcacacttttcacgccgttatctgccgccgatgctcacttatgccgtagcgctcatcgtcatcggcttgccattcctgattacgcataccggcatactgcgttgggctcctttatatatagtgctggttgcgctgtcgatgctgtcctcgtggctgaggaaggagcgctcgctgtggggcaatgccgtgtcggtgattgccgcatcggccatggccacggtgatcgcgtcgtttggcaacgctattgagacggcatgtgttattcccatcaacgcagcacatgcctcgtgcgcagccgctgatgtcaccgccgcacgcgccgcgattcggaatatgccagatttgagccagatattcgaccttcacgcctggtggcctgcgggttcattgcccgtgaacgggctgattgccaccgtgctgtttgcgctgacgcagtatgggtcggttttggtggtcaaaaccatgatccgggaacgcgggaagcgttcgtacgtggcggcttcgtgggtatggcatgtggcgctattgctgctagccgccgtgccggctggacgcagcccgtatctgattgcgatgactgtgctgctgttggcccgcgccgttgcgttgccggtggttacacggcgcacaaccttgaagcccgtggtgaccggcattaccgaggcgtttgccagctttattgcttttggctgcattattgcggtgatttagcgacgctcagcgattccatggggcggtaattccctcatggggcggtaattagcccatggggcggacggtaaaattttaccttccgcagaatagagccgttttcgtacaccgccccatggggttttcaccgccccatgggcaagttaccgccccatgagtaggttaccgccccatggaggcacctgccggctgagggagcgccacatatgcaaaggagcccggcccctgtaatggggtcgggctccttgtgtccgctatgcagccactaagctgcaacaccgcggttggtggctactgctggtgccagcagccgccaaccgcctgcaatcagcgctcggaggcttcctcagtggcggcctcaccctcgcgctcgatgcgtagcttgtggccttccgcctgggagacgccgtagtaagcaccgacggcgatgtccttcatgtcgttgatcagcgggatgcgcgggttggccggggtgcactggtcctcgtaggcgcgcatgccgatctgatcgagcacggaccagaagtaatcctcgtccacgccgcaatcctggaagctcttgttcataccgagcttgttatcgcggtagtcctcgacagccttcgccaggttctccacggcttcggccggggtcttgccggtgtcgatgccgaggttgcgggcgatgtcctggtagcgctccggggcgatgtacttgttgtacttcggccaagaagtgggctcctcaggaatctggccgttgtagcgaatcacgtacggcagcaggatggagttggtacggccgtgggcgatgtggcacagggcaccgatggtgtgggccatgccgtggcacatgccgaggaacgcggagccgaatgccatgccggccatggtggcggcgttgtgcatcttctcctgagcgtcggtcttggccaggccgggctcgccgttgacggactcagccaggttgtcccagatgagcttggccgcgtgcagggccatgccgtcggtgaagtcgttcgcgtacacggacacgtatgcttccatcgagtgggtcagggcgtcgaagccggcgtcggacgccagcttgcgcggctgggtgcgagccagcaccgggtccacgatggccacggacggggtcagcgcgtagtcggtgatcgggtacttgtagccggtcttgtgatcggtgatcacggcgaacggggtgacctcggaaccggtgccggaggaggtcgggatgcacacgagcttggccttcttgcccagcggcgggatcttgaaggcgcgcttacggatatcgaagaacttctcgcgcacgtcggagaaggcgatttccgggtgctcgtagagcagccacatgatcttggaggcatccatcggggagccgccgccaaccgcgatgatcgtgtccggcacgaactcctcgcgcatcatctcagcgcccttttcgacggtctcgacggagggctccggctcgacgtagtcgatgatgcggaaggtcacacggttggagcgggcgcgcagctggtcgatgaccttgtcgacaatgccgagctgctccatgaccttatcgcacacgatgacggccttctcgatgccgtacatgtcgcgcaggtacttgatggcgttcggctcgaagtaggtcttggccgggatcttgaaccactgcatgttgttgttcctccgagcaatgcgcttgatgttgacgagattcacggcctgcacgttgccggacaccgagttgccgccgtaggagccgcagcccagggtcagcgacggggcgatggcattgtagatgtcgccgatgccgccaagggaggaaggctggttccagatgatgcggcaggcgtgcatacggacgccgtactcacgcacgagctcctggttgttggtgtggatggcggcggtggggccggcacccacgccgagggcgggcttgccggaggagtaagcggccttgaccatgcccggaccaccggtggcgaggatcgtggccacgcccgggtgctgcatcagcgcgccggtggcctggatggacgggtgctcgatcca

SEQ ID NO: 1203 - DNA, 9051 bp, Unknown
  R81_24m  MAG No. k141_19771
atccgggccgatgtccaggcccatcttgtcggccgggatggcatcggcggcaacgacctccggggcgaccggggtgtcaccggccgggaagccggcgttcacggcgacgtcggtcggcagcacgagctcaacgccgttcttctcggcggtctcgatgtagcccttgaccttctcaagctggtcctcttcaagcagggaggtgccgacctcgtagcccttggccttgatgaaggtgaacaccatgccgccgccgatgaccagacggttggccttgtcgagcaggttctcgatgacgccgagcttgtcggagaccttggaaccgccgagcaccacggtgaacggacgctccgggttctcggtggccttggacagggccttgacttccttctcgaccagcaggcctgcggcggccggcagatcggcggcaacgtcgtagttggagccctgggcgcggtggaccacgccgaagccatcggaaacgaaggcctcgccgagggcggcgatcttcttggcgtaagcggcgcgttcgtcggcgtccttagaggtctcctccgggttgaagcgaacgttctcaagcagcacaacatcgccatcgttcatggcggtgaccttggcctgagcgtcctcgccgtaggtgtccttggccagcggcacgttggtgccgagcagctcgccgaggcgggcggcaaccggggccaggctcagctcaggaacgaccttgcccttcgggcggccaaggtgggccatgaggatgaccttggcgccttcttcgcgcagggtcttgatggtcggcagagcagccttgattcgaccgtcatcggtgatggtggtgccgtccagcggaacattgaaatcagcgcgaaccagaacgcgcttgcccttgagatctccaaggtccttgagtgtcttcatgaatatcctttccttgacgaatcgcacgtcaaagtggccaattttgccactttgcatattacaggcattccggaacaaaacaccgcattcgcctactgactgaatgcggtgtttcgttacgtcgttgtcgggttacttgccttcggctgcgcgagccttctccgttttctcggcaagctgaagcagtcggcgaattcggccggcaatcgcatccttggtgatctgcggttcggcgatcttgccaagctcctcgaggctcttgtccacgtgatcgatgcgcagctggccggcctgacggaggttgtccggaatgttatcgccgagcacttcgaaggcatgctgcactttttcgctggcttcggcggcagccttggcggaacggcgcatattggcgtcatcgaagttggccagacggttggccttgccgcgggcctcgccgtcggagcgcttgccggtccattcgcgggccgaacgggtggcgcccatgagcttgagcatgcgttcgatggcgtcgggatccttgagggtcacgcgctcggagctgcgcagcgtgcgatgcttggcctggatgccgagacgacgggccacgccacacagggccatggcggcctcttccgtggggcaagcgatttccaggaagctggccttaccgggatcggataggaagccacgggccatgaaggcgccgcgccatgctgctttgatttgggcgatggatccgttgaccacttcagacggcagtccacggacctgctgcttgcggcggtcgaccagtccggtctgcaaagccaaggccactacgttgcgggtgacgagcaccacgtaggtctcgacagggccgttcggggtctgacgggtgaggtggttgacctcggcttcatgcccgaacgtgttcctcaacgtgttcttcagccattctgcaacgtcaagcgaggtgaatacggcttggataacgtatgtattctgtaccggtcgaagaccgccgccaaaacggatcatggccgcagcttgggccttgatcgcggctggtgaatcgccttcaaaggccgccaactcgcttttgacatcgtccagaagagccaagatctacctcctacagtcccgttcttctcaatgcttcaggcgcttcgtgccgttatctgctgtcatacggtcggaagccatcggctttctgtgatacctaatctggtggacaagcgaacccgtttgatacgtattatgggctttgctttctcgcagtgtggtcaccgaacgcttgcccgatgaccgctcgacgcctgcttacgatgagtgacgcttatgctgttctctcgcggaaacggttacgttgagcccatgtgcgcgtaagcggcgagccagctcttcgctcatcgccaccgaccggtgctgaccaccggtgcagccgacggcgatggttacatagtgcttgtcttcctgggcgtatccttccaacgcaatctcgatagctttctcataagcgtcgagaaattccttggctcccttgctggaaagcacgtagtcggcgaccggcttgtcgtgcccggtaagctcgcgcaggttgggaacccagaacgggttgggcagaaaacgcacatcggccacgaaatcggcgtcgatgggcatgccgtatttgaagccgaagctgaagatgtgtaccgccacggtggtggggccggaaccgagcatcgtctcgtagagtttggtggacagctggtggatgctcagggagctggtgtcaatgacccagtcggctcgctccttgaggtcttccagcaggtgacgttcctcaaggatgccgtcgatcagtcggttgccgtgctgcagcgggtgcgggcggcgcacggattcatagcgcttgatgagcacttcgttgctggcgtcgaggaacagaatatgggttttgacgccgagatcatccagatggccgagcacggcggccagctcgtcgaaatagctggagcgcacgtcgatgacggcggcaagcttgtggacgcccgaccccgatccggaaccggaggtggtcatcatgtcgacaagcgggataagcagtttgggaggcaggttgtcgaccacataccatcccatgtcttccacgcagtcagcggcatgagagcggcctgcgccggacataccggtgatgagcagcacctcgaaggcatcaagcggggtcggctggttgtccggagtcgatgtggatgtcgcggaattcgccggcgcattcgtggcggccgcctcgccggtatcgcggattgttgtctgttgactcattacaacgcctcctcaagagctttgcgcatcgcgatctccagctggtcgtcttcggtggtggtgtcctgcagacgctggtcggcatcgctgggcgggtcgtcatcccagataccggtcatcagcaatacctgtacgagagcttggtacagcagcatttcttcgccgccgatggcgtgaccgccatgagcgcgccaggcttccatgagcttggtggggcgtggatcgtagaccacgtccagcagcagtccggagaatggctcggttccggcattggtgagggcatccgcgacgttgtcggccgcatgtccgggaatcgtgttgatgacataggtggcgttgcgggctgcctcgagcagggcctgatcgtcgcctaattcgatttcgctgtacgggttatgcacgttgacgaacttttcggccactggtttaagcccggtgtttttcccagggtggcgggcggcgacgatgatatggccgatttcgggcatcatgcagcatgcggccaacgccgaagtggcggtgttgccattgccgaggatcaacgcggcgccgcttctcgatgcggtgtggtgttcgccgagttcgcgattggcgtggtcgaaggcgagttggatgccgatgacatcggtgttgtacagcttgatgcccggcttgccgttcggccaagcgggatcatcggtagccacactccagtcgaataccgcggtattcgccaccttcagttccttggcccacagattttccggaacaccgtacggttggatggtcttcttcaacggcatggtcaggctcaggccagcccacgtcgagccaaggcctttgaggaaagcgtcgaggtcgtcttcccccacctcgtgcttgtcgtacagccaatcgtcgagtttcagcgaacgataagccgcgttgtggagcacgggtgacaatgagtgcgcgacgggtttgccgagtacagcgcaacgatgattggccatatcccctccttgatgtctgtttccatgctagccgacactttgcttcgaatatgtcaaccacaggccccgcaaccgaaaattcactctgggctgctggaccgggccggctcactgctcgtgcagcgcgttgtacagcgcttcggctttggcgtggccgatgcctttgaccttctcgaagtcctcgacactggcttcgcgcatggctttgaccgagccgaagtggttgagcaaccgcttctggtagctttcgccgatgccgggaatctcgtcgagcgcgctgcgcagggcgcctttgcgccgctgttggcggtggtaggtgatggcgaagcggtgggattcgtcgcgtacacgctgcagcagatacatgccttcggactggcgtttgaggatgatcggatagtcgtcgtccggcacccacacctcttccaagcgtttggccagtccgcagacggccacgtcgatcacgccacagtcctcgagcgccttggcggcggccatgacctgcggcttgccgccgtcgaccaccaccaggttcggcttgtaggcaaagtgatgccggtttgtgttctgctggacgatgtcgggcgaggactcccgtgcatcgttctgcactccgtccggcaccgcgtgccccttgccactgatgtcggaaccgttctcaccattgtcgttaccgttcgcaacgattgtctccgccgccacggcagtggtcatcttgccggcggccgaggccgcgcgctgttccgcgtcgatgctttcgccggagtcgccggcgatgttgccgtgcctgaagcggcgggtgagcgtctcgtaaagcgcggacagatcatccaccgcgcctttgccgtccttgcctcggacggcgaagcgtcggtattcggatttcttggcgatcgcgtcttcgaacaccaccatggaggccacttggaaggcaccgcccacagtgttcgaaatgtcgtagcattcgatgcgcagcggggcttgcgcgagtcccaatgccttggccacatcgttcatggcctgggtgcgtgcgcccatgtcggagatgcggctcatcttgctgcgttgcagtgcttggctggcgttctcgttggcgcggtccataagctgcttcttgtcgcctcgcgaggccacgcggatggtcaccgcgcccccgcgcagattggtcagccagccttcgagttcctcgcggcgggccggttcgacgggcacgatgatttcgcgcggtaccggtgcgatgggtgccagcaggtccgcgcgtccggtggtctcctgacgggtgttgcgttctcgggtggcctgggcgcgtgccacagcgtccgtggccgtgatggtctgtgtggagccgatggcctcgcgattggtggagatggtcgcggccgactgggggtgattgtccccggcggcgtccgaatacacctgcaccagaaggtcggccatcaagtcggcgtcatcgatgtcctcaactcgttcgacgctccagttgcgttcgccgcgaatagagccggcgcgcacataaaaggcgtgcaccgaggcttcgagctcgtcgctggcgaagccgaacacgtccgcgtccacatcctggtcgaagacgacggcgttctgttgcaccacggtttccagcatttggatctggtcgcgcagtcgggcggctttctcgaattcgagttcggcgctggcctctttcatgtcgcgggtcaactgggcgatgtatggccgtccgagtcgtccggtcatcacgccgaccagctgttcgcacagccgccggtgttcgtccgcttcgatacggttcacgcagggtgcggagcatttgccgatggaggcgaacaggcatggccgtccggtcagttgcgccttgtggaatacgttggtggtgcaggtgcgtaccgggaacgtgcgcagcaaccggtcaagactgtgccgcaattcccacactttggcataggggccgaaataccgggtatcccgccgtttgcgcgaccgcgtgacccacacgcggggaatccgctcccccgtgctgaccgccagatacggataggtcttgtcgtcgcggaactgcacgttgaaccgtgggtcgaattccttgatccacgtgtattccaacgtcagtgattccagttcggtggcgacaaccgtccactccagactgcgtgcggtcagcaccatggtctgcgtgcgcggatgcagcagatatagcggctggaaataattggtgagcctgttgcgcaggttcttcgccttgcccacataaatgacgcgcccttccccgtcgcgccatttgtacacaccgggtttggcgggaatatccgaggtcttaggtcggaacaggtcgcgagaatcccccagcaaaggtgccccattcgcattcaccttcgccgtcgtttccccggcgcccacagctacgctttccggcattaacgccgccgcggtcttccgccactcatccggactatgccgctcaatatcgttcgtcataatcctcctcgctattaagcaaaaccaatcatcagggattgggtgggttggggtgtgtgttgccggaccgtaaagacttggcctgagcggcccggagcatgtccagcaacataccactcccacccacccgaggtcagcagcaatggaaggctaaagcatgggcttcaggaacttgccggtccatgaggcttcgcattcggcaacctgttcgggcgtgccctgcgtgacgatggtgccgcctccgtcgccaccctccggaccgagatcgatcagccagtcggcctccttgatcacatccagattatgttcgatgacgatgaccgtattgcccttgtccaccagggactgcagcaccttgagcagcttgttcacgtcttcgaagtgcaggccagtggtcggctcgtcgaggatgtacacggttttgccgtcggatcggcgctgcagctcggtggcaagcttgacgcgctgcgattcgccgccggacagggtgggtgcgggctggccgagtcggatgtagccgaggccgacgtccacgagggtcttcaggtatcgggagatgccggtgtacgccttgaagaagtcggcggcctcctcgatgggcatgttgaggatgtcggccacggtcttgccgttgtacgtgacttcaagggtctcgcggttgtatcgtttgccgtggcagacctcgcagtccacgtagacgtcgggcaggaagttcatttcgatcttcagcgtgccgtcgccgtggcaggcctcgcatcggccgcctttgacgttgaaactgaagcggccggggccgtagccgcgcacctgggcttcgggagtcttggcgaaaagggtgcggatcttgtcccacacaccggtgtaggtggcggggttggatctcggcgtgcggccgatcgggttctggtcgacgtggatcaccttgcgcacctggtccacgccttccacgcgcctgtggcggccgggtacgatgcgtgcaccgttgagcttgtcggcgagcaccgggtagaggatcgtgttgaccagcgaggatttgccggagccggagacgccggtgaccacggtgagcacgccgagcgggaagctcacgtcgatgttcttgaggttgttctcgcgggcacccacgactttgagcacctgggtcttgtggatcttgcggcgcttggcgggcacggcgatctctcgccggtgggcgatgtagtcgccggtgatggagcgcttggcttcgatgaggtgcttggcggggccggagtagatgacttcgccgccgtgttcgccggcgccggggccgatgtcgaccacccagtcggcgcggcgtatcgtgtcctcgtcgtgttcgacgacgatcagcgtgttgccgagatcgcgcaggtggtgcagggtttcgatgaggcgttcgttgtcgcgctggtgcaggccgatggacggctcgtcgagcacgtacatgacgccgaccaggccggagccgatctgcgtggcgagtcggatgcgctgcgcttctccgccggacagggtggcggccgcgcgcgagagggtcaggtagtcgaggccgacgtcgttcaggaagccgagtcgggccttgatctccttgagcacttcgccggcgatcagctgtgccgagccttcgagtttcaggccgttgatccaggcgagttcgcgtacgacgggcatgtcacatacgtcgaagatggatttgccgtccacggtgacagagagcacctcgggcttcagacgacgtccgtggcagacctggcagggcacttcgcgcatgtacgactcgtagtattcgcgcatggactgcgaatcggtttcgtcgtggcgtcgcatgagcgtgcggatcacgccttcgaaaccggtggagtattcacgcaggcgtccccagcgattgcggtaggagacgttgaccttgaagtcgtggccgtagaggatgtcgtgcttgacgtcgtccggcaggtccttccaaggggtcttcatggagaagcccatttccttggccaagccttcgaggatgtggccgtagtactgggaggtcatcttggtgccgctccacggttcgatgacgccgtcggccagtgacttgtccgggtcggagatgatgaggtccgggtcgatttccagtttgaagccgagaccggtgcaggcggggcaggcaccgtagggggcgttgaaggagaaggtgcgcggctcgacctcatcgagttcgagcgtgtgcccgttcgggcagctgcggtgttcggagaacggctggcggcgggccgggctgccttcctcctcgtccacgaagtcgatgacgatgctgccgttggcgagcttgagggcggtttccaccgaatcagtcaaacgttggcggataccgtccttgaccacgagtcggtcgaccacgacctcgatggtgtgcttcttctgcttggtgagtttgatgtcg

SEQ ID NO: 1204 - DNA, 35794 bp, Unknown
  R81_24m  MAG No. k141_19822
caactgtccggcggcgaacaacagcgtgtatccatcgcccgcgcgattgccaaaaagccgaagctgttgttgtgcgatgagccgaccggtgcgctcgattacgagaccggcaaggaagtgctgcagttgctgcaggatatttgccaaacacaaggcatgaccgtaatgatcatcacgcataattccgcgcttgcaccgatggctcacaaagtgattcgcttccgctccggcaaggtgaccagcgaggaggtcaacgcaacgccgcggcccatcgccgatatcgaatggtaggtgattggcgatgctcactgcaagacactctgtgaaacgccccgtgaaacaagcgaggcgattcgtgaaacaacctgtgaaacattctgtgaaacggcggaacctcgacgatagcggcggtcgaggagcgggcgtttctgcggtatttgccaaagatacgttgcgttgctggctgcgcagctggaagaggttcgtctcgatcgccgtcatcacgctgcttggcgtggccgtgctgaccggcatctacgccggatgccgcgatgcttttctggcggccggtcgtttttacgatcagcagggactgcatgacctgcaggtgctatccacatacggcctgaccgatgatgatgcaacggcactgcgccgaatcgacggtgtgcaaaccgtgcagcccgaacgttctcagacggtgaccacgttggtggacggcaccaagaaaaccgtgaccatgcaggaaatcggtaccgaagggcttgatcagccgtacatacggcagggcaaactgccgaacaaggccggcgaagtggcggttacgcagcaattcctgaacgatagcggactcaagattggcggcaccattactgtgacgccacaagacacctcttcatccgtcatatcggtagcggccacggagactgacgattccaataatgccgatacggtaggtgtcgccgccaatgcctcggcatccgatgcgaagtccgacgccaatacggacgccgacgccgagcaatccccgcagttccccacgaaactcaccatcaccggcgtcgtactcgacccgcgcgacctcaacaatccagacggctattcgggcatgacctccttccggtccacctcatccgaggactatacgttctttgcacccagcgacggcgtgaccggcaatatatacactgcgatatcggttgccgtcactggtgcgtccgattttgacacgttttccgatgcctacgatgaagccatcaaaaccgtggccgaccgtatcgaacatcagatacaggccacacgccagaaagcccgtcgtcaacagatcgtctccagcgcgcagcgcaaactggatgatgccaaagacgaggccaacgagcagctggacgaagcccagaagcagatcgatgacaactgggccgagctggaagccaacaaaacgacattgcaagatagccgtaccgaattggagaacaacaggacaaccattaccgatggcgaacggcagctcgccgatggacgtgcgcagattgcatcggcccgtcaacagatcgcgcaaggtcgccagcagatagccgaagcgcgcacccagctcgaatcgggcaaagcgcagctcacctcggctcgcaaacagctcgatgcggcgcaaacggaactgactgccaatcgcacgaaaatcgaacagggcattacccaaatcgaccaaggcgtggcacaaattgatcagatgctgtccatgattcaacaggccgacaatctactggcgcaacttgacccgaatatcgacttcaactcacccacatggcaggccatcaagcaactgctcgcgcgccttggcattaccctgcctgaagtgccgtcaatcagtgagctgcggcaacagctggccgccaagcaaacggaactgcaaacgcagcgagacagtctgacccagcagaaagccgatttgcagcgcacattaaacgaaaccattgcccccgcacaatccaccttggaccagcagaacgcgcaactgaccgccaaggaacaggaagcggctgcaggagaggcacagctcaataccaaatccgcggaactcgaagcgaatgccgcaaccctcgaaacccagtcggcgcaacttgaagcgcaggccgcccaactggccagcggcaagcagcagctcgaagaaggcgagcggcagctggaagaaggcgaacaacagctcgcggacggcaaggcgaaactggatgatgcgcagtctgaactcgatgcgaagcgaagcgaagcggaaagcgaattcgccaagcagcaacggcgcatcgacgatgtggccaacgcacgttggtatgtgcagacgcgcgcttcgatcgacggattcagctcgctcaaatcagacgtcagttccatcgaatccatcggccgcgcattcccgattgtgttcctgctggtcgccgtgctcatgagcctgaccaccatgacccgcatggtcgaggaagaccgtggacttatcggcacctaccttggactcggctatggcggactcgccgtgtccagccggtatctgctgttcgcgttgctcgcctgcctggtcggcggcggcatcggtctgctggtcggattccttggcatcccggcattcctgctggtggtgattgagggactgtatatattgcccggtgtgcgactcgaatacgactggctgtacggttcggccggcatcgtgctgttcgtggtcggcgtgggcgtggccaccgcgctcgcctgtcgcgaggagatacggcacacgcccgccgcgctgatgcggccgaaggcaccgaaagcgggcgctcgcatattgctggagcggattcgcccggtatggagccggctgaacttcctcggcaaagtcaccgcgcgcaatatcttccgattcaagtcgcgcttgattatgaccgtgggcggcgtggccggttgcacagcgttgattatctgcggatttgcgattaatgacaccgtcgacacgattggcgtcaaacaatacgagcagatctaccagtacgacctgatggtcgtggccaatgacgatgacgccaccgcgatgcgcaagcaggtggcacaagatggccaaaccaccgaaacgctgaatctgcgcgtggatagtggcgagatgagcaatgcggcgcaggaaagcgaaaccgtgcagctgatgaccgtgcccaacgattcgctgaatatcttgaacgatatggtcacgctggaacaagctggcgatgatggatggtttgggctgcccaatatcttcggcaaagcgggtggcggcactgtagcgctggacgatagtggcgtgattgtgtcgcagtccgccgccaactcgctgaatattcatgccggcgacaccgtcacgctgggcaatggcggcagcagccgggccaaggtgcaggtcgcggccgtgacgcgcaatcttattggctctgatgtgtacatcagtgagcgactgtacgaccagaagtttgcggccggcggtgtgacgtcttcggcttcgggagatggcactgcctcgaccttgacgtggaacgcgatgctcgccaagctgaaaggttccgagaccgaacaggccgaatatgcggatcggttgggcgaggaatcgtcggtgctcaaggccgtgagctgtgcgcatctggccgccacgtttaagttcgatttgatgggtgccgtggtggcgctgattgtggggctcgccggcggcctggcgctggtggtgctgtttacgttggccaatacgaacgtgtccgaacgcatccgcgagatggccacactgaaggtgctgggcttctatgaccgcgaggtgcacaactacgtgaaccgcgagatgatgatattgaccggtatgggtgtggtggttggtctgccgcttggcaggtggataggcggattactgactgctgcgttgaatatgccgtcgctgtatttcgaagtggaagtgcactggtacagctatgcgattgccgtggtggcgacgctggcgttcgcgctgctggtgcagctgttcaccaacccagtgctcgatcgcgtagacccggtcagctcgctcaagtccgtggaatagaggtagaagttcaatttggtgttggtgaattgaactttttggcggaatatttacagcatcatcgcatgtattcttgagctgagcgttttcgtgacatatttcggtgatacagtctgaacttgttttgaacgagtatcgcgtccggtgcgtaacaatcgggcggcggagaagagaaatgaaatcagtatggccgatacgaatgtgaatggtggtacacggcaggctacgggcaaactcaagtctgtcgaaagcctggaccggaccaacgagatggagcgcggcctgaacaaccgccacgtgcagttcatcgccatcggcggcaccatcggcaccggattgttcctggggtccggcaagtcgctggtgctgaccggcccctcgatcgtcttcgtgtatatcctggtcggcgtcatcatgttcttcctgatgcgcgccatcggcgagatgatgtaccgcgaccccagccagcacaccttcatcaatttcatcacccgctacctgggcaacggatgggggcatttcgccggctggacgtattgggccgcgctcgtgctgttgggcatgaccgagatcacggccgtctccacgtacttcatcaccttcttcgacacgttcggcatcgacctgacccattggaaatggctgatcgagctgtgtttcctggtgtcgctggtgtccgtcaacctgatcgccgtcaaggtgttcggcgaggtggaattctggttctcgatgatcaagatcacgctgatcggcgcgatgatcgtcaccgccgtggtcatgatcgtgatcggctaccattacccggccgcgcggattcatggcgtggatcatgtgagcccggcgggccacgccggactcgacaacctgttcgccggcttctcgttcgccccgaacggctggatggccttcctcatgagcttccagatggtgttcttcgcctatgagctgctcgagttcgtgggcgtcaccgtctccgagaccaagaatcctcgtgaggtgctgcccaaagccgtcaacgagatcatcgtgcgcgtgctcatcttctacgtgggcgcgctcgtggccatcatgtgcatcgtgccgtggacctcgttcaagccgaacgaggacggctccttcgcctccccgttcatcatggtgttccagtatgccgggttgaactgggcgtccgccctggtgttcttcgtggtgatcaccgccgcgtcctcgtcgctcaattcgctgttgtattccgccggccgccacctgtaccagctgtccgaggtgtcgccgaacccgatgctgaacaagctcggcaaggtgtccgatcgcaaggtgccggcccgcgccatcctggtgtccgcggcgctgatactgctgtcgccgatcgtcaacgccatccccggcatctcgggggcgtttgtgctgttctcgtccgccagctccgcggtgttcctgttcatctacatcctgacgctgctggcgcatcgcaggtatcgccgttccgccgatttcatcgcggacgggttcgtcatgcccgcgtggaaggtgctcaatacggtggcaatcgtgttcttcgtgttcatctacctgacgttgttccttgcggacgatacgcgcaattccgcgattgccggcctggtgtggcttgtgggcttcggtggattctctatgctgcgcgaacgctaccgtagccgcgatttgaaggccgcactggaacacaaggagtgattggacgggctgattggctggcggctattagttgggtggctgttggctgttggcggctgactggctagcggccgatagccaatgactgggctgatcgtcagccaatcggctgccaataggtctcattgatacattcggtcatccgattagtgcatttgcgcggacaattagtgcattcgatcatcggattagtacatcagtgtgcaattattagtacaattagccgcctaattagtgcattaggacataaaacaatgtcctaatgtactaattagatgctaaaatacgataagtgccatgtcctaatgtatgaattatcgctatgaagggcggaatgcgatgacgcaggatgaacttatgcaagtgctgcaggccggtgaatcatctatggtcgagttcaagcgctgcagcgaattgcctcatacggatacttttgagactgtatgctcattcgccaatcgttctggtggcagcatttatcttggcgttgacgatgacggtcaagtgctcggcgtcgattctaagcgcgttagtgagatagagcgcaacgttgtcaacgtagtgtctaatcgtaagatgttcgaaccggctccaatggtggaaacggaacatatcgagtacgacgaacggattattgttcgtatttgggtagctccgagttcttcggttgtgcggttcaagggcgcagtgtttgatcgcattgctgatgtggatacacacatcgaaagcgatatccagattagtcaaatgtatattcgcaagcagaactactattccgaacggcgaattttccgttacgtgactccgtttgatttgcatcctgagctgattgcgcgaatgcggcagctggcggtcgctcagcgagctgggcacccttggggaactatgtctgacgaagaactgttccgcagcgccaagctatacgatcgtgattacacgaccggcgaagagggctttaatcttgctgcagtgctgctcttgggcaagaatgaagtcatttcctcggtttgcccagcgtatattactgatgccgtggttcggcgagacaatattgaccgatacgatgaccgacttatggtgcggaccaacttgttcgattcgtacgagcaactccgtgaatttactgagcggaatctgcctgaccgctttgtgttaaagggcgataagcgagtgagcccgcgtacgatgatcgcccgtgaattggtggcaaacagcctcatgcatcgggagtattccagtccggtggtggcgcgtgtcaccattgataatgaatccatccggacggttaatgcttcgcgctcattctttgaaggtcgaatgaagctgggcgagttcacgccaatgccaaagaatccgattatcgctaatgtgtttgtgcagaccggcatagccgagcagctgggtagcggactgcggaatctgataagagcgtcccggcaatatactgagcgagagcctgagttccgcgatggtgacatattcgaggcgacgattcctattgttcctgcgctgaagaccgtggatggttctggttttgctagcgtgagatctgtagttgagaaagatgccgaagagggtgcgaggctcattggcggggaacgtgtggatggtaagaaagcagatgcaaccgcatcgggtgaaattgattcgcgggcagcgatgctgtcggcgatgaatcgacgcttgacagaggttgactatgtgactgtacctgaactcgccaagataacagagctcgataacagaacagtccgcaaattcctaaacggtttagttgcgcaaggaaagctgattgctgaaggcaacacgcgtggtcggcgttatcggaagggatagcgggcgcgatatctcgatgcagtgggattcacttaagggctacggcaaatatgattcgtagcgattgggccagcgcaattcgaatggctcatgactttgtgcgtcgtttgtggtctctgaagttgtttgctgggtgacggttttgtgataaaatcgctcatatcaaaatgtttgcgtaaacattttggctgcgccgaaagaaggagtcgacgtaggtcatgtatcaggcaaagaggccggcgcagtgaagcaaaggccgatttttccggtataaggcggatagcaggaacactaaggagaccaatgaaggtactgagcaaatcgcttgctgcaatggttgcggcggcaacactagtgggaggaggggcgtttgcggttgccggcactgcgtatgcggctgataacgatgccattaccgtgaccccgaatccgtggtatgccaacagtttcgatggctggggcacctcgctggcttggttcgccaacgccaccggcagcctcggcgaggaatcggccatcaccaccaatctcggcgatgacgcttccaaggctaaggctgtggaatacggcaaacagctgcgcgaacagttctaccagtccatcttcggtgatgaaggactggacctgaacatggcccgctacaacgtgggcggcggcaatgcctccgatgttgcctacggctacccattcatgcgccaaggcgctgccgtgcctggcacgtggaaagatgacgccaccggctccggcacgtatggcaatggcgtaaccaccaagcaggccgacaaagacaagctggctgcggcattcgacccgactgacgacaaccagtatgacttctccaagtccgccgcccaagactggtggattgagcgcggtgccaccggcgataaccctgacatcaccgacgtagaggccttcgccaactccgctccgtggttcctgaccaacagcggttacgccactggtggacgcaactccggtagcaataatcttgcaaaccctgagaaattcgctcagtacatggccaagaacgtcgagcacctcgaaagccttggcgcaaacgttgacacggtcgagccgttcaacgagtccgagaccagttactggggcactccgggcgacatggcttcgaagtacaccgatgagagcgatgacaacaccaagctcattaacaactactgggataagtactactccgacaaagataagtccgtcaccccatactccaacgcgctgaagaagccgcaggagggtatgcatgtcagcaacgcccagcagcagcagacgattaccgcactcgctgaggcgttcaaggacaatgatgacaccatcatcgcagccaccgatgccacgaactccgccgacttcgtcaagtcgtacaaccagtacccgcaggcgatcaaggaccttatcggccagtacaacgttcacgcctactccgacagcaaccagatgcagtcgcgcgatatcgctcaggcagacggcaagaagctgtcgatgagcgaggtggacggctcctggcagtctggctcctacaacccgtacggtttcgacaacgcgctgggcatgatgagcaagatcagctccaacgtcacccgcctgcagtccaaggacttcaccttctggcaggtggtcgaggacctctacaacatgcagatgggctcgaatgtgaatccggccggtgagaacaccaactggggcaccgtgctcatcgacttcgactgcaccgtggctggcatggacggcaagctctactccgagcgccgcgtgaacaacaacggcggtaccaccgatggacttgaaccgtgcacggttattgcaaacgccaagtacaacggcgtcaaggccatcacccacttcatccacgcgggcgacaaggtcatcgccaacaacgatgaagacaacaacatgactgccacctccgacgatggcaagacacagaccgtcatccaccgcaactccggcacctctgaccagaccttcgtcatcgacctgtcgaagtacggcgagattgccgacaacgcttacggtgagctctacctgaccaccgaaacctctgccgaagacaagaacgcgggtgtcgattccgccactccggaagtcttcgccaagaccagcaacgtcaagcaagctgaaggctctgtgatgattgacaaggctgccaagaccgctacggtcactgtgcccgcccgttctatcgcctccatccagctcactggcgtgaccggctacgctaaggatgctgccgtcgagaccggcgacacttaccagctcgttggtaagcagtccggcaaggccgtggctgataccacttctggtgattccgcgctgtccctggccaacgtcgcttccgatgccgagaacgccaagaagcagacttggacctttacccagatcgagcagcccgccgactccgagcgccctgatctcaaggcttatgtgattactaacgccgaaggcaaggtgctggtgtccaaggatggcacgaacgcgctttccaacgaaacggttgaggccgctaagtccgacccggctgccaagtggattctcaacacttccgatggttcgacctaccagctgctcaatgccgcgactaagacgaacctcgatgtggataactctggtaccacagtcggcacgaaggttggcttgtggcagtcaccgagcggcacttcgccgtccgccaaccagacatggactctacgcaatgtaacgccgaccagccagaagaccgtgaacgtgcagaccgccgttaacgagaaggccgcgctgccgaccgaagtcacgctctactacacctggggcgaaggcaaggccacggttgccaactgggatacttccaaggtcgatgtggccaaggaaggcacctacgaagccaccgctaccgccaccgatgtgtacggcaacgagttcaatgtcgccgctacggtctacgttggcgcgctcaccgtttccgatccggtatcggctacagtgctggccggcaccagtgcgagcgaggcgaaggccgcgcttgaggctgcgccggtgtatctgcacgtcaaggcatcgcctgcattcgagggcgatgcggctaaggttacgtggaacttcgatgggcttgataccaagctcgccgatgccaaggctggcgacaacattgccgtgaccggtacttaccagctggacgacgcgaccacgattgcgctgaagggcgcgatctatgtcaccgccgccacgcctgagaatgtggccgacactgcttccagcctgaccgtgaccaaccagcagacggaatacagcaagggcgatcagtggaagaagctcaccgatggtgacacgtcagctgaagcctgggtgacgtggaactctgctggtgactattccgccagcccgaccgccacgattgacttcggctctgagtgtgagcttagcagcgtgaccattacgtatggtgacaaggctccggcttccgccaaggccgagtacaccactgatggcgagacgtggatgcaattcggtagcgatgttaagcctgccgcaggccagacggtgacgttcaaggccgataagggcacagtgaatgccacgaaggtgcgcattgtgaacaccgtgaacaacgactacatgaatgccaccgaaattcaggcattcgtgacgccggttcagggtgctgcgaagaacatcgccgcggcctctggcacgaacttctcggtgaacttccaggagggtgcctccgcttccaaggccatcgatggtgacactacgtcaaagggttggtccacttgggcttccaccgcctcgacggtggacccggtcgccacgttcaccttcgacgaagctcagaccatcaccgaagtgaagaccttcttctactacgatggtcgtgcgtcttggccgaagagccagacgctggaataccaggatgaggctggcgaatggtatggagtcggtaccaaggatggctggaagatacaggccggcgatgccggctctggctccgacggcatcaccgccgccgacaccccgaccgttgacttcgtgctcggcaccccggtaaaggccaaggccatccgcctgactaacacattgcaggacaccaaggtgtacatcaacgtggctgagatccaggtgttcgcacaagacagcacggtactcaccccgcagccagcatccgatgccacgctgggcgacctgcgtcttgacggcgaaaccgttgaaggcttcgacccggccaagaccgactacacggttgatctgccggtcgacgccgaggcaaacccggtgctgcaggccttcgccaccgacaatgccgccgccgtcaaggtgactggcgacgcggttgagaacggcaagcttggcggcaaggccgccattacggtgacctcagccgacgagtctgagacgaagacctacacggtgaccttcaacgccttcactttggcttcgctcaaggtgatcggacccacgaagaccgagtacgccatcggcgacaagctcgataccgccggtctgaaggtgactgccgtctaccagagtggcgacaagaccaaggaagtgccggtcgctcttgacgacccgcagcttgcgattggctcgttcgactccaccaccgcaggcaagaaggcgattaccgtctcctaccgtggtgtgaccgcgaccttcaacgtcacggtcaaggccaacgcagtcgcccctggccctgaagaacagaagcccggcaacaccaacaagcccggtgccaccggcaacggcaacaagaacacggtggccaacaccggttccagtgttgccgccatcgctggcgctgtcgctctgctggccgctgccgcgggtgcactgttcatgctgcgcaagcgtgcatagcaccctcgcgcagtaatgggtgaaggaacaagccggcaatattgactattgccggccggttcctccgctctttgaccataattggtccgacaagttgaatactgagttttcagtatcggtatattgatttgtcgaaccttttctggcttcgcggatagcgacataactgtttgttcaaaaaaccgttatcatcaatcaaggaaccaaatcaatgaagataaacaataagggcaagggcgctcttatcgcggcaattaccgccgcggcaacgctattgtcatgcgggctggccgctgcaagtgccagtgcggcaggtgtggattacctgcctaccatcggccaagtgccgacatacaccaagttccagcccacagccgatccgggcaagaacgctagcgattacttccagccatattggtatgccaagaacgccaatgataatggcggcacacacatccaagcgcacggtggccaagtggtcaaggttggcgacgcctactactggtatggcgaagaccgttctaacggttacgacaacagccccggtgttcatgcttatatgtcgacagatctatacaactggaccgatcttggtgtggcgctgcgtgcggtgaccagcaaatctcagttgacggataagagcaatgccgattacgcctacttcgacaaggcctacaacctgaccaagtccgacggcagtgtggacgctgccaaggccgacgcaatcttcccgtacctcaacaccaaccccgatcaggatggtgatggcgcggttgattccgtacagggcattttcgagcgtccgaagatcatctacaacaagaagaacaagcaatacgtgctgtggtggcattccgatggaagcaccacgccgggcggttccaactatgcacgtgcacttgcgggcgtggctgtttccgacaatccggcgggcccgttcactatggtgggtgcctatcgtttgcctaaccagaacaattggaaagaagccgcaggtaaccccagctggggtgagaacggtgacagccgcgatatgactgtgttcgtggacccgaaggacgacagtgcctatgtactgtattcttccgaagccaatgccacgctgtacatcgccaagctcaacgatgattacaccaatgtagtcaagaccacgaatgtggaccagtccgagggacaaaagcagtactctgctgacgggcagtacccatacattcttgcagacgctactacggatgccccggtgcgtggcgaagatttccaaatcgtcaaacaaaatggttcgctggaagctcctgccgtattccaatatgacgggcgttacaacatcatcgcatctggtgcaaccggctgggccccgaacaagcagacctactacaccgccgactccatgctgggaagctggacccgtggcgtggaaaaggacgatatcaacgagaacacgtggtacaacaacatgccggaaggcgcggatggtctgttgtccgtgggcgatacccgcggcaccacattcggttcgcagtcggctagtgtgctcgcagtagaccaggagaaaggtcacttcatctaccttggtgaccgttgggattccggtaaagccgattccacctatgtttggctgccgctgaccatcggtgagaacggcaccatcgaaatgcacaatcctgctcaagaaggcgagcccgacggttgggatctgagctattggggcaaccatggtagcgccaagggcaagctggtcaactggactgtggaaaccggcgatgatctcccgaagaccgtgaacacgggcggaaccgttactctgccggacaccgtcaacgtcaaggaaggcgacgataccattgctaccaaggtgacatggaatgtggaaggcggtacggcagtcagcaagtcgaccaaggctgctggtaacacctacgcattcaatgtgccgggaacctacaccattacgggcactcttgccgagagcagtaacttcaatccgggccgtacattccgtagaaccatcgatgtttcctgctccaacccgatttccggaagttggaaggaagctcattggaagggcggcagcgcgtgccaggtttctgcgtccggcggtgcttatgacttcacgattacggacaacgccaatcggggcgtctggacggatcgcaacgagggcagtgcggtgtaccagcctgatgccctggacgtgaacgaaacgctggaaaccacggtcaagccgctcgacttgggcggtaatggcgatccgcgcgccggtctggtggtccgtaacggtcttactggcgctaacggcggcaagggatatgccacgttacttgccagcccaagcggcgtttacatgcagtacgattccaatgccgatggctacatcgataaggaaacatcgcatgttggtaccggcttcggcgaccaagtgcagctcaagctggagcgcacctcaaccgatactctgaaaggctactggcgtgcttccgcgaacgatgaatggcaggatgtcgctacggtaacgctgaccggtgcggacgtaaccgggctcgatgccggtgctttcgccacgtcgaacagcaatgccggcgcattcaccgtggccttcaacggcactgcgttcggttcgcagactgctgctgtggagtccatcgcagccaagggccctgaagccactatcgccaagaggcagacgctcgcgcataaggacgtgacggttaccgctacgctcaccaatggcaagacgcgtgtactggagccagatgaatacacgttggaaggcttcgacaccaccaaattgggcgagcaaaccgtgacggtacgccttgtcactgattcttcagtaactgccacgctcaccgtgactgtggaaagcaaccttgcccggttgttctgctcgtccgccgcagcctcgaagtatgagccggccagcagctgggcctccgcttctacggccgacctgacttgcgacaacaatctgagcaccaactggtcgaactggggcaccggcgacacctcgccatggctcagctacaccttcgataaggcatatcagctgggcaagctcagcgttgcggtggataaggccaagggcgaggccgctccgaagagcttcactgtatcgtacctagctgaagacaacgccacgtggactgatgccacgctgccggcagtcactgtgaatggtgctgctggagccgtgacggaagccgatgtgagcgctctgcccgccaccaagggcattcgcctcaacttcacctacgccgatggcaatgactatgccaagatcgctgaagtacgcatcgccgaaggtgaagcaacgccaaagccgcagccgtctagtaacgccaatcttgctgatctgactgtggatggcaagacggttgacggattctccgcggatatcaccgaatatgccggtgcgctggccggagacgctgcttcttacccgacggtggaggcgactgctgctgacgcgaaggctacggtgcaggtggagcaggcttcgaccgagaacagcggcgtggccacggtgactgtaactgctgaggatggcacggcggaaacctacacagtgacattcggcgaactgcctcagttggccgagcttgctgtggaagtgaccaaggattcctatcaggtaggcgataagttcaacgctgccgatgtgaaggtatccgccatttacaaagtcggcgataccgaaacgctgcgcaagctgattgatccaactgatggtgatctgaagttcactggctttgattctgccaccgcaggcacgaagaccatcaccgtctcttatcgtggcgtgaacgcgacgttcgaagtcacggtcacggccacggaggtcactcccggccctggagagcagaagcccggcgataccaacaatcctggcaacactgctaagcccggtaacactgccacgaataagccggctgctaatggcgctgcgcccctttcgaatacgggtgttgccgtggctgccattgcggtcgtggttgtggtgctgacagctgcggctggtgccttgctcgtcatccgcaaacgccgcgcataaccatggcaactgctgagtggcgtggattgcgttgctattgagcaatctgcgattcacgccactcagcgagtgcacccgagtgcgcccgagcttgcgcaatgcaggcgcaatacagtgcaaacagtacaaagcaacaataatggccggtctgagccagctgctccatgcgagggcagctggctcagaccggccattgtgtctgcaagtacatgcaattagagcatgaacatgtggaagccgttgagcgttactggttgttttgctttgttgttgcgctcagcagtgcgacggacgtccgtccgcagtgtagtgcagcgctccgtgaaccagcgccgatgtgaaatgcatgttgcacatgcccgcttcttctgcttcgtgcgtgcagccggcgatgctgcataggttcataccccgaatcatggtcataccccctctttgggatggcatccgtgccgccatctgccttcagagcatagcggacaattgttgcattgcctaggcggtacaacgctttctgtggcctgtatcacatccttgccggcgttctgcggcgtggttgggcgtgtacatgtgctcttgtgtggttttgttgtgtgtgatttgggtatacggatagagtttcttctctgcagtggcaagggcctctcggccggcgagccggctgatttctcccatgcgttgctcaatgatttccgttttgcgagtctgaacggcaaaatagctctggagaagtgccacttcttctttctttggatcaccgttttgagcaatgagatagcaggcgtatcgggtgagcttgacgtccgcgatggagcgggtggcaccgctgccgagagtcacgtctcgcgtagtgtcacggaaatgggattcaacggatacgccggaattgtcgcaagcttgcttggctcgtgtaatagctttgctgaagttttcccatctgtcgtaccccatataggtcattagctcgcgtgcataccaatactcaactttggagtcctcggtggtgtgtgcgatagtgctgagttcgctggttttgcgtgtgatttcgtcgcggttcatgggtgtgtccttatgtttttcatgaccattttcgtgactccacgaaaatggtcaaagccaataattgcaatggttttgaggtatgggcgcgctccgcccaactggtctgtcttcgtccgccttttcgaccagatacctcatggagcacaatgccaacgtcgctaccgttggcccagcaaatattcttagacgacgccccgaagtgaatatctatgcggctttcagaatatcaaagagcgtggagtgtgtgcattatgcgttccaaaaatagtttctagtaatgaattgtttacggtgtgagatattcttggggtgtttgcggcgctctgccgtgtggcgaatgggaatggatggtgctcttatgggatttgagcaggaagcagttagtgaactgtatgccagcgtgtggggcaatcgttcgacgatgcagagggaattcactcgtggagcccatggtgagcagttcgtgctccgggagctgtccatgaaggggacgcaaacgccatcgcaattggcatcggcgctgcaggccagttccggccgcatctccactgtgctgtcgtctctggagaaaaaaggctgggtcacgcgtgacattgattccaaggatcggcgcattattcgcgtgaatctcactgattccgggcgcgagcagtctcatcggatgatagaggaaatgcgttccgcaatttgctggattttctcgcaaatgggggagcggcgcacgcgcgaattcgttgacctggtgtctgagttcaccacatatatgtcgatttgccatccggggcggcctcggccgacggctgaacaagtgcgtgaggcattcgtggagcgggacaagcgcgtggctgaacacatggcagctaagcgcgcggaggctgagcgagactagcttcctcccgctggcgggtctctccctccgtcactgctgcgcggtgacacctccctcgtcagaggggggtaaaggtaattgaggacgctcacagcgaacatacagaagtgcgtataatatctcacagtgtaagtaatcaaacaatggaaactattaagacatcgtgaaccgataatcaccgataacccagccaacttaagaaccaatcgccaataaccaataaccaacccaaccaacacaaggggaaaccaatgtttcgcatcatgaaatacctctccaaagcggagatcggtcagatgctcatcgccctggtgaccatcgtcgggcaggtctacttcgacctgaaactgcccgactatatgtcagacatcaccacgctggtcgagacgccgggcagcgacatgaaggacatctggatcgcgggcggcaagatgctgctcatctcgctcggatccgtggcgtgtgccatcatcaccggctacatcgctgcgcgcgtggccgcctcgttcacccagcgtctgcgctcgctcgaattccgcaaggtcgagtccttcggcccggccgagatgagcaagttctccaccgccagcctcatcacccgttccaccaacgacgtcacgcaggtgcagatgttcatcaccatgggcctgcagctcatcgtcaagtcgccgatcatggccgtatgggccgtgtgcaagatcgccggcgaaggcttcgaatggacgctcgccaccggcatcgccgtggcggtcctgctggtgtccatcaccgtcatgatggccatggtcatgccgaagttcaaggtcatgcagaccctgaccgacaacatcaacctcgtggcccgcgagaacctcaccggcctgcgcgtggtgcgcgcctacactgccgaggactaccaggaagccaaagtcaccaaggccaccaaggacctcaccgagacccagctgttcaccaaccgcgtcatggcgttcatgatgccgttgatgaacaccgtcctgaacggtctgatgctcgccgtctactggatcggcgcttacctcatcgacgccgccgggctcaaggacaagctcaccgtgttctccaacatggtcgtgttctccaactactccgtgcaggtcatcatgagcttcctgctcatgagcatggtgttcgtgctctggccgcgcgccgacgtgtccgcgcagcgcatcatggaggtgctcgacactgagccaatcgtcgagaacggcaccaaaaccgccgccgacgtggccaaaaccggccagaggggcaccgtggaattccgcaacgtcagcttcacctacccggattcgcgcgaggcgatgctggaaggcatcaacttcaccgccgagcagggccagacggtggcgttcatcggctccaccggctccggcaagtcgtctcttatcaatctcgtgccgcgcttctatgacaccagccaaggccaggtgttggtcgacggcgtggacgtgcgcgactacgacctgaaggccctgcgcgacaagatcggctacgtgccgcagcagtccgtgctgttcaagggcaccgtggcctccaacgtgagctacggcgatcagccgggcgacccggcggaggtcgagatggccgatacctccaccccggccgggcgcaagcgcgaggccgcgttgatcgccgctggcgaggccgcggaaggtgccgatataccggccgagcagctgaatcgcgtcaaggccgccgccgacgtggcgcaggccagcgagttcgtggcgcgcatggacggcgggtattccgccgcgatcgcccaaggcggatcgaacgtgtccggcggccagaagcagcgcctgtcgattgcgcgcgcggtgtaccgtcacccggaaatcctgattttcgacgactcgttctccgcgctcgacttcaagaccgaccgcgaagtgcgcgacgcgctcgcccgcgaggccaaggattccaccaagctcatcgtggcccagcgcatcggcaccatcatgaacgccgaccgcatcgtcgtgctcgacgacggcaaggtcgtgggtcagggcacgcacaaggaactgctcgacaactgcgacgtataccgccagatcgccgaatcccagctcagccagtcggagcttacggcgtagggggggggcggcagcggtagctccccatgtcaggggctgttcccaggcgaagacgagctgataagcgagcgaataaaacagcacagctgactgaggggtagtcgcgtacggcttctctccctccggcgcttcgcgccacctccctcatcagagggaggtcaatacggacttttaaggagtaaaacaaatgccaagaggaccaatgggcggcaggcgtgccgtcgaaaagccccatgatttcggcaaagtcatgggcaaactcgtgaactactgccgcaactatcttcccgtcatcatcatcgcgctcatcctgggcgcggccggcaccgtctgccagatcgtcggcccggacaagctcaaggacatgaccaacgagatcgtcaaaggtctgcccgccatcgtcaacggcagaccggtgatgaactcggtagatttcggcacggtgggccacatcgcctggactttggtggccctgtacgtgggctacgccgtgctcggctacgtgcaaagctggatgatggccaacgtcacccagcgcaccgcccagcgactgcgcgagtccatctcggtcaaaatcaacaaactgccgctcaaatacttcgacaaggttagctacggcgacgtgctgtcgcgcatcaccaacgatgtggacgccatcggccagacgctgggccagtcgctcggctcgctgattacctcggtgacgctgttcgtgggcgcgctggtgatgatgttctacaacaacgtgatcatgaccctgtgcgccatcggtgccagcctcatcggcctgatcatcatgatggccatcatgaagtcctcccagaagtacttcgcccggcagcagatggcgctgggtgatgtcaacggccacgtggaggagatgtacgccggtcacctcatcgtcaaggcatacaacggcgaggccgattcgattcgtcgcttcgagaagtacaactcggacctctacgagtccggctggaagtcgcagttcctctccggcctgatgatgccgctcatgaatttcgtgggcaacttcggctacgtggtggtgtgcgtggtgggcgcggcgctcgcgctcgacgggcagatcgagttcggcgtgatcgtggcgttcatgatgtatgtccgcctgttcacccagccgttggcgcagttcgcccaggccttccagaacctgcagcgttgcgcggcggccgccgaacgcgtgttcggcttccttgaggagccggagatggaggacgaatccggcaagtccgctttgcttgggaccaacggtcacgaagtgaagggcgacgtggaattcagccacgtacagttcggttacgaaccgggcaagccgatcatccacgacttctccgcctccgtcaaggccgggcagaaggtcgccatcgtcggcccgaccggtgccggcaagaccaccatggtcaacctgctcatgcgcttctatgagatttccggcggctcgattgcgattgacggcgtggacaccaagtccgtgccgcgctggaacgtgcacgaccagttctccatggtgctgcaggatacgtgggtgttccgcggcactgtgcgcgagaacatcgcctactccaagcccggcgtgaccaacaagcagatcgaggatgcgtgcaaggccgtgggcctcgaccacttcatccgctcgctgccggacggctatgacaccgtgctcgacgacaagtcgtcgctctcccagggccagaagcagctgctgaccatcgcccgtgcgatggtgcaggacgcgccgattctgattctcgacgaggccacctcctcggtcgatacccgcaccgaagagctgatccagaaggccatggacgcgctgaccgtggggcgtacgagctttgtgatcgcgcaccgcctctccacgattcgcgacgccgacatgattctcgtcatgaaccacggcgacgtgatcgagcgcggcacgcacgacgagctgctggcggcgggcggtttttacgccgacctctacaacagccagttcgcactcgctgactgacggattgtttcctgcgttagcggattagcggattagctatactcggctcccctctccgaggggagctgtcagcgtagctgactgaggggagcaacccatcggtccacccgagggatgtgatactgatgatttcgtacattagtgtgtgaaaaagccgccgggaaaattgggggattgggcggcggtgcggttggcgttgagaatggcgcattcgaaggggaagtgagcgcgcagctgggtggccggggtggtgaacagggcggtggcgaggccgtcggccagtgtgacagggacgtgtgccgcaacggtgttcgacgaatcgtcggtatcgcggtttgccgttgtcgaggcattgctgccatgcgtcgatgtcttcgtggttatggcgctcgatggcggcgtgacggccacccatgtggcggctacatcgtcaaccggtagtccgtcgatggcgttgagcagatggtgaagttggtgacctgcggcgtcagaccagtggcggcggctgggggagctcgcgcagaatgcgccgtggctgatttcgaccgtacctacggcgttggccggatcggcaggatcttcaagggcgatggtgattggttcgtccgtgtgcactagcaaatcacccccggcgtcgatgacgtattgaatgggttgagggtgacccgcgccatcacccaacatccccgcaagcaaatccaccaaataccccttaccgcacgcgccgaaatcgagcgcgaccggtccgcgcgtcaccagtgttgtgccatgccgctcaacgtcggctgaccaaatggctcgtccgtggatcgcgcctgcatgttcagcggcatctggcgcaggcgtaaacgaatacgactcgtcatagccaagccgaatcaaatcctcgcccacgcatgggtcgatggtcccattagtcgacgcaaacagctggtcgtgcaggccaaataaacccaatgcccagtcaggaaaatcgaacgtgccgccatgcgtggccgtgcgcatccggccgaccgtcgaatcatccttgaaccgggacaatgcggcttcataggtgctgatgaacatatcgatgcagttactgagcccgtcgtccagcgcgacatcggtatgcagcagcaacccggtgcccagcgcttcggggaaagcggcgacgtgcggtagtcgttcggccagaccagtcatggctctcatcgtagagcctgcggatggctgaggggaaggcggctcggggtgtggattgtggtgtgcggttttgccctgcagggaattgagtgtaaaaccccggtgtatactggtttttgacactgtgtcaatgttgattcggaggttatggggaatgggcaatacgactacagcaagtgtaacgggcgcgcaagttgcaccggcgaaatcagccatcaaagatctccccatcgccaaagtgtgggcgtttgcggtcggccagttcgggtgggcgctgctttccggcatcatctccaactggctcgtgtatttctaccaacctgaccaggagaccatctcccaaggtcagaccgtattcgtgccgcagggcctggtcgttctcggcatcgtgaccgtggtgggcggcatcaccgccttcgcccgattcttcgacgcgttcgtggacccggccgtggcgtccctctccgaccgttgcgacgccaaatccggccgccgtatgccgttcctgaaattcgccgccctgccgctcgcggtggtcaccgtactcgtgttctggagtccgatcaacggcaccggctgggtgaacgcggcgttcctgttcgtcaccgtgatcggctactacatcgtcctcacgttctactgcacgccgtacaacgcgctcatcgccgaactcggccacgactccaagcagcaactcaccatctccaccgccatctccttcacttgggtggccggcacggccatcgcgtacgtggcgccggtgatttggggcgcgttcgtgccgatgatgggccgtatcaccgccatccgcgtgaccttcaccatcatggccgccgtggcgttcgtgtgcatgctggtgccgccgctggccatccgcgagaaggactacgtcaactcccagcccacctccgaatcggccatcgaatccctgaagcagacgttcggcgacggcgaattccgcaagttcgtgtgttccgacgtggtctactgggtggccatcaccaccttccagaccggtctgccgttcttcgtgaccagcctgctcaagctgccggaaaccaccacgaccatctacttcgtgctcatgaccggcgtctccgtgctgttctatctgccggtcaatatcttggccaataaggtcggcaagaagcgcctgctgctggttgccttcgtgatcttcacctgtgcgttcgcatttgccggcgcccttggttcggccgcgctcggcttcattccggcgatggcccagggtttggcgctctcggtggtcggcgcgattccgatggccgcgttcggcattctgccgcaagccatcgtggcgaatatcgccgacgccagctccaagaccaccggccaggaccgtcagggcatgttctacgcggcccgcacctttgcgatgaagatggggcagtccgtggccatgctgctgttcaccggcgtctccaccatcggcatggcgtccggcgcgggctatcgcatcgccgccgtgtgcgcggccgtgctgtgcggcttgggcggcatcgtattcgcgttctacaacgagaagaaggtgttgagcgtgttggaagcgtgattggggctgccgaagcttgattagcgggtatgcctactccgcctgctcgcccggctcctgctctgttgcgtcctgctgcaagatatccagcgttcgctcgtgcagtagctccttatggttgctgtcatgctgcaggaaatgcgcgtataggatgtccaggtaaatgagaatcggaaattgcggagagatgaccttgcccgcttcgatgttctcccgaagcgccagcagcaccacctcatcgcagtattcatgctgttctggagatttatgggaagtcatcagtactgtccttgctccggactccttggctttgcgcagtgccttgatcaccgccggtgtcttaccgctgatgctgatggcaatcaccaaacaggtgtcatccaacaggacggaattcatcatcatcacatcgctatcggtgatggcggtgatgatactgccgatacgcatgaaccgcagttgcatctcctgcgcggcaaggccggagctgcctcgcccatacacgtagatgcgctgataggtggacagcatgtcgctgagtgcgttgatctggcgctcgttgaccagcgcatagcttttgtccaacagttcctgataagagctgagcgcctgcatcgaccactggtcaggcactgtctgtgcagtgtcctcgcgcagatcttccttgtatttatagatgaattcgcgatacccggcaaatccgatcttcttggcgaaacgggagagcgacgccagggatacgtgcagaatatccgcgatattgggtgccccgaaatccatacgtcggcggttatggatgaagaagtccgcaacgactttctccgtaggcgacagtgtggcgtatacggcttcgatctgcggaatgacgtccttgtcaaaatgagccatgtttccgactttcttgcatgtaccggaaatgatagtacgcaccaagcataccagcgcggttccggtgatgtgcaaaacgaaggcttgtggctcgggccactggtttgcgtaggttatcgtcgagggcgcgcctgatgggaccgcccaaatagtcactttgggccatgatgccgccgccgaggatcacgacctcggggttaagcacatagcagatgttggctatgcccatgcccagataggtggtcatggtgttgatggcttcggcgcagtcggtgtctccctgctgggcaagttcgaatattcgtttgccggacagatcttcggcctgcatattcttgcgcgtggccaccctgcgcacgagggcggtggttgaggccaggtcttggaagtccccgcccggcaggtgaatgtagccgacttcgcaggcgctgccgcccgcgccgtgcagtacgcgcccgtgatcgatgtacgagcctccgataccggtaccaacggtcaggcacagcgctgttttggcgcctcgcgcattgccggcatgatattcggcgagacccgcacaattcacgtcgttttcgacttcgcagggcaggccggtctgctgttcgatcatcgatttcaatggggtcccggtgtagcgcggaatgagttcgctggagtaagcgatgctccccgtggcgcagtcgaccatgcccgctgtggatacgcagatgccgtataatggcgccgttgcagcatgggagaggtcctcgatgagccccaatacggtgattacgatgtgcggaccgccttgatccgcatgggtgggggtggaatcatgccgtacgaattgctgcgaagcgtcgtcgtagattccatatttgatggatgtcccgccgatgtcgatgcagatatagtgcgtcatgatttcacccctttccctctgattgcacagcttacagtgccgcgattgcctcgcggatacgggccgcagcctgctgggcgatgggcaggtcgtcttcggtaaggttctccagcggcttgcgcacgccgccgatgttcacgttttcgttgatgcgcagtacctccttcatcactgcgtacaggttcgcgtggccgctcgccatcagtgcgatgatgtcgttgacttggtactggatttcgcgtgcgcgctcaatctcgcccttgctcaccagctcgttgatcttgagaatcagctccggcataacggcgtaggtgccgccgataccgccatcggcacccatggcacggccgctgaccagctgctcgtcgggaccgttgaacacgatgaagtccttaccgcccatggccttgaagatctggatgtcctgggtgggcatggaggagttcttgacgcccgccactttcgggttcttcagcatagtggtcagcagcgagggcgtgagcgcggtgccggcgagctgcgggatgttgtagatgatgaagtcggtgttcggggcggcggcgctgatgtcgttccagtatccggcgatggaatattccggcaggcggaagtagatcggcgggatggatgcgatggcgtcgacgccctgcgcctcggcgtgcttggcgagttcgacgctgtccttggtgttgttgcatgccacgtgcgcgatgatggtggctttgccgcgcgcgactttcatgacgttctccagcgtgaccttgcggtcctcgacgctctggtagatgcactcgccggatgatccgccgacatacagtcctttgacgcccttgctgatgaggtgttcggtgagagcctgcacacgttcggggctgatctcgccgtcatcgtcatagcaagcatagaaggctgggaagatgccgcggtacttgttcggatcgatggtcatggtgttctcctttgttggtgggttggttgtggtgttggtgttggtaaacagtgttgttggcgtaggggcctattgataggggctacgcgggggcgagagccgcggcgaaccgtttggtgatgagctgcgggcgagtgatggcggaccccaccactacgctgtggcaaccaagctcaatgacgcgtttcgccttgtccggtgtatcgatgttgccttccgcgatgaccggatgcttgactctggctaggatgtcgcggatgatacggaagtcgtcctcatctacgcgatcgccttggctttcctcggtgtagccgatcatggtggtgccgatgaagtcgaaacccagctggtcggcgtgggcggcttcgtccactgtggagcagtccgccatcagtagctgatcggggtaggtgtgtcggatttgcacgacgagatcgtcaaggctttggccggcgggtcgggggcggtcggtggcgtccagggctatgatgtccggtttgactgcttcgagctcgtccacctcttccatcgtgggggtgatgaacaccggggagtccgggtagtcgcgcttgatgatgccgatgatgggcaagttgacgcgcagtttgatttcccgtatatcttccacggagttggcccgtatgcctttggcccctccctgagctgcggcgtaggccatttttcccatgatgtacggggaatgaagtggctcgtctttgagcgcttggcaggatacgatgagttgtcctttgatgttcggtggtggtttcattgcccctcctttcgtgtgccatcatcgtaaagcgctggaaatcgatttgtaaagttcgaccagccaaaaaagagtaaatagaaaatacttaccatgtaggtcgtggtgtagtctggctttaaatggctgtttatgattatttttgggctgatctatgttgttgcagctgaaagttctacccacttcgttagtctaagtggaaattatttgcgctgacggataagctaaccgagtacggacgacatgatcgccgcccacagcacaaccgatgtgcacgcggcgaacataacagccctcgatggtgagggttcccatcacatcacagacgaacaggagggatggcggcatgaggagagaacgaagtgccataatgtccagggatacgcggttcgcgtatttgattaatatcccgttgattatctacttggtctgcatgttggcatggcctatttgctggggcttctacaccagccttaccaacaagaccatcggtggcggcaacggcgcattcgtgggattaaagaactacatcaatctgttgatggacccttcataccggtcatctatcgtgaacaccctggtgttcaccgcgatctccatcagccttaagctggtgctcggtctggcgatggccctcgcgctgaacaccaagttccgtggacgcaacatcgtgcgagcgctgctactcatcccctggaccctgcccaacatcgtggcggtattgaactggcgctggatcttcagctccacgggcggtatagccaactacatattgaccacgttgggcatcgcagaccatgatctggtgtggttcggcagtcccaaactggccatggccaccgtgatcatcgccaacgtgtggcgcggcaccccgttcttcgcgatatccattcttgcaagcctgcagaccatctccgccgacggttacgaggccgcgtccatcgatggcgcgaacatattccagcagttctggcacatcacgcttcccgagatccgtgacaccatcctgttgtcgacgctgatgtcgaccatctggacgctcaacgaattcgaatccgtgtggctgatgaccggcggcggcccaaacggctccaccgaagtcatgaacgtgttcagctaccagaccgcgatgaagagcatgatgctcggtaagggtattgcggtatccattctggcgatgccggtgcttattgcactgatcaccgtactcgcacgacacatggtgcccaaagacgggcgaaggtaaggagattacgatgagagaaaccaaaggcgtcaaaatcatcagccgcatctacatcattatttgtctgatcgtcgctctcggcccgatttactggatgatcaacacctccctgaaagggcagtcggagatttatagccaaaagccgaccttctacccgcataagccgacgttggaatcctacaaatacctcattcaggacaccaacttcctgcaggccgtgcttaacagccttatcatcgccgtggtggtatgtgcgttctccattttcgtggcgtacccggcggcctatgccatcgcccgcgtctcattcaggggcaagcgcacgttctccaaaaccatcctgttcacctacttgctacccacggccgtcatgtacatcccgctgtacctgatgaacgcgcgcatcggcgtgacgaacagcatctggggtcttgcgctgatctatccgaccttcactatcccctatgtggcgtgggtgctgatcccgcacatccaggcgattccctgcgacatcgacgaggcagcactggtggatggctgcggacgactgcgcatcatgtaccgcatcatcttccccctggcgttgcccggaatcatcgccaccacgatcttcgcgttcgccatgtgctggggtgaatacatgtacgcgttggtgaacatcacatccacctcccaacagaccttccccttggtgatagccggactcatattcggcgacatgtatccgtggggccagctgacggccggcgcgattctggcttgcgtgccagtggtcatcatctacatgctggcatcgggatccctggtcggaggccagaccgagggaggcgtcaagggatgatgaataggaaaggcacaaccatgaaaaccatgaagttcgcggccgcgggccttgccgcagccatgctgctgccacttggcgcatgtggttccgcttcggacgccaacacgctcaccatctgggtggagaaagtgttcagcgagaagtcgaacgaggagatgaagcagcgtatcgaaatcttctccaaggaaaccggcataaaagtcaattacgagttcatttccgccacggactatatgaccaagctcaacgccaccatcgaggcggggcgcggcattccggacatcaccacgtccgccgtgtccaaggtagtgaactattaccctggcaacccatacatggatatgaccgacatcgtggagcgcatcaataaggaccggccgtatctgaagtccgtgtacgagggcagcaagattgacggcaagctgtatttcgcgccattccgcagctcgtcgacgatgatgttcatccgcatggacaagctgtacgaggctgggatctacgaggtgcccactacctgggatgagctgttcgaagtagccgagaagatcagcgatccggcacagggcttctatggcctgggctggggctgcggttccacggatgaggacggcgacaacatcttccgcaacatcatgtggaaccaaggtggctacatgttcgataaggacggcaacgtcaccatcgacaacaaggtgagccgcaagctgatgcagcagtacaagacgatgtaccagaacaaggtgataccgccatcagccagcacttgggattccggcggcaacaacacctcgtacctcatgggcgaatccggcatcatcttcaacgcgccgaccctgtactactccatggcctcggacccatcatatgagacgctgctcggcaataccgtcgtagtgaacctgcccaagggcgaggacaacgatgtgaagatgtcgttcgtcaccggactgtcgattatgaaggccagcaagaacgtcgacgcggccaccaagctcgtcgaatacctgctggacaaggactggtatgacggcttcctggaggagacggcccccgtgttcgcccccgtattccaggattccgagcaggtggacgtgtggcagaaggacgtcaacgccgaagtgctcaactacgtcaagacgtcggagggctactacggataccccgcacggtctaccgccgatcgcgccgtggcagccaagaacatgttcacctacccagaagcgaagatgctcaaccagatcgtcacggtgaataccagcatcgatgacgcgctgaaagacaacattcgcaagattgacgagcttaagtcgctgtttaccgagcagtgacgacagacgggcggcatcaatagtgccgccaccttgctcgcaccatcattcccatatcaatcatcacaagattcacaatataaaggagcaatcatgtcgaacatcaccatctggctggatctggaccccgacaaggtggacgtcagctacctgcagaacaagttcaaggaagacggctacaacctcatcgccgagcagatcgatttcgccgatgaagacaagaccatcgagatgggtatgaaggccgacgcagtgatcagctcgtccgaaccatggaacgagcgcacactgagcgccgtcaagggacaggtgaagtacatcgtgcgttacggcgccggattggataacatcgatctgccgttcgcggcctccgtgggtatccccgtgggcaatgtgccgggcgccaacgccgcggccgtggccgaaaccgcgctgctgcacatcctcaacctcgggcgtcgtttcaccacatgtgttgacggcgtcagcaacggcgtatggccgtcgaccgtgaccggcaacgagctggacggcaagaccgtgggcctgctgggctatggcaatattggccggcagctggtgcgcatgatgcagggatttgatgtgaacgtgttggtctacgatccttacctacgcgaccgctccgacgcgaacgaccgcctgcatttcgtgggcagcgccgaagaggtctttcgcgccagtgacatcatcagcctgcatatcccgctgaccgacgagacgcacggttccatcaacaaggagaagttcgcgctgatgaagccgactgcttatctggtcaacacatgccgtggtggcgtgattgatgaagctgatctgattgaggcggtcaccagcggcgagattgccggtgctgggcttgacgtgcttgtgcatgagccgcctgagaaggatgatccgctactacacctgccgaacgtgttcgtcacctcgcatatgggcgcggcctcgatggaatcggaatacaggtcccaagtcatcatcgccaagtgcattgaggaatactttgccggcaagatgccgtacaacgtgaaaaacatgtgagttgcgcctgcaccaccggtggtcaggttggcgggaggcctgccgttttgaggggcatcccattgtctgtgccactggtggtggcaggtctggtcggccttttgaggcgggccgtgacggtggatgacagacgactggtgaagatgagatgggtctgattgtggcgggtcgttgctgaagggctcgccacggaagaaaggatatgagcgtgtcggagatcattattgttagggatgaggctgaggccggtgagatctacggccgttgcgtggcggacctgatcaaagcaaagccgaatgcggtgctgggacttgcgacgggttcgagcccgctggccgcctatcaggcgctcgccaagatcgtcaaggacgaggccattgacgtttcgggcgtgcgtggtttcgcgcttgacgaatacatcgggctgccgctgacccatcccgagtcctatcatgcgaccatccatcgcaccgtggtcgaaccgcttggcctggacccggccaaggtccatgtgcccggcgacgtactcaacggcactccgctcgaagacggcgacaaagtcgcgctggccggcccggcctatgatcgtgccatcgaagccgctggcggcatcgacgtgcagatcctcggcatcggcaccgacggccacgtcggcttcaacgagcccggttcctcgttggcctccggcactcgcgtcaagaccttggccgaacagacccgcatcgacaacgcgcgcttcttcgacaacgacatcaaccaagtgcccacccactgcatcacgcagggtattggcacgatcatgaaggcccgtcacctcgtgctgctggcgttcggtgccggcaaggccgaagccatcgaggagacggtggaaggcggcgtgtccgcgttctgcccggcttccgcgctgcagatgcacccgcacgccacgattatcgtggatgaggaggccgcctctcgtctgcgccacaaggactactatcgctacgcctacacccacaagccggcctggcagggcatctgagttatcgtgtgctggcttccctctttgtgtgaggggagctgtcgaatgtaatgagactgagggtggttatcggcggcggcatatgtgtattgcttcccgattggaccaccctcagtctcgtttcgcgagccagctcccgttggcgggagcgcatgagcggtaaggagaacaacatgtctgataggaacgagatagtctcgcgcgtgaccgcggcactggagggcaagccggctccggtggcgattcgcaacgcgcgcaaggtggatgcgtgcggcgaacggcgcggatattgggtcgtctccgatgccgccggcgtcatcgtggcggccggcacgggggaggaggccttcgagcactactgccgcacggtggggctcgacccggccgatcgcaacgcggtcatcgacgccgaaggccgtattctgacccccggctacgtggatatccacgcgcacggcgcatgggagaagagcttcgacgacgggtcggatggcatcgatgtggcgcgggccggccacgccgtgcacggcaccacgcgccaggtgctctcgctgatcaccaatcccgtggacgtgatctgccggaacatccgcaccgtccgcgccaagatggagtccggccgccccgacatcctaggctgccatctggaaggaccgttcctggctctggcccgcaagggcgcacatgacccggaatgtctcaaggatccggtacccgacatcgtcgacgacatgcttgaggcttcaggcgcggcgaacggcaagattggctgcatccgccagatcaccatcgcccccgaactaccccacggcatctccgccatccgccagttcgccgctgccggcgtggtgccggccgtgggccactgcgacgccgactacgagaccgccaaagccggcttcgacgcgggcgcgggcatcatgacccacatgttcaacgcgatgaacggcctgcaccaccgcgagcccggtccgattccggccgcggtggaggatccgcgcgtcaccatcgagctcatcaacgacggatttcacgtgcaggatccgatggtgagcctctccttccggttcgcgcctcatcgtacggccttcgtaaccgatgcaatggccgcgaccgactgcccggacggcgcctacaagttgggtgcactggacgtgaacgtggtcgacgggcatgcgcgtttggtttccaacggcgccatcgccggctccactctgctgctggaggtcgccgtgcgccgtgcggtgtgcgaactgggcttgagcccggtggacgcggtcgaggccgccacattgacgccggccaaggcgttcggcttcgaccggccgaacccggtcaccggggtgcctatcggcctcatcgcccccggcttcgccgccgatttcaaccttgccgatccgaccgattggacggtcgaacaggtgtggtgcgc

SEQ ID NO: 1205 - DNA, 14429 bp, Unknown
  R81_24m  MAG No. k141_19996
aaaataggactgtatgcccaaagaagaatacggcgccaaggacctagctgttcttgagggcttggatgcggtgcgcaagcgtccgggcatgtacatcggcaccaccgactcgcagggtcttatgcactgcctgtgggagatcatcgataactccgtggatgaggccttggccggcttctgcaacgatatcgtggtcaccctgcacaccgacggttccgtggaagtcgcggacaatggccgaggcattccggtggataaggaaccgaaaaccggcctgtccggcgtggaggtcgtactgaccaaactgcatgccggtgccaagttcggcaactcgtcttataacgccgtcggtggcctgcacggcgtgggctcctccgtggtcaatgccctgagctcccgactggacgtcgaagtggatcgtgacggcaagacgcaccacatgaccttccaccaaggtcaccctggcgtatacacggatgccgacccggccaatccgtctcccgattccccgttcaagcgcactcgcaagaaccgacccaccgagttggaaatcatcggcaaggtatctcccaaaaccactggtacccgtattcgctactggtatgatccggagattttcaacaaaaccgccgaattctcatacgaacagctcatcgaccgcgtgcgccagaccagcttcctggtgcccggcctcaaaatcaccattgttgacgaaaacgtaccggaaacggcgactgacaccgccgaagccattgatgccgacgcagtcgaacctgcgcaagaccaggccccggctttggacgtctcgtccaacgatgccgaactcttcgacgactccaccgaggctcaagccgacagtaccgagagcctgtccgaggaggacttctcgctgacggccggcgaccaggtcgtcgatggcgcgttcggcgagcagcccgcgcacccgcgcgtcgtggaattcctgcacaccggcggcgtcaaggacttcgtcgacttcctatccaaaggcgagccgatctccgacatctggcgcatccaaggcgagggcacctataaggaggagacccaggccgtgggcgaaggcggtgaactgcacgcccaggaaatcgaacgcacctgcggcgtggacatcgccctgcgatgggtcaacggctacgacaccacaatcatgagcttcgtgaacatcgtggagacgcccggcggcggtactcacgtggacggtttcatgaacgccatcaccaagcagattcgcaaggcggtggaagacaacgcccgcaagctcaaggtgaacatgaaggactccgccatgaaggtggagcgcgacgacatccaagccggactcgtggccgtggtcaccgcacgcgtggccgaacctcagttccaaggccagaccaaggatgtactcggcaccgcgcaggtcaagccgatcgtcacccggctcaccgacaagcaattcggcgagatgatcaccggctccaaacgcggatacaaggaacaatccggccgcgtgctggagaagatcgtcggcgaaatgcacgcacgcatccagtcgcgcaaggccaaggaggtcacgcgccgcaagaacgcgctcgaatccgcctcgatgccggccaaactctccgactgccagccgggcaatgacgacgtggccgaactgttcatcgtcgaaggtgattccgcactcggtaccgccaaggccgcccgcaacgccggtttccaagcgctgctgccgattcgaggcaagattctgaacgtgcagaaggcgtcgattacgcagatgctctccaacaaggaatgcgcggccatcatccaggtggtgggcgccggctccggccagagctttgacatcgaacagtcgcgctaccacaagatcatcatgatgaccgatgccgatgtggacggcgcgcacatccgtatcctgttgctgacgctgttctaccggtacatgcggccgcttatcgaacacggctacgtgtatgccgcagtaccgccgctgcaccgcatcgcgttgaccggctcgcacaagggcgaatacatctacacgtattccgatgacgagctggccggcaaactggccgacctcgacaagaagcacatcggttacaacgacgacatccagcgatacaagggtctgggcgagatggacgccgaccagctggcggacaccaccatggacccgcgcacgcgcatgctgcgccgcatccgcatggaggacgccgcccaggcatccgagatcttcagcctgctgatgggcgacgacgtgccgccgcgcaagcagttcatcgtcgacaacgccgacgatttcgaccgctccaagatcgatacctgatcgaagacgtcgctgataatgacatcgtgcttaccgagaatttccgtaattggcgtttgaggtgagcacgttgtcatatgttttatgcgtgttgctgaagcgctattcgatagactgatgacatcgttatcacaaccggtgccgtactgtgaatgggagatgtaacatggccagtctgttgcttgccgtcatctatgtggcgtttatcagtctggggttgccggattcgctactcgggtccgcatggcccaccatgagccaggatctgaacgtgccggtggcgtgggctggcggcatctccgcggtgatttccatgttcacgattgtctcggcgctgctttcggaccgaatgacattgaaattcggggcaggcaaggtcaccgccgtttcggtggcgttgactgcggcggccttggcaggtttctccgttgccccgaattactgggtgctgttggccatcgccataccgtacggccttggcgcgggtggcgtggatgcggcgctcaataactacgtagccattcactacgaaagccggcatatgagctggctgcactgcatgtggggcgtcggcgcatcggtcggcccctacatcatgggctatgcgctgtctcaaggccaaggctggccgtggggctatcggtacatcgcgatcctgcaggtgatgctgaccgtcatcctggtgctgagcctgccgctgtggaagaaacgtggcacgactgggggcggcgaatcgaccgatggcgccgcatcatctgacggcaatgccgagggatgtggtaatgctgaaggggcgtctgttgctgaacgcaaaccgctcggcgtagccggcgtgctcgccattcgcggtgccaaggaaatcctcgtgatgttcttctgctactgcgccatcgaatccacggcgggtctgtgggcctccagctacatggtgatgcacagcggcatcgacaagatcaccgccgccagctgggccagcctattctatgtaggcatcaccgtggggcgtgcgctttccggctttctgaccatgcgattcaaggacccggtcatgattcgcctcggccaagtgctggtgctcgccggcatcctcaccatgttcgtgccattgcctcaccaccttggcgtggtcgttgggctggtggtcatcggcttcgggtgcgcgccgatttatccatgcgtcatccactcgacgccggcctacttcggcgaagacaaatcgcaggccgtcgtcggcgtgcagatggcctgtgcctatgtgggctcactgctcatgccgccactgttcggcatcatcgcgcaatatgtgacaatcagtctctacccgtggtatttgctggtgctcttggtgctgatggtggccatgcacgagcgtcttcgtaagttgcgcggctgatcatgcgcgcatttgggcccgccgcctactatgcttggagcccatggtgataagtgaagaagaacataaacagatgcccgagcccgtacgggaacgattggaagcgctgaaggatgcgccgggctcggtaatcgtggtcggctcgatgaacgccgattacaccgtgaccaccaaacgactgcccaagccaggcgaaaccgtcaatggtggtgccatgaaagtgttgccgggcggcaaaggcgcgaatcaggcgtctgccgctgctcgcctcggtgtcaatgtccagttgctgggcgcggtgggcgaggactccaacgcggacttcctattaggcaagctggatgaggccggcgtcgacaccgccgatatcctgcacgttgaaggccccagcggcaccacggtaatcaccgtgagcgctgagggcgagaataccatcgtctattcgccgggttccaatgccaaggcaagtgccggctatgtgcaatcacatcgcacgaccatcgccgaatgcgcggtattgggactgtgtttggagagcccgatctccaccgttatcgccgccgcacagacctcgcatgacgctggcgtgaccgtgctgctcaacgactcgccatttatggacgagctgcctcacgaactggtggaagccacggatattctgctggtcaaccagcatgaagtggctcagttactgggtctgccggacggcgatgtggaatcactcgactggtatgaggtcgccgaacgattcaccgattacggattcgaccgggcgatagtgacgcttggtgcgtcggggtcggtggtgatcgagaacggacgttggcatcgcgtatccgccgcgaaagtcaatgcggtggacaccaccggttgcggcgactcgttcatgggaactgtgctggctggcttggccgctggccatacgctgctgcaatccgcgcaaatcggctcctatgtctccgcctatgcggccaccaagcttggtgcccaaagcgcctacggcactgccgaagaagtcatcgcctacttcagctgacctataatcgtacatatgtacgaaaccctgagtctgttttccgaacccaccaaggtgtggttcgagcatgccttcggtcagccgaccgaggcacaggctcaagcatggccggcaatccattccggctgcaatgtcttggtcatcgcccctaccggctccggcaaaacattggccgcgtttctctcagccatcgaccgattgatgaccgtgccacgtacgcggcgtgccggtgtgcgtgtgctgtatatctcgccgttaaaggcgctcgcggtcgatgtggccaagaacctagaacagcctttggagggcattgccgcacaatgcgaggcgcaagggctgcccgtgccgaagatcgcggtcgccactcgttcaggcgacaccaccgcacaggagcggcggcgcatagcctcccatccaccggatatcctcgttaccacgccagaatcgttgtatctgttgctcacttcgaaggcagggcggattctcggcactgtcgatacggtgatcgtcgatgagattcatgcagtagcgggcaccaagcgcggcgcacatttggcggtaagccttgaacggctggagaaccttgtcgcagaatcgcgcaagcgagatgcgatcgatgcggatgctgatgagggcggtgatgccgccgttgatgctggcctcagtgaccttcatatgcagcgcattggtctatccgctacggtgaatccgcctgaaaaggcggcgcgattcctgggcggcggacaaccggttaccatcgtgaatcccggtgggcggcctgcaatggatctgcgcatgattgagccgttggaaaacatgcgtgatttgcattccgtgaatgccaagcagcgtgtcggtggcgtggaggctgaacggtccactccgcatatcagcggtgtcacgccggccatgcagcgacttgccgaacgcaggggcattgtgccggtggatgatagagatgtttcttccacttctggggacgattctgatgcgagtgatgcgttcgattcctccgcgttggttggagcggcgggcgaccgtacctccggttccatttggcccgtggtggaacgcagcattttggatgagattctcgcgcaccgcactacattggtcttcgtcaattcgcgtggtgtggccgaaaagctcaccgcgcgcctcaatgatctctatgcgcagacccggcatggcaccaatcccgacactgtgcgtgatccgggctctccggaaggccgcgaagggttctccacacattacgatgctgtggtcggctccaccaccatgcttgtcggctcacatgagggcgatgatgtcatcgccatggctcatcatgggtcggtctccaaagatcgccgcaaaatgattgaggaacggctcaagcgtggtgaattgcgctgcgtggtggccacctccagtttggagcttggcattgatatgggttcggtcgacttggtgattcaagtcgatacgccattgtcggtctcctccggattgcagcgtgtaggccgtgccgatcatcaggtcggtggcgtctctcacgcattgttctacccgctcacccgtcagcagattgtcactggggccgcaagtctggaagccatgattgccggcgatatagaaccattggccgtgccgcgcaatccgctcgatattctcgcccagcagaccgtggccgctgccgcgatgcacgatttgaacgctgatgactggtatgccacggtgcgccgtgctgcgccgtttgccgaactgccacgtgacatgttcgatgcggcaatcggcatgatgtccggcgaatacaacagcgaggaattctcggccttccggccgcgactggtatggaatcgggataatggcctgatttccgcccgtcccggttcgcagaaagtggccgttacctctggcggtacgattcccaatcgagggctgtacaccgtggtcctgcctgaggcggacgccggcaaaggccagcgtcgcgtcggcgagttggatgaggagatggtctacgaatcgcgcgtgggcgatgtcattacgctcggcacctccacatggcagattcaggaaatcacccgtgatcgtgtggtcgtgactccggctccgggccgcaccgcccgtctgccgttctggcacggtgaaggcgctggccgtgactacggtttcagccgtaccatagcccgcttcacccgagaaatcgccgccggattagacgtgaagcggactggggggaggtctgccgcagaaggtccagctgtcccaaccttcatcccaacaatcctcactcgcctccaccgagatggcctagaccccaatgccatcaccaacctggcccgcctgctctccgagcaacaagccatcaccggcacggttcccagcgaccaaaccctcatcgtggaacggacccgcgatgaagacggcggctggcgcatcgtactgttaagccccttcggccgccgcgttcacgaaccgtggtccatggccatcagccgcagactgcgccaacgctacggtttcgatgggcaggtatatgccgccgatgacggtatcgtcattcagctaccggacggtgacggacatattcctgctcaagacctgttccttttcgacccagaagacctcaaagcagatgtagaacgtcaagtgggcgagtccgtgctattcgccgcacgattccgcgaatgcgccgcccgatcactgttcatgccgcgatccgacccgggccgtcgcgtgcccctatggcagcagcgactgcgagccgcacagctcctgcaagccgcacgtatggtcaagaacttcccgctgctgctggaaaccgcgcgcgaatgtttgcaagacgtatacgacatgcccgccctgaacgaggtgatgaccggattgcaagccggcaccattaccgtgaaggacgtggagaccgagccgccatcgccttttgccgagaacattctctttggcttcgtcggcgtggtgatgtaccagtatgaccaacctcaggccgagcgcagcgcgcaactgttgtctctcgatccgcacgtgctcgaacgcttgctcggcaccaccgacatggcacaagtgctcaacccggacgtgattcgcgaagtcgaacaggaactgggggagcgcactttctggaatgaacttgccgacgatgatgtgactggtcgcgtgacccgttacgccaaaacccatggtcctttcaccgccgatcagctcatggccgatctgcacctcgatgctacggatgccgtgcatactttggatgtactggctgccaaaggcgagttgctgcaaggccattttgtagatgatgacaagcaaggccaacagtggctccataaggacgtattccgccgcattcggtctcgctcattggccaaggcgcgtaaagcagtcaagccagtagaaccagaggcgttccagatgtttcttatcgaccgacaaggtatcgggccggtcggcggcgaacgatatgaaggtgccgacgggctcatgcgcgttatcgagcagctggagggcatagcactgcccactgcactctgggagtcggcggtattccccgcacgagtacgagactaccaacctgcattgctggatgagttgctgaccagcggcgatgtggtctgggtcggctcaaaaaccgggggaaccagtgcgatggaccccggtgaggttgctttctatccggcggattcaatattgctcagcggtgtggaacatggtacgacatcgaacgcttcagacgccaccatgccggaagcgattctgaccgcattggactcagggggagcgttccatgcccgtcaactggtggatgccgccaaacgtgtgtggaatgaggccgcggagccggacatcaatccaaacaccggtgaaatcattccgcaagagtggagcgaacagcagttcaaggatgccttgtggagcttggtctggcaaggtaaggtcaccaattccagcttcgcgccggtacgtgcattaaccgcaggcgcagcaagcccgcgtaaatccactacatcacgtcgtcgtgggcgtgtcgctccgattcaccgagccactacggatatgacgctaggaggtttgtggtctgccgtaatcgggcaagctgaagccgaagacactgatcagaccgagcaggcgctcgcactggtcgagacgttgctggacaggtatggcgtcatcgcgcagccggtgatcgacaaggaaaatatcccgggtggctactcagcgttgtatccgatattgcagcgcatggaggagcatggtcgactggtacgaggcatgttcgtccgtggtttcggcgcggcccaatttgccgagcgcgacaccgtggatgcgttgcgtcatccgtcagagcatcgcggccagtccgtggtggcattgagtgtgctcgaccccgcaaatctcagtggctccgccatcgcgtggccggacgcgcctgccggtgcgggtaaaccggcacgccgtatcggagccacggtcgtgctcaatgcgcaaggtgcgctactatacgcggctgccaaagccaagcacttgacggcgttcgatcaatcggtcggccatgaacccgccgccaatgattccgacgaacaaatgcgcaaggccgccacagaactggcctacgctctcaaacgcaatggcaccggttccgtgacgttcagcgacatcaatggcgaacccctcaacgcgcgtcaccccttcgcccgcatcctccaccagtccggcttcacccccgttccccgaggcatgcggctgtactgattgagcccagctatcgaatgcggtagttggagccgcgttgggtcatgatgaggccggcgtgggtgagcttcttatccagtgtgtagagggcgttcctgaggagcccttgttgctcgaagaatgggccaccgacgagcttgaccaattcgctggtgttgacaaactggccatcagccttgaccagtgcttcaagcaaactgtattccagacgggacagtgaaattgcggtgtgtgtggatgcgtagtaggctttgcgattcgtggtatccaacgtgagattgccacgaatgatcatggtgggggagtcggtggcaagcgagccgacgtatgagagcagttcgccatcggagaatggtttgctcagtacggcatccgggcgtcgtacattagctcgtgcgctagcggcagcgttgtccgtgcactgttcggcttcggcatctgagttgtttgcgtgtgaatccgcgctgaaggagctgtagggcgtctcttcgatcggggcgtactcgtcaggcagcgctcgccagcggctgccttcgccgatggttttgctgagtggcgtcgaagtcagcagcagaatcttgacggaggcacgggcattgtgaagggattcgatgagttgctcggtggagatgccgagcagggattcatcgagaatcactgcgtcaaatggctccttggtgaccgcggcgagcgcgatactgccggtgcttgccaaggacacctcatgacgacaggcaagcagcgcaccacgaatggcgcgggccaacggttcattggatacggcaaccagtagtctcatcgccacctccttgatgcttagtgtaggtcgggtttagggtctcttctctatgtgtttggctcactatcgttcgctcctcgcctacaaacaccccactgggggtgtttgctttacggctcggcccatcagagggagcttaattgaggttacgcaatgaaggcgatgggggaggcgaggtccactccggagccgtctcggcgcatatcgggcttgggaagctcgaccggggagcctgcggatgtggaggcatgcaacgggtagagaccaacccaggcaagaatcagcgtgttctggcccttgaggaagcgctgggagcgtacgccaccggtagcgcggcccttggtggggtacatttccagcggggtgaccttggcggcaccgttttcggtgccgggtagtgcatcggagtcgccggccacggtgagcaccaccgcgccggagccggaagtcaaaccgttctcgccctcctcataggtccatgccaccttgccggcgggaaccacgttgaatgccgccacacgggcgccctcggccagcttgatgccggccataccgcccgcggtgcgaccctgcgggcgcacgttcttcgcctcaaaggtcagtagcgaggaatcggaggagatgaacaccagacggtcgtcatcctcggccacggcggcgaataccacttcgtcgccatctttcagatcaatgacgggccaggaatccatggtggtgggtgcctcacggttccaacgcttgatgacaccgttacgggtaccgatagccagcgacggcaacggcttggcctcggcggcaccatcctcgctctcgtcctcggcactggccttgccggacgtcggctgctccatggcgatcgccgtaatcacgcgctcgccacgaatcggatcggtggattcggtcatgccgatcagttcgtcggcttggaccccacccttcagcgacaacgtggcagaagcaggtagcgccggcaaatcaaccacatgcgcgagcaccaggcggccggccgacgtgaccagcccgtacgtggcgcgcgtggaggtctcgaagattgtggtgatttgatcgtctcgcagacgttcatcggatgtggaccgtacattgaacacgtccatcgcgcttggcgtggtacgggcaatcaaaccggtggcgctcatcatcaccacgcacggctcgtcttcgatcttcaaggctccggtcagcgcggaccgctcgccggtcttcttggcggcggctgcagctgcggccacatcggcttcggcggaggaaatcgtggtggcggccttcactgcttcgagtgcggacttggacacacccgaagccccggcgccctgcgccacgaccggcgtcagcgtgccatccgggtcggcgtccagcagcacggtgcgacgcggcgagccccacttggcgaccgcctcgtccatctcgtcggtgaccacctggtcgagcgcttcggcggaggccagaatgcgggtcagctcctcgatgcgcttcttcaggtcatcgcgttcggcctcaagttcgatgcggttcatcttggtcagacggcgcagacgcaggtcgaggatgtactgggcctggacctcgtccaggtcgaacacaaccatcaaacggcttttcgcagcatccgcatcatctgaggtgcggattacctggatcacctcgtcgatgtccagcatggccagcagcaggccctcgaccaggtgcaggcgctccaacgccttcttcttgcgatattcgctgcgacggcggatcaccacacggcggtggtcaacccacacctgaagcatctccttcaggcccatcgtgtgcgggcggccctccaccagcgccacgttgttcatggcaaaattgtcctgcaacggcgtgtgcttgaacagctgcaccagcaccgcatgcgggtcgaaaccggtcttgatctcgatgacgatacgcgtgccgttatgacgatcggtcagatcgaacgcgccggaaatcccctccagcttgcggttcttcacgccgtcggaaatacgctcgatcaccttctccgggcccaccatgtacggcagctcggtgaccacgatggcctgcttgcgggccgtgacatgttcgatatgcgtggcggcgcgcgtggtgagcgtaccacggccagtggcataggcctcacggatgccatcgcggccgatgatagtgccgccggtgggccagtcggggccgggcacgtaacgcatcagctgttccagggtggcgtccgaatgcgccatgaggaacttggcggcgttcaccacctcgcccagattgtgggtggccaggttcgtggccatgcccacggcgatgcccgagccgccgttgaccagcagatttgggatggcggccggcagcacggttggttccttgagcttgttgtcatagttcggcgtgaagtcgacggtgtcctcatcgatatccgcgttcatgccgagggccgccgggccaagcctggcctcggtgtaacgggaggccgcagggccgtcatccagcgagccgaagttgccgtggccatctaccagcggcagacgcatcgcgaacggctgtgccaaacgcaccatggcctcgtagatcgcggaatcgccgtgcggatggagcttgcccatcacctcgcccaccacgcgggcggacttcatatacgggcggtcgggagtcaggttcatctcgcccatctggtagacgatacggcgctgcaccggcttcaagccatcgcgcgcatcgggcagtgcgcgtgcgtaaatcaccgaatacgcatactcgaggaaggatttgctcatctcctcgttcagcggcgtctcgacgatatgctccttgaccgtgcgcggatcgtaggtttgcgcggacggtttgcggtgtgatgccatgaaactccctttcgaacgcccccatattagcgggagggcgcgaaacagtgcgcagagaacggttctcgataacaactgtgcgctggtttcggtgcgccaatcgcacatgtttgccgataaaatggcgtgattccagtgtttcagtcgatgtgtgtttgtttgattatgtgcgttggggcgcacagttgttattgagaaccgttctctgcgcactgagccaaggggaggggtgctacttgaatgggcaactatgagtgttgagacgccggatatggacgagttgctgcggctggtgcccactgtgggctatggggatgacgtcccggccgatcggcgtgggggagcactgcacctgtccgccgtgctgcccgccttgtccgccgcgattgggcatccgactcccaccaaggtccacgccgatcccaaggcctgccagcgcgcgttgggactgcccgacgccgaatcggccatcgtggtgctcgtggacggcctgggcttctggaacctcgccatgcgcctcggccacgcgccctatctgcgttcgctgatgaacgaacgcgccaatcagcgtcccatcgccacctgcgctccaagcaccactgtggcggccatggccgcattcggtaccggaacctgcccgggactgaccgcaatggcgggctatacgcagctcgaacccgccagccataagctcatccaactcatccagttcaaagacgcgctggcacccaaaccagccaatccgcacattcctgtgccacccatggtcgatccgctcgaccagcagcgcgaggagacggtgttcgagaaacttgcggctcaagaggtgcgcgtcacaagctcggggttgcccaagttctccaaatcgccattgaccgaagccgcattgcgaggcaccgactatcaaggcaacgtcaccccacgcgatcgtgtgctggccgcctcacgtgcctcccgtacccccggcctgacctacctgtacatccgtgacgccgacaaagtcggccacaattacgggtgggattccgaacactgggtggccgcattcgaacatatcgacgcccagctcgcgctcctgaaacgcagcgcacccaaaggcacgctgatcgtcatcgtggccgaccacggcatggtgcaaaccgacgtggaccagcggattgacatcgccgttgaaccgcagctcacccgaggcgtgtcactggtcgggggagagcctcgctcgctgatgctgtatgccgagccggatgaac

SEQ ID NO: 1206 - DNA, 10511 bp, Unknown
  R81_24m  MAG No. k141_20226
cattatgagtccgacacggtcgtcggcgcctccccgtcgaggcggtgcatcgacacgcaggtcgaacgcaggagccgcaggctgttcgccaggttcgtccccgacaagagcgcgctggccacggcgcgcgccgaatacgactggcccggcgtcgccatcgcagcctagatgccgaggtcgtccttgtgcttgttcatgtcctcgacgaccttcttcaaggtgtcgtagtccttgatgtcggcgtcggactggatgactgcgtagtccttcttggcgtattcgttgacgatcttcttgttgtagatgataccgtaccactcgaccgcatacggcatggtgtaggcgtcgtcgccgaccttatgcgagttggtcttgccttcgtcgttgagcagcttgtacacgtcagtgtcctgcaacggttcgagatacctctggtacttggcgaactcgtcgtagccagcgatgatgaacatggtcggagcttcggacttggccagttcggaggtcagcgtggactcatagctgccggaggacgcgatctggatgtcgacctgcacgccggtctgattggtgtagtcctgcgcaagctgctgcagctgatcgaccacctcaggcttgccgttcaagaaataaacatgacccttattcggatcagccgcagtgcttccgcaggcggcgaggctgaacatggtgacggccgcaacgcccgcggcgaggattctcttcatgttcatggtgctcatcggcgttatgctccttccgcatataccgaacatctgtgtccggcgatctgttcttctcaaagggggccgctgaactatgctcagcgactcgttaccgtaagcgttgatgacaacgacatcacgcgatgcaattatgtacataatcggcgtgttgtcgggggattacttgatatttcaagcgttttctcacaccctctgattgcagctctggtgaatacgttgccaaggtactgtgcatgaatcggcaaacaggcgattccccgtgggccacgcccgttacaatgacgtgtatccatccgcccgcccctcaaggagatgaatcatgggctttatgtctccggattccgcattcatgcgcggactgagcaataccgtagatgccatctggatcaacctgctcatgatcatcaccagcattccactgatcaccatcggcgcggcgctcacggctggacacgatgccgcgcggcgcgtggcaatcgcggaaggtcacgtcaccgcgaactatttcaaggcattccgcgcgaatttcctcaaggctacgggactatggattattttcggcgccacgggagctggtctcgtgtattcatgggtggtgttgcagatcacgccgctgctcatccccaaaatcggtctgaccttggtgtggatcatcggattcgaatgggtgtgggcgttgcaggcgcgcttcgagaactcctttggcggagtactggcgaacgcgttcatcttcggcgtctcgcgcattggtgccacattggtattggtcacgatcgacgctatcttcctcggcctgctcgtcgcctcatgggtctacatgccgcagggcctgttcctgctgatagtcctgggctacggatcggtgctcatgctgcatgtgccaattctcgagcgcgtattcgccgcatgcgtcgccctgtccggcacgtccgacgcatccgccccgtccgacacgtccagcaccacgtccccgcaaaggcaatagcacatgggcaaagtcacactgcaggacgtcgccaaggcagctggagtctccaccgccaccgcatcatgggcgatcaacgacaacaagaacgtacgtattcccgaaaacacgcgccgcaaagtccgcaacgtcgccgaacgtctcggataccattccaacgcgtttgcccgaagtcttgcgcgcggcaaatccgatctaatcggtttcatcagcgacggtgtcgccacatctccattcgccggacgagtcattcaaggcgcgcaggacgaagcatggcgcaacggcaaaatcctgttggtggtcgacaccgacggcaatgcgaccattgagcgaaaggccttttcgttcatgcttgagcatcaggttgagggaatcatctattcaagctgggtgcatcgctccattacgccacctgacgagctggaacgcactatgtccgtattggtgaactgctttgacgaatcgggtcgattccccgctgtggtccccaatgaagtgcagggcggacagtccgctaccgagttgttgctgcaggcggggcatcgtcatgttgcattcgtgaacgagccaaccgcatcgcctgcgtcggtcggccgcctcgaagggtatcgtcaggcacttgccgcacacggattggcatacgaccccgcaatggtcgttgacgcaacagccgaccaggaaggcggttacggagcggccgacgcagtgctgaagaccggtgccacggcagtgttctgtcataacgaccgcactgccatgggtttgtacgacgcgcttcgcgagcgaggcttgcgtgtgcccgacgatttgtcgattgtcggattcgataaccaggaggtcatttccgcacacctgcatcctgcactcacgacggtcggactgccgcaatatgaccttggtgtattaggcgtacgctcgttgctgacgctgaataagacgcccgacgccgactacgacagcagcgaaaccgatcgcatcgaagatagcaaaacgcaccgcttcgagccattgctggtgggctgtccttcagtgatgcgcgattctatccgcgcctatcgcgggtagtcggcagcgcgagacacgcgccattcctagaggtgtgcgtcatggcttgacaggtatagtttgaatgtttatcatattgcttaatcgcttaaatgcttaagcgattaaatcaaatcaggacaatacaataaagcatgtttcttatgcgcggagctgcgcagtagaaacagccaggataccgttcgccgcgaaactgcacacaagtccggtagcccgaccacagagcaattggcgagcggtcgtcaaccgaccatataggagtgataatcatgccaaagctgtactaccaattccctggcacgtggttcggcgattgcatgccgttcggcaagggcaacgagttctttctgtatcaccagcgagacaatcgcaatccggaaccattcggcgaaccgttcggctgggatctggccacaacctctgatttcgtgcattacaaggattgcggtgtagccgtgccgcgcggcagggacgacgagcaggatcagttcatattcgcgggatcggtgtttgaaggggaagggcaataccatatcttctacaccgggtacaaccgcgattacccccagcgggacaagtcggcgcaggtgctgatgcacgcagtcagcgatgatttgtaccactggacgaaaacccagaacgccatcaccttcactccgcaagaaggctacgatccagacgattggcgcgacccgtgggtcattcgcgacgacgaacatgaccagtatctgctaatcctcggagcccgtaagatcggcccgaaaacgcagcagaccggccgcacggtgaagttcacgtctaaagacctcaagaactggacgttcgaaggtgacttctgggctccgaacctatacacgatgcatgagatgcctgatctgttcaagatgggcgagtggtggtatcacatcgttacggaatacagcgatcggcacaagatggtgtatcgcatggccaagagtctagaaggcccgtggatcgcacccgatgatgacgcgtttgacggcagcgcctattatgccggacggaccttcgaactaggtggacggcgaatcctcttcggctgggttgccaccaaggaagactgcgatgacgtaaagaacttcgaatgggctggcaccttcgtccctcacgaggtctaccagcgtaccgacggcacacttggcgtgcgcattcccgacacggtctgggatgcgttcaacgaacgcgagcaaatcgtgacgaatgcggtaatcgacggtactgacgctcgccgtaacgccgtgctggccgagggctgcggagacctgtattcgtttgaagcggacgtcatgttcagcgagggaacgcgatccttcggtctccgcgtctaccgcgatgaggcaagcgagcgtggctatcagttcatcttcccgattggtgagcatcgctacgtattcgaaggcagcccgaacttcccgtggttcaactgtatgaatatcgggctagagcggccaatcgaactggttgccgggcgtgaatatcacattcagctcatcgtggacgacaccatcgccactctgtacgtcaatggcgtcgcactcaacgcgcgtatgtaccagcacccaggcgacgcattaagcatgttcgtcaccgacggcacgctcaccgtcacgaatgcgaccatcagtcgtggactcaaggaggtgtgagccacagtcaccaccgtatgtttgcgaaccgatacgttcgcctgtgattcatccgtacaccatatgaacgccgccgggcgcaaccggcggcgggcctccaacctacgcgcggccagcgggcacgacttgtgcaatgacgatgtccgctcccccgccctgtattgcaacaacaacgaagttatggcattccataggggggaaaccatgaagaagcttatcaaagcaacggccgcaatggcagcggcaggtctatctctgggattgatcgccgggtgcggttccggcgactccaatgcagataagggtcatgtctacttcctgagcatgaaagtagagcaggctgatcagattcgtgagcttgcagataatttcaccgcagagaccggcatcgaagtagatgtcgccacagcatcgtctgacacatacgaacagacgctgaagagcgagctcgccaaatccgaagcgccaaccgtgttcgatgtggacaacaacgacttcctcaattggaccgattactacgcagacatgtccgatacgaacatgtacaaggacctcaccaagcaggactacgccatgaagaatggcgatgaaattggcgctgtgccttacgtgatggagcggtacggcatcatctacaacaaggccttgctgcagaagtattttgatgccaactggtcaagcgtgaaggacgttgagacgatcaacaacttcgatacgctgaggaccgtggctgacgagattcaggcgcataaagatgacctcggtatcaagggcgcgtttacgtcagcgggcttcgatacgagttcgatcaagcggttcggcgatcagctcgcccacgtgccggtgtattacgagtatcgcgatcaaggcgtgacgcaacttccggccacaatctccgacacatacattccgaatttcaagaagatcttcgacctgtatatcactgattcgaccacgccggccagccagctttcgagcgccaccatggatgacgccaattcggaattcgcgcttggcgaggccgtgttcctgcagaacggcacgtggggttactcgcagatcaaggatcagaacgtacctgacgaggacatgggcgtgctgccgatttatattggcactgaaggcgaggagaaggccggcctgacagtcagcttcctgtactttgcgatgaacaaggacgcttccgaaaaggatcagcaggcgacccgtcagttcttggactacatcctgcaaaacgatgatgcacgcaagttggtcaccgacgagatgggattcgagacaccgttcaagtcatatgcagaaaacggatacaagaccacgaatccaattcatcgcgccaacgacgcctacgcagtcaagggcaattacgatatcgtgatctatcctttgccgagcacgcaatgggtgatgagtctcggcaatgcgatgctcgagtacgcacagggcaccggcgactgggatacggtcgcgtctgccttcgtggatggttgggcgtcggaatacaagaccacgcactgattcgaagcgaccggcattgaagtggtaatcgggatttagcgtcctgattatcactcgggaatacgccgcttagcatgctggtgtgctcgtgagcacgttgcttacgagcacaccagcatattccgtattggggtatgggttaccgccgctgcgcaccgtgacttgcaagtcctctcagtgacggaaattctagaggaaaatggctacgtcgagaatttacgtcactgagagcccgccagcgcacgaaattctcgcgcaatgggattattccgagaatttgcgtcgctaagaacccagagcatccgattattgcggttctttgcgctcagcagccaccagcgcaataggcagctagcgttctgcgtcagcagttcgttgacaaattcgctacccctcagccccgcttcgcgggccggctctcctgacaaggagagccggaaacgatatcaacgaactactggcgcaggacgcgccggtatccgaacagaacgtcagagcccgcgcagcagcggctcggcgatggcctggaccacggattcgggcatgtgggaatcgtcgaactcgtggccgggatagctgctcttggtgctttccagcgtatgcagcgcattgagcgcacgagcgccgtcagccttgatgagccggtaggcacgttccttggccagatagtcgatctgtgcgttgtacagcacagtgaacgcatcctcaatcgccggatcgtcggcgtaccgcagtccgttcgtcgcgtgaatcgacacggcctgcgtgaccggcgcatccgcaaccgtgacggacaggctcagcgcctcggtgtcgtacgacacatccggcacgacctcagcgccaccaaccgtcacaatcaactcgtcaacggcgaccggtgccacaccggtgaacgtcaccgtccacgtgcgctgctgcggcaccgccgccacattgccggccaccggggcaatctcgaacgcgttcaccgcaccatcggcctcccagcggaagtccatatgcgtcaccgcgagcgcggaatccgacggctgcgcctggttggtgccatcgtcctccttgaggtcgaacgcgccgttcgcgcccgggaacacggcaacctccagatagcgcggattatccacggagttgaggctgccgttgagctcctcgtccagcggctgcaacggcacgatgccgccggccttcgcgaagaccggaatgccatcgagcccacgccacgcctcgaacttgcggccttcggcagagcccgcctcgtaccgccgtccggtgaagaagtcgaaccatgtaccctgcggcagccacacgtcggttttcgccagctgcgcgttgcggtcggacggcgtcacgatcggcgcgacgatcagctcggtgccgaagcggaactcatgctccaccccgtacgcggtgacattttccggcgactgccagtacatcggctcgaccagcggacggccctcggcggcggcacgccagttcatcgtatacagatacggcagcagttcgtggcgcagacgcagcgcgtcatccatcgagcattccgtctcgggacggaagttccacggttccttgccgttaaacggcgaatcggtcgaatgcagacggttgatcgggctgaacgcgccaagctgataccagcgggcctccagctcctcgtcgcggtagccgaacatgtggccgccgatatcatgactccaccagccgtagccgatgttcgacgcagtagccgtgaagtacggctggaacttcagcgacttccacgtcacgactgtgtcgccggagaacccgaccggataacggtgcgagcccgggccggcatatcgcgagaacgtgagcggccagcgcccgtcacgggcggagtcgagataatgcatgtggttcagcatccacagcgggtcaagacccttctggcgggtcacgccgccctgctgccagtccagccaccagaaatcggtgcccagggcttcgagcccatggtgcaggtcgaagtacgcttccatgaatcgcggactggtcagatcgaactcgaccggctcgccgcccgccgggtcaatgcccatgtgttcggcgactttggcatagccgtcttcaaatgctcgaacgccgtcgcgcgggtggacgttgagcgtcgtgcgcagtccatgctcgtgcagaatgcgctggaatcgctcggggtcggggaagaattcacggttccacgtgtagccggtccatccggatccatacttcgggtcgacattgtcgaccagatgccagtccatgtcgatgacggccgtggtgaacggcaggccttcctgctcgaagcgatcgacaagctccagatactcggcttccgtgtactggtggtagcggctccaccagttgccgagcgcgaagcgcggcagtagcggcgtcgggccggtgagcttgtagaagtcctgcacggcttcgatgtaccgatggccgtatccgaagacatacagatccttgccggggtgctcgcgcggaatgacccacatgccgaatgggttggcctcgcccttgacggtggcggcttcggcgccttcgacgatcacgtttgatgcggaatcgtcgagcacggcccagccgtcgcgggagatcacgccgagccccagttcgatctcaccgtcgaccgcgtccagcgtacgcgcggtgccgcgcaggttgccgtcctgggcttcgccgtagtgccacgtattcatctgggaattcgccacgcctttgacgacgatgctcagaccttccttactgaacggctgcatgtcgtaggtgaggcgcagcgccggcgtatcgatgatgagcagcccgtcgcgctcggtcttcgtgaacttcggcgggtttgaagtgccgtccgcacggttcgcgccatccgcaccgttcgcgtcatccgacaaccaatcgcgattgacgatcatttgggtggcgtggtcttcgaacttgccgttgtcctgccattcgaggcggacgagcgattcggtgatgatgccgatgcgccaacggtcgccttggatgaccgcggccgggttcatgcccggatgggtggccagctgtggaaaggtggacattggtgtgctcctttgctcgtgttattttccacgttgttgttagtgtatccatgaaccatcgccgccgtgcgggcctcagacatcgcgatacgctccgtcatggtccttttcatgcggatatactgttaccgacggcgacacgcatcgggggcattcatgcggcgatggccgtggtgtcgcgcagcatcagctgcggggccacggtttcaaatcgcggttcggacaggggtccttccatcgcggcaagcgctttgcgcgcggcaatggcgcctaggtcattcgggcgttgccgcaatgtggtcaggcccattttggcgctgaaggggatatcgtcgaagccaattactgacaggtcacgcggcacgcgcagcccatattgcggcaaccggtacagcaccggaatcgccatttcgtcggtctggaagcagactgcggtgggcgtgggcgacatggtggtcagctgggcgagcgccgcgccggtcgtatcctcatggccggagcagcgaatctgctcaagcgtgacgtcaggatgggccgcagcggcatcgataaggccttgcagtcggttttccgcactgaagcgcagttgactggtgtcatccggcgcgccgtacacgtaggcgatgttgcgatggccgagcgaaatcaggtgttcgaaagccgtatgcatgcccagcttgtcgtcaatgcacaccgcgccgtcaagtccgatggtggacggggtgttgatgccgatgagcggcacgttcacgtctttcagacgactgacctcatccgggtcgatgtcgaacgagcagacgatgaccgcgtccacattgcgacgaaccggcagttcagtgaagaaatcatgccgttcccgcgcgttcgacaggccgtatacggagatgtcgtatccggccgggccgaatacggaattgagcccgcggaagacattggcattgaaccagacggcaatggtatcggcatgcaggagtgcgatgcggaacgattgtccggatttcaacgcggccgccgaccgggagacctggaagtcgagtttgcgtgcggcggcgaggactcggtcacgtgtcttcggcagcacaagattcggcttggcgaaggttcgtgacaccgttgacacggatacgccagcctctttcgctaccgcttgaatgctcgcttttgccatggcaacctcgctcatcaacagtggataacaatcccgctcaaaagacaacgttatcatacctaagcgagcaacatgcacgccacgctgtctatttagaagtgcaacgcccctgttcgtcggctaattctagcagttcgtcggtgaatgccccgggccgaacccgggttctagatagaagcgcaacacccgctctatggttggaagtgttcaggttctaactggagaaggtgttgcgcccatgaggaaagtgtattcccacttgtcggcacaggaacgcatccggatcgacgaattgcg

SEQ ID NO: 1207 - DNA, 8941 bp, Unknown
  R81_24m  MAG No. k141_20383
gctgggcgtcaacagctatcaccatcaggcgattcgcacgctgggccagggactggaaccgatggccaccgcgccggacggcatcgtggaggcggtctggatgccggccaagcgtttcgtctgggccgtccaatggcatcctgagttctcccaccgcgccgatagcaaccaacgccgcatcctcagcgccttcatcgacgcctgctgacgcaagctcccgccaatctcgacgaaacgccttccaagaaatggcttgcccgcatccgtagaccagaagatattcgatcaatgtgccgaacggactcatcgcaacaacaacatccagatcacccacaatgcaggtgacaagaccgagatgagcgcccagcgccgcagctcaagcccaaagtccgccccattcctcctgcgcagaacggcgtgattccgttcattcagtctccgggaaaacgcccgcgccccggaacgcgagaaccccgcgtcccttgcgggagcggggtccaagcggtatgtccttgattctgatgtttcagataagggggcccgaatcagcgggcgtagaattcgaccacgtactggatgttgacctgcaccgggatctcttcgacctccggcttacgggtcacagtggccttcagggacggcaggttcacgtcgaggtagccggggaccgcaggcagcacgtcacggtgcacgccttcggcggcgatctggaacggaaccatggtctggctcttggccttcacctgaatggtctggccgggcttgacgcggtaggacgggcggtccacgatgttgccgtcaacgaggatgtgacggtgcaccacgaactgacgggcctgggcggtggtgcgggcgaagccggcacgcagcaccaggttgtcgagacgggtctcgaggtcggtcagcatggcgttaccggtctggccggcagtacgggtggccttctcgtaagcggcgcgaagctgcttctcggagatgccgtactgagcgcgcagacgctgcttttcgcgcatacgcaccgcgtaatcggactcggtgcggcggcggtcgcggccgtgctcgccaggagcgtacggacgcttttcgaagatgcgctgagccttgggggtcagtgcgatgccgagggcgcgagacagacgcacctgacggcgagaacgctgaacgttcgtcattggattaatccttctgtcgttatctgaacggaacgcttgccttgcatatgcctggcaagcgctgagccgggcctccccagcgcttcgtcgtgaacgaacacgaacgggttggttttcttgcgatcacctaccgccgacccgctgatgggctatgactccagacggtatctacctgttggcagacaccagcaaatcatattacaccgaggctatggacagcactccggcgtccatgcgatacacccggtctgcgtattcgagtgcatcgggatcatgggtgaccatgagaatcgctgtgccgttgttggcttggtctttgagcagacgcattacgatgtcggtgctctcttggtcgagatcgccggtcggctcgtcggcgataagcaggctcggctggttcatcagcgcgcgggcgatggagacgcgccgcatttcaccgccggacagctcgcgcgggtagctgtctgccagatcggcgacaccaagctgggtgagcagcgtgcgagctcgggtggcgaacaggtccggacggctcgcagccgtgtttgacggcgtgttttcccggtctgtgattggcgcaatgacatccggcatgaacaggtcggcggctgcttcatcattggtggcagcggcttgtgccacggcatcggtcgacgcaacagcgtccacctgagcaacggcatccgttgcttctgcgttttgggcgaacggcagcggctccggaaacatcgttgcgggcagaatcacgttgtcgagcacggtcaggttgccgagcagggtctggctttgggtcacgaatccgatggtgcgattcctcagcacggacagtgctttatcgcccaagtcggccacattgcgtccagccacgctcacggttcccgaggtcgggcgaatcagcccggcgaccatgttgatcagcgtgcttttgccgttgcccgaccggccgacgatggcgatgaattcgccgacatcgacggtgaggttcacgtggctgacggcgtcgaacggcgtgccgcggcggacgaactggcgggtcaggtccgtcaaggtcagcagatggtccggggagggcgtctcggttacgtgcggcgaatccggcgcagtcggcgcgttcggctgagctggcgtggtcggctggagcttggtcggctcaaccgtggtcagctgagtcggcgtagttgtctcagtcatatcactccccctctcgcagggtcaggtaggcttcgggccggccgagacgccacatggtggccagcgaaccgatgatgccgatgaccgtagagcccacaatggtcacggcaatgaatccgatcaccgcaaccgggctggcttgcagatacggcaattgaagttgtttgccgatcagcgaactgaatgggaaaatcaccaggctggccgcgccgacgccgattacgccaccgatcagaccgatgatggcggattccttcagaatgatggcattcaacatgccgcgcgtggcgcccatgatgcgcagggacgcgaattcgcgtttgcgttcgttcaccgacgaggcgaatacggcgagcagcacaatcacgcccattacccagatcaccgccacgaaaatcttgaggtaggtgacaagcgcggtcagcgaagttctggtgttggcggtgatgccgccggggtatacgtaccccaaatcggcgaaccgggagtcaagacgcttgatgttctcagccacggtctgcgcttcgtaaccccgctgcgtcttgatcatcacggtggagacggcttcgcctgcatattcggcgggcatgacctgcttggagaccttggccgaggcggcgaccatatcaggcacggtgttttggttgatgaacaccgaattgtcgaggctggtgccggtgttggcgagctgggcgacgaccggccacttatggccgtagagttcgatggtgccgtcggtggacacgttgacgtttgcgccggcaatcatctgaccgtcttcaagggggccttcgaactgggatgcgacccatggttcgatgacgaagtcagtgtccgggtcgtaaccgatgatctgcagcttttcggcacagcaggcggcggccagcgatgatatataggtctgttcggtggcctgtgcgatgccgtcggcctgcatgacctcgtcggcgatgtctttggtgaaatagaaagtgctgggattgccgctggtgagcagcgcttcagccttctgcgcggtgttttgcggcacgaccataaggtcggcgcccaggcgcttctccatactggtcattccggtgttgaggttcatggtcagcatggtgccgccgaagaacgtcagcgcgaggatggtgacgacggagagcagtgcgccggtgcggaacggcttgcgtttgaggttttcaatcggaaggccgcgcaatgcgatatgggatggcacgatgagtccttatgttgcttatagtgcggttgcaataagcgagaccggagtccagcgttcggaatggctgggctccggccgtctgctcgatcagttgcgcttggcggcgcgagagtcgagccagatggcgatggccgcgaacacgatggtgagcacgccgagcacgatgagcgtgggcagcataaccatgcggcagtgcatcatcgcgcccttgcagatgccgatcaggaaggtgggtacggcgagtagtagcagggcgttggctgcggcggcgatattgaggccgatgcgaatctgcggggcgacgaacaaagccacgacgccaaacacgaggatgacgacgccgatgccggtggccgcctgctgcgagtagtggcaggcacccggcatgtcatggccggtgcaggcgtgcgcaaaggtctggggcgcgatggtgatcagcgcgccgaacagaatattgggcacggatgcaaacagcttgttcttcataactactttttcctctcccctgttcccagggctcgtaggcgcaacctccgcattatgcccagatagtgatgaagaacacaagtcttgttttttgtgaatttatttggtatataactcagcccctcgtcagaggggccaatctatctacaacttctcaataggtgctacgcggagcatgaggcgtttgacgccggcggagccgaagtccacggtgattaccgaattgcggcccttgtcttgcgcgtcggtgaccttgccgagaccgtactggtcgtggctgatcatgtcgcccacggcgaagtcggcgatattcaggccattgtccttggtgagcttcgagctgggcacggcagagccggtcgaaccggatttcggtgtggtgcggcgcgtggtgaccttgccgccacgggtgccgccatatgaaccggatgaagaaccggaacgggaacgcgacccgtaagacgaccccgaacgggagcctgaagaaccataggacgaacccgaacgggagcgagacccgtaggcggacgaacccgaacgggaaccatacgacgaggagccggaacccgagccatacgacgacccataccgcgaccgcgacccataggacgaacccgaaccggacgaaccacgcgagccgaacgtcgacgacccgccaaacgtggcgccgccgaaatcgtcatcatcccaaccgcccaaatcgtcggcgaatccatcggtctcccagttggcgcgcatacgctccacgccggcttcacgacgtttccaatcaatcagcggatccggaatctcgtcgaggaattggctgggcatcatgtcggcggcctgaccccactgggagcggacggcggcgcgcgtgacatacagtctctgcttggcgcgtgtgatgcccacataggcgagtcggcgttcctcctgcagttcagtggtgtcttccatcgaacgcgaatgcgggaaggtgccctgttccatgccggtcaggaacaccaccgggtattcgaggcccttggcggtgtgcaaggtcatgagcgtcaccttgccggagtcctccgcctcgccgggtagttggtcggagtcggccacgagcgcggtggtctccaggaatgcggacaacgtggcgtcaggcgtgttctgttcgaattcggctgcggtggactgcagctgggagaggttctccagacgggaggcgtcctgcgggtccacggatttctcaagttcggcccttaagcccgacttctccaatacttcagccacgatctcgctgggcttggagtcgtgcgcgcgcgtgaactgcgagagcgcgcccatcagatcgcggaatgctcgtagcgaggtgacggtgcgggtcggcacttcaatctcatccaagtgcataagtgcgtagaagaagctggtgccatgctcgcgcgcgtaggcgagcagcacgccttcggcgcggtcgccaagcccgcgcttgggcacgttgagaatacgacgtagattcacatcgtcgtccggattgacgagcgcctgcaaataggccagcgcatccttgatttcgcgacgttcgtagaacttggtgccgccgacgagctgatacggctgattcgtgttgatcagcgcctcttcgagcgagcgagattgggcgttggcgcggtacatgatcgccatgtcggagtaggcgatgccctcttcggcgtgcaggcgcgcgatttcggtggctacccactgggcctcctgctgggcgttgtccgccgcgtagccgacaatcggctcgcccttgccgagcgcggtccacagtttcttgggcttgcggccctcgttgttgctgatcaccgcgttggccgcatccagaatggtctgcgtcgaacgatagttctgttcgagcatgatggtcttggcgttcgggaagtcctgctcgaagtcctggatgttgcggatgtcggcgccacggaacgcgtagatggactggtcggaatcgcccaccacggtgatccaggcggggccggacttgccggcgttcggcgcgcccgggatggccttctcccccgtgtccacgccggccagctcgcgcacgagcacgtactgggcgtggttggtgtcctgatactcgtcgacgagaatgtaacggaagcgttgatggtagtactcggcgacggccgggtcggcgcgcagcaactcgaccgtgcggccgatcagatcgtcgaagtcgacggcgttggccaggtccagtcgatgctcgtattcggcgtagatcaccgcgtagatggcttcaaggtcgctcaccgtgccgaactggtagccgcgctggccgggcgtgaagtcgggtgcgtggacggcgaggttttccttccagccggtcaggttgttcttgaggtcggagatgtggccgaggatcgagcgtggagtgtagcgcttgatgtcgaggttgaattcggtggcgatgattttgacgagtcgctcggagtcggcggaatcataaatggagaagccggacttgagcccgatggacttgccgtcgcgcctcagaatgcgcacgcaggcggaatggaaggtggagacccacatgcgctgggccaccgggccgatcagcgaaccgagtcgttcgcgcatttcggcggcggccttgttggtgaaggtgatggccagaatctggctcggccatgcgccgaactggctcaagatccaggcgatgcggcgggtcagcacgcgggttttgccggagccggcaccggcgccgatcagcagcgcctgaccgcgatattgcacggcttccgcctgctgcgggttcagatcgcctacaagttcctgcgcgctgcgtgcaatgacttccggctcgtcgtacactgttgcctccctttgattcgcgacattcatgtttaccacatgcacgggtcagcgtaggacaacgtacacttacgagtatccatatcactcactgacatacagcaatgggaggtcaaatgcaggaacttgaggagcgaatccaaagcgagggaacggtgaaggcgggtgatgtgctcaaggtggacgcgtttctgaaccaccagtgcgacgtgcgtctgttcgaccgcatgggttcggcatgggccgctcatttcgccggcaagcacatcaccaagattctgaccatcgaggcgtctggcatcggcattgcgtgtgtggcggcccagcatttcggcaatgtgccggtggtgttcgccaagaaggcgcagtccatcaaccttgacggcgaccagtacaccaccacggtctattccttcaccaagcagagggagttcccggtgatcgtggccaagaagtatctgaacgccggcgagcatgtgctgcttattgacgattttctggccaacggcaaggcgttgcgcggtctgattaacctgtgcgaggcggccggcgccacggtcgagggcattggcatcgccgtggagaagggcttccagggcggcggtgacacgctgcgcgctgaaggctacgatgtggattcgctggccatcgtcgagtccatgaatcccgagaccggcgaaatcacatttaggcactgagcacattgtctgctcccgccggcgggagcaacagagagaagaagagaatcatgtcagagaagaaaaccaagaattccgtatcctttgaggcgctgtcttcgctggacgcacccgtatccttctggaagggcgttccgttcggcctgcagcatgtgatggccatgttcgtggcgaacctcgccccgatcttcatcgtcgcctcggccgcgaaaatgaccccagtccaatcggccaccatcatccaggccggccttctggtggcgggcctgggcacctgcctgcaactgtacggcgcgtggctcatcggctcgcgtctgccgatggtcaccggcatctccttcacctacgtggcggccgccgtggcgatctgcgcagacaagggctatggcgcagtggccggcgcggtaatggtcggtggcctgctggaactcgtgctgggtttgacggccaagtattggcgtcggttcgtgccgcccatcgtctccgccatcgtggtcacgtcgatcggcttctcgctgcttaacgtgggtgccacgagcttcggcggcggcagcggagccaaggacttcggaagctggcagaacctgacgctcgggcttatatctttggtcgcctgcctggcgttccagctgttgatgaagggcacggccaagcagctgtccgtgctgttcggcctggtggtcggctatgtggcggccatctgcatgggcaaggtcgatttctccggtttccagaacctcgccatcgtgtccgtgccgcagttcatgccgttcaagcctgagttcgactggggttcgatcatctccatcggcctgctctacgtcgtctcctcggtcgaggtgctgggtgacaccgccgcgctgaccaaggtgggcctgaaccgtacgcccaccgaacgcgagaccgcgggcgccatcgccggcgacggcctgatctccaccgtatccggcctgttcggatgcctgccgctgacctcgttcgcacagaacatcggattgggggccatgaccaaggtcgtcaaccgcaaggtgattctctccggcggactgattctggtgctggcgagcttcgtgccggccatcgccgaggtgttcaactcgctgccgcaggctgtgctcggcggctgcaccatcatgatgttcggcaacatcattctttccggtttccagatgatcgccgaagcgggcttcacgcaacgcaacatcacgatcgcggcgctttcgctgaccatcggcatcggcttcacccaggtgagcgacatcttcgcgcagttcccggcactgttccaacaaaacttcgcctcgaactgcatcgccgtggcgttcgtggtggccgtgatcctgaac

SEQ ID NO: 1208 - DNA, 10653 bp, Unknown
  R81_24m  MAG No. k141_20627
gcgcaaaacacaacatcagagcgcacagagtgcgccccaactcctactcgcgctcgttgaaaacagcccagtgtggaggcagttcgccgaggatgcgtttgtcgtcgtcggattgccgttgttggtcggtctgcatgtctccgggctcgagtttgacgccgtcagcgtcaaactgctcagcgcctttcatcaccacgcgcttgtgcttgcgcagtgtgcgccgtgtagccgagtattccgccatgattattcaacctcgcggtagatctcgccgatacggctgacgatacggtcgacttccttatcggggttcacgaaggcggcgacactccagacggtcatcacattccagcccaaggaaatgagatcctgtgccgacaaacgatgacgcctgcgcgtggattgcacggacataaagttcgcgtcatcggtctgcacggccaaggcaaacggcttgtccttcaatcccaccacgagcggaatcttcacgcccttgtcgaatccataatcaacagcagcgttcagtcctcgcgcgcgcaacctgtcggcgatatcgtcgaacagcacgttgccgcctgccgcatcacgcaacggaagcaccggacggtcgtcaagctgttcggcccacgtcaacatggtcttcaggaaccgaggaccggactggtgcagtcgttcttcatccaaatcttcggaaccaaaggccgacacaatatccaagctgtggtccgccaatgccagggcatccagcaacagtccgcgaccgcctgtgctttcgagcgggccgaactgctgaagcagacgtccgtgcgtggttttcgcatagcacatcgtcagaatcacgtcagtggcacgacctccggccacgtcacgcaaggaaaccagccgcacatggcgcaggaatcggcccatcgccttggatttgcctgccaacgatttcaattcggcacccaagcgtgtgcggaatgcgtcggtcaacatcacgaccacaagtcgatagctggaaggaaccacagcaaaaccggcggcacgttgcgtaatcagacgcaccacttcatcaatctccgactggctggattccaccagaccagaagacataaccggcacaccgctcgcttccacacggtggaaccgcaccccaccggcagccggctcggtggccacatcatagcgaacaggaccatatccctcggattcaaggaatgcggacaggcgcggcgcacggcgagacggggcagcatccacctcgatatgaggcaacgtgtcgatcagctgcttgacgctttcgctggttaccgtcgcgcagtgggcgatcaccaccacctgctgcacgcggccgatgatggacagcaactcgatagcgggaatgtgcgcgcacgcatcgagaatcgccacatcagccagcacacccggctcggtgagtgcggcgagcgtacccggtgcggccaccagaatcggcttggccgcggccagaatctccggatgatcacggcgaatcctgctcagcgacacactggcgcgccctgccagcacggtgtgcatctggttggcttcctgagtgcgggagaacagcatgtcgcacaggcggcgcatggattcctgcgacaccatcggtccgatggagcgcacgtgctccacatcgacctgtgcgaagcggtcggatgcggtctgcagcgcggcaccatcctggttggagatgatggcggaagaacgcacaatgtcctcgaacacggtggtccaccatgccagctgcacttcgccacgcacctgctccacgcccacccggcgagcgttgagatcggcgaccaactcgttcagaccggcagaagcgaattcctgctccagcaggcaacgctccggcaaggtgtccagtgccttgcgatcatccagcagtgctttcaggcgtgcttccaccttctcgaaatcggcggtttccagattgccgccagcgggtgtggtggaaagcacggtatccagcgcggtcatattgctgaccaacgcctcttgggtggagatgatctcgtcgagcttgctgggcagcaccggccaaccgccgtgaggcacgaactgatgccactgctccccttgcttggcgactaccttcaacgcttcgtgcaagtcctcgacctgcgcgccgacgcgcagcagatccttggcttccttgacgtggcggcggcgctcccagaatcccatcgacgtgccctcggccttgcgctggctcttcggcttggtggcctcgatcatggagctgatgtctcgctcgaaaatctctggctggaacacgtcaagcactcgtcgcagattcttcaaaaccgtaacctgacgctcccactcgcgagtggtgggaggaaccgggaatccacaggtctgcacggtgcgtgccacctgctcacgggtggcgggcaggaagcgacgcagcaaatcgtccacgcgctggtaggcggttactgcctgttcttcagtggtgatggacgccttgtaccatgcggtgtcttccgggccgatggtgtattcgccgagctcgccggcacgttccatcttgctgatccatgtgtcaatatcgttggcgatgctcagggcacttgactcgtcaagtcgaacgtgggtggcggggtgtgtcgggagcacggagatacgggccaggttctgaatggtctcgtatgcggacacattccacttatcgttgcccccgtgcaggtcgcccagatagcgggtcaagcgcgagcgcacgcccacgagttcgtcggccagctggtcgaatcgctgggtggcgactccgggctggaatccgactgcggcaatcagctgcttatcaagcgcggcgttggcgtgttcatcggatacatccagtacctgcgccttcatctcattggcggaggccgtctggatgaacagacgcttctgctcggccacgccgggcacgtacagcacggaacgaccattcatcaggcagcgcgatgcgatggccacagcctgctccgcggtgcccttcgggaaggtgccgtcgaccacgatgctatggccattggcagcaagtgacgcggcatatcgcaccgtattgtccacatcgccgacttcgtactcggcatgcgggtctacgtcgaaaggactgtattgcggaatattggcatctttgagcgcggtgcgggcggatttgtcgccggcaagcgcgtccaacagcacattgccggtggggccattctccagctggtcgatgaactgtcggctttcgctgatcatctgcgacgaggggtccatgaagcatccgagcacaatctggcgctcgatggcgaagccggagatacgctccgatgcttcggacgaaatacgggcgaacatcgcggaagtttcgggagtgccactgtcatagctggcaccgtcaaacagggaatcctcatccaggaacaccccctgctcacgcaatgcattgacgaacgcggcgttcagggtcacgcgaccggtgaatcgaatggtggtcgacaagccatcatcctcgatcgtgacgctcaccgggtacaacagcaccggcagcgcgttgcccctccacgtggccacaccgaccacgagcgacaactccgccacgcccgaaatcctgcgcttggcggcctggtcatccagtacgcgcccgatatggcgttcggcggccttaagcacacccgtgtcgcggaacaacgaatccaaccgaacatggccggaagcgaacagctgggcgatgccggagggatgggcatgggtcatctccagcttcgcggccagttgattcacatcctcgagcggcgatggcggctgcatgctgcggtattggtcacgccagcgacggatgcgattcagaccttccgtgagattctggttctgagtctggctctgggtcatctctcgactcactttccaaccgcttcgcggtattcctgatagcccttgttgtgagacagggcttcgtcaatatcggcctcgccacgggcggcgagccaagaatacatgtcgtcgtacaggtacggattcatggcgaggaacgccagtaattcgggatgacgggcgacttcgaactgaacgttgaaatcttgcgtggtttttgcctcgtcagaggtcaggccatcgacttcgactgccggctcctgtgctttcagctcgcccttggccacacgctcgaacaccgagccgggctcgaagaccggagtgtgtacgcccatggagtagatatcagacgcttcatacgcttcggagaccgactgctgggcggtttcggtttcggtcgccagctgctgatcctcgggtgcgtcggttgccggttgagcggtttcaggctgggtggttgtcggctgggcggtctcagactgagtgttttcagactgggcggcttcggactgagtgccttcagaatgctgtgcaacagcgtccaccggctgagaatcgtcggtattcggagcggactgaacgttttcggctgacttgcttgcgccagccaccacatcggattcaacaaccgccgccgacgccactgccggctcgcttgtgctgggagcgtgcttaacaacggcatgggcgatggcatctaccgggacaataccggagatcctgctgtgcttggatgcgggcgttacagtcgtcgactcaggttcggtctgctgcttcggcagtaccacggagtccatggcctgctggtttttgcgttcggtctcctgctcggcatgctgggccaacgcatccgcgaacaggtcacggggtatggccggctcatcgtttttcgtcactggctgcgtgatattcagcgagccaagttcaagctcgtcgaccttgcgtcgaacattatccgcgctgaagatggcggtcggctcgccggcccgcaaatcaagaatatcgtcgacagacatatccgccgcatccggctcctgcggtgcttcgtgaaccgcatagccaaacaaatcaggcaccttaaggtcgagtggctttgccactggatcgtcgatacgaatgaagtccgcaggcacatcaccgaactgcatgcgcatgggagacgtcggcaacaggaactcgacattggccggcaagcgcaacaaatcaccattttcccgcaccacatacgatccattggtcgatccaagatcgcggaccgaagccgtaccattgctttttaccgtgaacatggcgtgccgtttggacatcgatttggtctgatcggcgacgtcaaggcgggtgttgccatcatcggcaagggggcgtaacggcttacggccgatttccacgcactcccccggcttgacgctgatccggtcgacaccgttgatcttcaccgtccactcgctcaccgtgaccgccttcctggacacactatttgaccacactacgtgccattgtgtcatcttttaccggcttttggcggattactgggcacagaattgacaactttcgctcattgccagctttgtgattccacgccggatcgcgttctccgcctcgccctcgtcaactagtctactcagtatgcggaaaccccgcagcctgaaacacaggtgcggggttcctcgaaaagctgtgattgcggcttatgccgcacaaatcacttgagctcgacggaggcaccagcctcttccagctgagccttggccttctcggcatcttccttcttggccttctcgaggacggccttcggagcgccgtcgacgagagccttggcctcggccaggccgagggaggtgatggcgcggacagccttgatgacctggatcttcttgtcgccgacggcggagaggatgacgtcgaactcatccttctcttcctcagccggagcagcagcgccagcaacagcggcaacagcggcaaccggagcggcagcctcgacgtcgaacttctcctcgaaggccttcacgaactcggagagctcgaccagggtcatctcgccgaaggcttccagcagctcatcgttggtgtacttagccattatggcttcctttcaatcttggcggcggacgaagtggtagatccgctgcctaataaaccttattgtttaaattatcgaagcgactgattcatgccgtgagggcgtaaatcaggcagccttctcctgcttttcgcgcagggcgtcgatcgtacgcacagccttggtaggcagggcgttgaacaggtacgcggccttggccatcgatgccttgatgtcgccggcgaattcggcaagcagctgcgggcgggacttgaggtctgccagcttcttggcgccctcggcatcgtagacagtgccgtcagcggcggcacccttgatgacaagagccttgttgtccttggcgaagtcacggatgaccttcgcagcctcgatgaagtcgcccttcacgaaggtgatggcggtcgggccggagagaatctcgtcgagaccctcgatgcccgcttccttggcggcgatgcgtgccagcgtgttctttgccacggtgtaggaagtatcgcggcctagcttttcacgcagatcggaaatctgcggaacggtaagcccgcggtactcggtcaggtagacggcgtcagcgttacggaattcttccgtaagctgagcgactaccgcttccttttcgggcctcttcatggcgttccttcctaagtcggccgttgacttggagttcggaactttcggctgggcaacaaaaaagccctgcgcacaggcagagcaatataatctcgcgaagcgaccttcgccggcccttgacgggcttatatctctcaacctgcgctggcttggcgaaccaaacttcggaaatgcactcgcgcgcacttcaaccaacggtctgtggtttacggatgactagattacggatggtcagcgacattgcagaattcgggcgtgttgcaaggcattacaacgtggcggcgtactgggctacggacgcggtgacttccttcagatagtcgagcgagcgacgccagtggccgggcacctcgatcgaatggttggcatccgggtattcgtgcacgtgcggggtgagcgcgttggcgcgggctcgatcgtagaacgggtcggcggtgccggcgcagatcagcggtgccgggccggagtatcgggagctggcggcgtgcgactggtcggccagttctgcgcggatgatcgcccttgcttcggccacgctcggagcctcggattcggcgacgatatcatcgccgacagccggcaccggaatcacccgggcggatggatcgaagtcggcgtgatgcagcaccggggtcagcagcacgaacggcagaccgtagtgtgaggccacatgtgggtaggtcatcgtcgtcagcgacttgccgatcagcaacaggcgagggccggacggggtgtcggaatcacggttcggcgagccagctgcgccatcggccagcacggtagcagaatcatcggcggcaacgccatccccggaatcaccggctttacccgcgccggactcgcgcgcggcggccatccagccgtcaatcgcctgattgaggaccggaatcaccgtggacaggtcgtcggaagcgttgcgtacgttcatgcggtcgattcgccagccggcctcgaccagagcctgggccgaccagtagagcagcggacggtcgcagttgtagccggtgccaggcatcagcagtacgcggccgtactcctgaccgggcttgacgacattcttcttccaagaggtgatgctgacttcgacggccggtttcatcgcgcgccttccttccacgggtgtgccctgcgtgtccctgagttgttccgaattattctggcagtcagtctactcccggacccgttcacgttacctccacaagctataatcggccacggttctgattggatgcgcagcgcctgacgcgcgttgggcaggccgatcagggcgagtcgcaattctcgccggggccagccgcagcattatgcgcgcggtgcgcagccccgcataaaaccaaggaagtagagagtaaatggagaagttcttccatttgaaggaaaacggcacgaccgtctcgactgagattctggccggcctgaccacgttcttcgcgatggcctacatcatcgtcgtcaacccgcagatcctgtcgcagacgggtatgccgtggggcggcgtgttcctggccaccatcatcgcggccatcatcggcaccctggtcatgggcctgttcgccaatgtgccgtacgcccaggccgccggcatgggcctcaacgcgttcttcacctacaccgtgtgcttcggcctcggcttcagctggcagcagaccatgtgcatggtgttcctgtgcggcctgatcaacatcctcatcaccgtcaccaagatccgcaagatgatcatcatggccatcccggagtccctgcaacacgccatcggcggcggcatcggcctgttcgtggcctatgtgggcatgctgaacgtcggactgatcaagttcacccccggcgacccgaaagccgcggccaagggaggcgccgtggcggcgaccccgagtctggccgacttcaacgacaaggtgctgtgggtcttcctgatcggcctcgtactggccattgtgttcaccgtgatgaaggttaagggcggcatgctgctggccatcgccatcaccaccgtgatcggcatcccgttcggcgttaccacctggtccaactcgcagtccatcagcgaaaccttctcccagctgccgcagaccttcggcgcgatcttctcagctgagggcttcccggcgctgttctccgacgtctccaagctgcctctggtcatcgtgaccatcttcgccttctccatgtccgatacgttcgacaccctgggcactttcatcggcaccggccgtcgcaccggcatcttctccgccgaggatgagaaggctctggagaacggccacggcttctcctccaagatggacaaggccctgttcgccgactccatcgccacctccattggcgctatctgcggcacctcgaacaccaccacctacgtcgagtcttccgccggcatcgccgcaggcggccgcaccggcctgacctccgtggttgtggcgatctgcttcgccctgtccgcgttcctggccccggtcgtctccgccgtgccgtccgccgcaaccgccggcgtgctggtgatcgtcggctgcatgatggccgcttccctgaaggaagtcaagtgggacgacatcgccgaagccatcccggcgttcttcgcagccgtgttcatggccttctcctactccatctcctacggcatcgccggcggcttcatcatgtactgcatcgtgaagacctgcaagggcaaggccaaggaggttcacccgatcatctggattgtggccgcgctgttcattctggacttcgtgtgcatggcgattctgtaacgctgattgacaacggattagcctttaaggattaatccgccgccatacggcataaaggccgggctctcacaagggcccggcctttgttgttgccacagtgatcaacgcccatgagtaccttcgatgatcatccgccattcaatcaacggctggccatgactcggacatggcgcggcacggcaagcggattttgctgttgggcataacaacagacgagagaatagatccggtcgtgagcaacaggataggtgccatgcggtgccgtgtacaaactgttgtcagttgtcaacgctttttagcgtggctccaatcatcttaatggctgttttccgccattcttgatgcatgagaatagttgtcaactgacaactgaatgtacatggcagcagcacgagtgccctattcaacatcgaaatatgtagcgcgaagaagccgaaaaaccaaaaggcttctataccgaatgaaacggtatagaagccttttggtttgcgattaagctcttctcacccgagagaagctagagaacgatcagtcctcgaatgccgaaccgttaagcgggaagccctgcgggcttcccgtaggtgagggggcggctatgccgcgaccgatccgtgagagggctttagtcctcgaacggatcaaagtcgcgacggacgcggcgacgcgggcgctcagtgcgctcttcgcggtcggcgcggtagtcgtcgtagttgtcgtcggtggcgtagcgcgggttgcggtccgagccacggccacggccgccacggaaaccgccacggcggtcatcacgatcgccacggtcatcgcgatcggaagagcgacggcgacgcggacgatcatcatctcgggaggcgcgagcatcacggtcatcgcgatcgtcgaagtcacggtcggcagaacgacggcgacgcggacgatcatcatcgcgatcatcgcgatcgaagtcacggtcatcggagcgacggcgacgcggacggtcgtcgtaatcatcctcgaagtcatcggagcgacggcgacgcggacggtcgtcacgatcgtcgaagtcacggtcatcgcgatcggagcgacggccacggctgccacggcgatcgtcacggtcaccacggccacggccaccaccacggcggtcatcacggtcgccacggctcgggcgggcattgttctcctgatcctcgaaaccggggatggccagggagatcttgccgcgatcatcgacgccctgaacgatcacctcaacggtgtcgccttccttgagcacgtcttcgacggcgtcgatacgctcgccgttggccaggttgcggataggggagatgtgcagcagaccgtcggtgccgggggtga

SEQ ID NO: 1209 - DNA, 5931 bp, Unknown
  R81_24m  MAG No. k141_20634
gacacgccgccggttccggccccactgccggaaccgacatgggtatgttcatgaccgccgaccgcaggaacgaacaggcccgtccgccacggaccgcatcttgcggttcaggcggacgggccttatgggagggatgggaacgggagatcagttcttaataactgcctgcgcctcatcaccggcggcctcgacggcctccacgacctgcgcctcatcgtcgacgatctcgccggaagcgagcttggcttcgagctcgtcaacgatctgcgcgtgcatcttctcggtgatcttgaccttggagacgaacaccaccaggctgagcacgatcaggatgagcggggcatagaacgcgcagatcttgaagacgtggatattcgtcggggtcatatcggcggcggttgcgtcacccgtcatgccggccgcaagggcgatgaagccgacgatgccgttcgacagagcgccgccgatcttatcgagcatcgggcggatggaaagcgtaacggcctcgttgcgcttgccgttcttcagctggccgtactcgatggagtcggtcagggagaggatgaccgtcatcatgatgagcgtgccgggaacgtagaagagcaccagcgcgatgaagaccaggacgatgttgctggagaacagggcgagcatcacataagccacgatcatggagaccatgccgccgatgtacaggtagcggcgcggaatgtacctgttcagaatcgggtacagcggggacatgaccaggcccgcgatcatggcgatgacaccggtcgcggagaaagcggcctgattgtcaaggacgaacttgaacaggaagagaagcacaccggtggtggtcacgtttgcgatggcgtacagcaggtaggacagggcgacccacagcagctggtcgttctggaacacggccttgaacgcctgcaacggaccaccgttgtcttcggcgttggcgcgaagggcgctttggttttccctggtgccgaaggcgacggtccaggcggtcatgatgccgagcaccgcgacgatgatgccgaaagcggtccaacccgactggtgctcggcgttctcgccggtgaacacccagctgaaataggtgacgaccggaatcacgaggatggtgatggcgttgccgccgatggagccggtgaaggagccgagggcggtgtaggtggaacgttcgtgggagtcggaggacaatgccgggatcatgccccagtaggagatgtcacgcagggagtagaacacgtcaagcacgatgaacgtgatgacgaacacgacgatgaacaatgtggagttaacgttcaccaggccaaacatgccgctgaaaaccacggcaagcagcacggaggagaccagtccgccgaagaactgccacgggcggaaacggccccacttggtggtggtgttgtccacgaggttgcccagcaacggatcgacgaagatctcggcgatgcggatgatcaccacgaggctggtgatgacgccgatcagcttggccgcaagcgccttgtcaacgcccgagaacaggcagctggtgacatacacgatgaagtacgtgctcatcgcgttgtagaaggcggcctgaccgaggttgccgaacgcgtaggcgatgcgctggcctaacccactcttcctgcggacgtcaccgtccgcggcattttcgttgctcattaatcttctccttaagaacccagagcatggaatcactcattgattttgtaaagtaagcatacaagttttatcaccaaaagtaaaaagcattagtaaacaaggagataaacagcgtgtcgcaaggatgggataacatgggctgaaccgagacattgcatggacgcggcgtagcgtcgacggcaagcagtgccagtgatttggaagcggtaaacaggatttgcgttttatataaaaactgtttattcttttcggtaaaggaggccccgacctcctccataatatcattcacaacgaggtaatgacagaaagcaggagagcatgacagacgtcacacatgtcgatcgcgcatcgcaggcttggctgaccgacccgacgatgttcgaggtgaaccggactccggcccattcgagccacaagtggtacacccgcgacccccagagcggacaatggtccgatctcaagcagagccttgacggcgagtggcgggtcgaggtcgttcaggccgccgacatcaacctcgaagaggaacccgcgacggccgagtcgttcgacgactcctcgttcgagcgtatccaggttccgggccacctgcagacggccggtctgatgaaccacaagtacgtgaacgtccagtatccgtgggacggccacgagaacccgttggaaccgaacatcccggagaacaatcacgtcgcgctctaccgcaggaagttcaccgtctccgcccccgtggcaaacgccaagcaggccggcggatcggtgtcgatcgtgttccacggcatggccacggcgatctacgagtgggtcaacggcgcgttcgtcggctatggcgaggacggcttcacgcccaatgagttcgacatcaccgaactgctgcacgacggggagaacgtcgtggccgtcgcctgctacgaatactccagcgcctcctggcttgaggatcaggacttctggcgtctgcacggcctgttccgctccgtcgaactcgccgcccgcccgcacgtgcacatcgagaacacgcaaatcgaagccgattgggatcccgaggccggcaccgcttccctcgacgccgcgctgaccgtgctcaacgcggccgacgcggccacggtccgcgcgaccctgaaggacgccgacggcaacacggtgtggcagacgacgggcgacgcggaggcgcagaccgcgatctccagcgagccgctgcagggcatcgaaccctggagcgccgaaagcccgacgctgtacgaacttgacgtcgacgtcatcgaccaagcgggcgacgtcatcgaatgcacgtcccagaaggtcggtttccgccgcttccgcatcgaggacggcatcctgaccatcaacggcaagcgcatcgtgttcaagggcgccgaccgccacgagttcgacgccgaacgcggccgcgccatcaccgagcaggacatgatcgatgacgtggtcttctgcaagcgccacaacatcaactccatccgcacctcgcactacccgaaccaggaacgctggtacgaactgtgcgacgagtacggcatctacctgatcgacgaagccaacctcgaagcccacggcagctggtccctgcccggagacgtcctcaccgaggacaccatcgtgccgggcagcaagcgcgaatgggaaggcgcctgcgtcgaccgcgtcaacagcatgatgcgccgtgactacaaccacccgagcgtgctgatctggtcgctgggcaacgaatcctacgtgggcgacgtgttccgcgccatgtacaagcacgtgcacgacatcgacccgaaccgtccggtgcactacgagggcgtgacccacaaccgtgactacgatgacgtcaccgacatcgagacccgtatgtactcgcatgccgacgagatcgagaagtatctgaaggacgacccgaagaagccgtacctctcctgcgaatacatgcacgccatgggcaactccgtgggcaacatggacgaatacacggcgctcgaacgctacccgaagtatcagggcggcttcatctgggacttcatcgaccaggccatctacgccacccagcccgacggcaccaggagcctgcgctacggcggagacttcggcgaccgtccgtccgactacgagttctccggcgacggcctgctgttcgccgaccgcaagccgtcccccaaggcccaggaagtcaagcagctgtactcgaacgtccacatcgacgtgacgaaggactcggtgtccgtcaagaacgacaacctgttcaccgccaccggcgactacgtgttcgtcctgagcgttctcgccgacggcaagccggtctggcagtccacccggcgtttcgacgtgcccgccggtgagacccgcacgttcgatgtcgcatggccggtggcggagtaccgcgccgacgcccgcgaactggtgctgcaggtttcgcagcgtctcgccaaggcgaccgattgggccgagagcggctacgagctcgccttcggacaggccgtggtgcccgcggacgccaccgcgacgcccgacacgaagccggccgatgggaccatcaccgtgggccgttggaacgccggcgtgcgaggcgccggacgcgaggtcctgctttcgcgcacccagggcggcatggtctcctacaccttcgccggcaacgagttcgtgctgcgccgtcccgcaatcaccaccttccgtccgctgaccgacaacgatcgcggtgccggtcatggcttcgagcgcgtccagtggctgggcgccggccgctacgcccgctgcgtggacaacgtgctcgagcagatcgacgacagcacgctcaagggcacgtacacgtatgagctcgccaccgcgcagcgcaccaaggtgaccgtctcctacacggcccacaccgatggccgcgtgaacctgcacgtcgaataccctggagagcagggtgacctgcccaccatcccggcgttcggcatcgaatggacgctgcctgtgcagtacacgaacctgaggttcttcggcaccggcccggaggagacgtacctggaccgcaaacacgccaagctcggcgtgtggagcaccaacgccttcgccgatcatgcgccgtacctcatgccgcaggagacgggcaaccatgaggatgtgcgttgggccgagattaccgacgatcacggccacggcatgcgcgtcagccgcgccgatggtgccgcgccgttcgcggtaagcctgttgccgtactccagcttcatgcttgaggaggctcagcaccaggacgagctgccgaagccgaagcacatgttcctgcgcgtccttgccgcacagatgggcgtcggcggcgatgattcctggatgtcgccggtgcacccccagtaccatatcccggcggacaagccgatcagcctcgatgtcgacctcgagctgatctgatcagaattgatccgatagtccaccgtgcaaacgatgtggcccccgacttcctcgcaggaagtcgggggccacatcgtttgcacggtccttgttagtccagcggatgcgccggatatcgatgcagatccaaacctagtcgttgtagagcatcaatgaataaagatgtcactcataagctatcaagagaatccagaacttttttgaattcatatgctcgacacgcaatgtatccagcgtcgtttataatgattcctcgtgccttaatggcgcatcgggctatagcgcagtttggtagcgcgcctgctttgggagcaggatgttcccaaaacgttgcgcttgcgacacccgataagccctattcccgcttgggttttaggacttcaactaaaactgaaaaatgaccgccagtaacactcagtaacaatgaccgcagacctccgattttctcggcctatctgagtgtcaaaaatgagtcatctggaggcacagaccgtcttgaggtatgtgtagactaaaaaagttatgccaagtgacataattaccgggccgtagcgcagtttggtagcgcgcttgctttgggagcaagatgtcgcgggttcaaatcccgccggcccgaccacgaaagccctattcccgcttgggaattaaggctttttcttttgcttgaaaggccgtttcggaggctgaaaaagttttactgagtctaccgacgcaaatctttccaccttatacttgttaaacaagtgattcatgcgctttcgacgtcgaagcgtaaggatttaaggagtcgatatggaagacgagccgctgtaccgcctgataatgcctgacgggatgcatttggccaatcctcaagacgatcccagc

SEQ ID NO: 1210 - DNA, 4363 bp, Unknown
  R81_24m  MAG No. k141_20817
aggtcgccggcaaggccgaggcttacctgaagtccaccggcatcgccgacaccgcttccttcgcccctgaggccgagttcttcatcttcgacaaggtgcgtttcgagaactccatgcagcgctccttctacgaggtcgactccatcgaagctccgtggaactccggcgtcgacaccgaagaggacggcaccccgaacatcgctttcaagaaccgcgtcaagaagggttacttcccggttcctccgatcgaccacacccaggacctgcgcgacgacatggtcgccaacctgcagaaggtcggtctgatcctcgagcgttcccaccacgaggtcgccggcgctggccagcaggagatcaactaccgcttcaacaccctgcagcacgcaggcgatgacctgatgaagtacaagtacgtcgtccacgagaccgccgctctggccggcaaggctgcgaccttcatgccgaagccgatcgccgacgacaacggcactggcatgcactgccaccagtccctgtggaaggacggcaagccgctgttctacgacgagaagggctacgctggtctgtccgatctggctcgctggtacatcggcggtctgatcaagcactcctcctccgtgctggccttcaccaacccgtccctgaactcctaccaccgtctggtcccgggcttcgaggctccggtcaacctggtgtactccgctcgtaaccgttctgccgccatccgtattccgctggctggcacctccccggctgccaagcgcatcgagttccgcgctccggacccatcctgcaacccgttcctggctttctccgctcagctgatggctggcctggacggcatcctgaaccacatcgagcctccggagccggtcgacaaggatctctacgagctgccgccggaagagcacgctggcatcaagcaggtgccgagctccctggccgaggctatggacgccctggaagaggaccacgacttcctcaccgccggcgacgtgttcaccgacgacctgatcgagacctggattggcctcaagcgcgacgagatcgaccaggctcgcctggccccgaccccgctcgagtacgagctctacttccacatctgagtttgagagcttagcaacgttgggatttcgccattgctcttctcttgtgggagtctaatgggagtcattcagcgtaactagaaagaacctcgtgaaattcgtttcacgaggttcttttttgtatgttgcgttgtgtgttatgcgatgtgtgttgctcctggaatattccaggggcgggccgctacttagtctcccaacgctccttgagtacataggcggcggctttgggctgacggtcgcgagtgaagacgtccttcttgttgccgtcgacgcgcatgataccttcaccggtttggaagtcgcagaggttccatacctgctcgcccaccactgcctcgaacatgtcgaacacttcgtgctgcatggtgaggtactcacactggtattcctcactccactgcacgcttggcagcttgtgcgcaccggcatcggtgtccgcaccgtattcggtgaacaggaatggcttgttgggttcggtgttcatccattggttcatctcgttgatgaaggccttcttggctccgatgagctgatacccatcttgcacatatcagccgtaataccggttcaggcagatgacatccgcgaactgatggcacttgtctttgcctccggcggccatcagcagattggtgtaggtcagcgggcgatgctgcggatcgagcgtgcgcgcgtaatcgaatatctccttgaaatacggcacggccgcctcggatgccgagtcgttggcggcgtcgatgagattccaagcgccggaggcccccggcattcttttcgtcgaaggggacaattcagaacacaactgccgacacaatcgtcagggaggccagcgagaacagcgtgcttacaagcacgaagccgaccgcatactcgggcatgttgttcttgcgaccggtgaacatggcaatggtggtcatggtcggcagtccggcgatgaccgtgatcatcagcaccatgtcatgggtgatcggcagttgcggcaatgcgccggtcagcgcggtcagtagcgcgtagaaggcgagcgggaatgcgatcatcttggcgactaggccagcatagagttcgtagcgtttgaggacgccccaccacttggtcagcgcgaacaggccgcccaagtagattagcgacatcggcgtggccatattgccgatggtgtgcagcggcttcaggatgatgtccggcaccttgacgccgagcagaatcagaatcagggcgagcatcacgccgacgaaggcgggattgatgaatcgtttaagcaggccgaggacgcgggcgcctggcgaggggcggacgacggccggagaaccaccgtttgcggcattgctcgccgaaccagcattgcccaccgaaccggcgccgttcaccgaaccgttcacgaccgcacctcgcgcgccaatcgcgttgccgtcagtcgcttcgtcgaccggctcgcacagccatacgccgtacgtccagagcagcgtctggtcgatgatcgacatcagcgccacgtaaatcgcgccgttctgcggccaaagtgccataatcaacggaatgccgatgaatccggcgttgccgaaaataagcgacgcctgaaatacatggctacgcgaacctttgagccgcaacagttcggcgaccagccagaacaccaggatgagcagcgcgtacatcacggcggtcagcagcatcacgccccagttggcggcaagctgcgcgcggtccgcgccgtcgacggcgttcgagaacacaagcacggggatgagcacgttgagcagcagcgagcacatgccgtccaacgccgtctgaccatagaaccggagcctcacacatccgtatccgaccatcagcatgatcagaaatccgactaactggccaatcatgacgccgaactgccccatgcacactcctctcgtttgctctcccgcgatttcctgtcactggttcatataggcagccatctggacaggctcggcggcacacgcatcagtatgttcgataccaccacatgccaatccacttctcgttcaaccgttccccgtgctaatgcgccgcctgccaccccgtgttgccggtgctgcgcgagcaccgctacgtgtattgcattccggtggccctcgggcgcaacgtgtgggtcggcgcgaacgtgtcgattctgccgggagtgaccatcggcgacaattgcgtgattggcgccggttcggtcgtgacacattccatccccgccaactccgtcacctacggcgcgccctgcgaggtcgtgcgtgaaatcggcgacaaggaccgcgagtatttctacaaaaatcgcaagctcgacgtgtgggagtgagctttcgcgctactgctctttgagcttaaaacgctcactgaattggcggtcgcgccagtagtagatgtcgtcgcgttcgttgatttcgcgaattaccttgcacgggctgccataggcgaccgtgttggcggggatgtccttggtgaccagcgagttggcgccaatgaccgcgttgtccccgatggtgaccccgggcagcacggtgacattcgcgccgatccagacgttctcgccgatgtggactggcaacgaatactgggcaccctgatagcgcaggtccggacgcacgggatggccggtggctacaagcgtgacgttggggccgatcatggtgtgggatccgatgaagatctcaccatcgtccaccagcgtcaggttgaagttggcgtaacagcgctcgccccaataagtattgcagccccagttcgcatacaccgggcattcgaggtacagaccctcccccgccgcgccgaagaacgcctgtatgagttcggtacggcgcttcgggttggtcagcggcgtggcgttgagttcgagctggagatcacgctgggcggcctgcaaatcaaaaaagccgtccacatcatccggcaggtagacctcgccagagaacataagcgccattttctcgcgcgtcgcatcatcgataatcggcttggcgatcggcttgtcttcggtcatcattggctcctgttcggcgttttggcgattgtgtcggtcgaactattctgtcacagactcgttttcaacacccagcattgagcgcagccagtcgagctcggcggcagtttcggcatcgtgcacggcgatgatgccgcggcgataggggtcgtcgatctgctcgatggagagcggattgccggcgtcacaggcatcaccgtcaaggctggcgccaccgtgcaggtcatcgaccgcaacccggacaaggccgcagcagcagcggctgaag

SEQ ID NO: 1211 - DNA, 4899 bp, Unknown
  R81_24m  MAG No. k141_20975
atcgaagtgcgcggggcgcgcgtgcataacctgaagaacatcgacatcgacattccgctgggcgaactggtgggcgtggccggcgtctccggttcgggaaagagctcgctggcgctcggcgtgctgtatgcggaaggttcgcggcgttacctggaagcgctgtccacgtacacgcgccgtcgcctgacccaggccagccgcgcccaagtggacgaagtgctgcatgtgccggccgcgctggccctgcaccagcggcccaccgtgcctggcatccgctcgacgttcggtacgatgaccgaactgctcaacagtctgcggctcctgttctcccgcgtcgcctcgcacgtgtgcccgcattgcggggcgcgcaacgagtcgacgctgaacgcggcggccggactgcccatcacctgtgctggctgtggcaaggaattccacgcgcccggagccgaatcgctcgctttcaactcggccggcgcctgcccgacctgctccggaaccggcattgtgcgcgaagtgaaccgtgcggccctggtaccggatgagtcgaaaagtatcgacgacggtgcggtgctgccatggggctcgctcatgtgggaccttatgaagcaggtgtgcggcgcgatgggcgtgcgcaccaacgtgccgttcagcgagctcacgcccgaagagcgtgacatcgtattcaacgggccggccgtcaaaaagcatattctttacaagccgaagaaaggcgacgatttcgccgaactcgacttcacctacttcaacgccgtatacacggtggagaacgcgctcgccaaagccaaggacgagaaaggcctgaagcgcgtggcccggttcctcaaggaaggcccatgcaccgactgcggcggcacacgactgagcgtcgccgcccgggccccgcatgtgcgcgggctgaaccttgccgaagccagcgcgatgaccttggatgcggcggtggattgggtgcgcggagtgccggaatccctgcctgccgacatgcggacgatggccaccaacatctgcgaatcattcctggacgtggcctgccgactgttggatctgggcctcggctatctggcgcttgaccgcgccggtgccacgctttcaaccggtgaacgccagcgtgtgcagctcgcccgtgccgtgcgcaaccgcaccaccggcgtgctgtatgtgctcgacgagccgtccattggcctgcatccctcgaacgtggatgggctgctcggcgtgatgcatgacttggtggcggacggcaattccgtggtggtcgtggaccatgacgtgcgcgtgctcaaggccgccgaccatcttatcgaaatgggaccggttgccggcgccgaaggagggcatgtgatcgcgcaagggacggtcggcgaggtggcggcgaatccaggcagccgcattgcaccgttcctgtcagatcaggcaaacgcgcgtattcgtgagcgcgtggcggaaccgcaggtgttcgaccttggccacatccgcatgacaaccagccagttgcatacggtcaagccgctggacgttgatattccgcgcggccggctcgtggcggtgacaggcgtctccggctccggtaaaaccacgatggtgctcgaatcgctgattcccgcactcaaagcgcaggcggcgggggagctgttgccggaacacgtgcgcgagcttgagaccgcgggcatcagtcgcgcgaatctcatcgacgccacgccgattggcgcaaacgtgcgctccaccgtggccacctatgccgatattcacgacgaattgcgccgcgccttcgcccgcacggacggcgccaaggcgggcggctggaaggctggcgatttctcatacaacaccggccgactgcgttgccccacgtgcgacggcaccggttcgatctcactcgacgtgcagttcctgccggacgttaccatcgaatgcccggattgcggcggatcccggtatgcgtctgaagccggcgcgattcggcgtgccgttaagggagaatcgcacctttcgttgagtctgccccaactcatggcaatgagcgtggatcaggcattggccgtgacccacgacctcaagaaggtccacgcacgtctgaccaccttgcatgatttgggtcttgggtatctgacactcggcgaaccgacgccggcgctttcgggcggcgaagcccagcggttgaagctcgccagcgaaatgggcaaagcccaatcggacgcggtattcgtgttcgatgagccgaccatcggtctccacccgctcgacgtgcgtgtgctgctgggcgtgttcgaccggcttgtggcgagcggcgcaacagtcgtggtcatcgaacatgaccttgacgtgatcgccaatgcggactggatcatcgacatgggtccgggcggcggcgaaagcggcggacgtatcgtcgccaccggaacgccggaacaggtcgcggccaatccgaacagcatcaccgggcggtatctgcgctgacttgtatggcggtcacgcgcctttgcataggaccctgcgcgagtaggatagccgtccatggtgcagattcatggcattagacgcgcgagcgcggacgcgaaatatcggcagatgaccgggcagccggtcaagccgctgattctcaaactgtgtttgccggccgtcatctccaatctggtgaccaccgcctacaatctcacggacacgttctttattggccagcttggcaccgcgcagtccggcgccatcggcatcgcgttctccatcatgaccgtgatgcaggcgctcggcttcttcttcggcaacggcgcgggcaactcgatgagccgcgaactcggcaaacagaacaatgagcgcgcctcccgactactggccgtgggcttcgcgggtgcggtgctctctggtttggtgattgccacaatcggattgctgaccctgcggccgctggtcgtcatgctgggatcgacctcgacgatcgccccatacgccgtgcaatacctgatgccgttgctggtcgccgcaccctgtgtatgcgggtcgttcgcgctcaacggactgctgcgataccaagggcaatcggcgttcggcatgatcgggctggtttcgggcgcattgctgaatttcctgctcgcgccgttgtttatcttcgtgctgcacctcggaatttttggtgccggcctggccaccgccatctgccagacggtgagcttcacgattctgaccacaatgagccgcaaattcggcgtgatgaaactgtccctgcgcaattgcaggccggatgtgctgctcatgcgcgaagtggccggcggtggcctgccctcgctgatccgccaaggcgccggttcgatttccgtgacctgcgtgaacattgccgccaatccgttcggcgatgcggccatcgccggcatggccatcgtgatgcgcattatgctgggcgccaactcggtgatcgttggtcttggccaaggtttccaaccggtgtgcggctacaactacggtgccggcctgttcgcgcgcgtcaaagaagggtactggttctgcgtgcggctcgccacctgcgtgctcgtggtgttggcggtgttgctgtgggtgttcgcaccgcaactggtcgagatcttccgctccgacccggccgtggtcgcggtgggtgtggccgcgctgcatatccaatgctgcacggtgattctcaacggcttcaacatgatgggcaatatgatgacccagaccatgggccgcaccggcatcgcctccttcctggccctgtgccgacaaggtctgtttttggcaccgatcgtactgattctgccgatgatgttcggcgtgctcggcgtggaaatggcccaatcggtgtccgacgtgctgacattcgtggtcaccatcccgttcatgcggcgaatcctgcacgaattgcggtagatgtcatcaagattttcgacttccagaccaggtggaccgagcatatctcgctgaatctctgtagtttttccttaccgttgcgttcattaggtcgattatgcgttcattaggtcggtgccctgcttagcatgagataatgagcattggaatgaagccattcttgaaggcagtgttcatcacaagtgacctaatgaacgcataatcgacctaataaatgaatggcggatggctaatacggagcctgaatgcagaatatgaaacgtatgaaagccaaccaggcacacaagtggcctgtgccggagcgcatcgaattgctgtaccgcaccatggctgacgcactcggcccgaccggatggtggccggcggagaccacgttcgagattatggtgggcgcggtgctgacgcagaatacggcgtggggcaatgtgaatcgttcgcttgcggcgttgaacgcggagggtgtgctcgaaccccataagctggtggccatggagccggagcgtttgcaggaactgattcgaccgtcaggcttttatgtcaacaaatccaagaccgtacagtcgctgagttggtggtatgtggagcgttgcggggccgcgcccgagggtgccgcggctatttccgatgccgaattacgggccgagttgcttggattatttggtattggcggcgagacggccgacgatctgatgctgtacgtgttctcgcgccgcacattcgtggccgatacctacgcgcggcggctgttcgccttccttggattcgacgtgccggccggctatccggcattccacagggcctattcgcccgtggtgctggatacgaacctcagtgtcaaggatttgcaggaattccatgggctcattgtcgagttcggctaggcctaccgcgacgacgcggccaaacgcgagtcctttttgggtggatggagggcttgactgcacggcgaatcgttctcaataagaaaagtgtgaggcccgcacggtgccaatcgcacatctgaat

SEQ ID NO: 1212 - DNA, 3008 bp, Unknown
  R81_24m  MAG No. k141_21196
cgccaagccaaattggggtgtggtgtaattggcaacacagctgattctggttcagccattcttggttcgagtccaggcaccccagccaataaccctcgcggattagcgagggttttttgtttttacacgtcctgctcatgagatacggccgagagggtaatcctgaatagacaactctggggcaaagactgggctatagtcccaatccgtgactcaaaaacggcagaaatcccgcgtccgaacgtaaggggcgcgggatttctgccgtttcgggccgtgcaggaccggccgacatcgcgcgttgccgcgacttgagcgctgtccgatcctgaaaacgtgagggagaccgacctcgtcttacttcttgaccgcgttgacggcgtcaacagccttctgcagcgacgtggtgtgctcgtggtaccacgtgacctgctgttcgagtttcttggtcgcggcctggtagcccttggtgtcgtcggccacgcagccttcgtacgtcggcagttccacggtcagttccttggacagcgcgtcgagagcggaggcgtccgagacgtctgccttggtcagagcggcggcttctgcagcatcgccattgaccaagttgttgtagtcgttggtggcgttacgtacgtcttccgagacggcggcgcaggcggccactgcgctatcgtactgagacgcgctgtatgcgcgggtgccgaacaccgcgaccgcggcgataatcgccaccgccacgatggcaatcactatagcgacccacttcgtcactcgcttgttgtgcggctgtgccgtcgcttctgcttggttctgggattctggctggttgccgttcgcctgctgtgcgtcagtcatatttacctctacttctcactgcccctgtttgtatcttgcggagggcctgtttcaaacaacgggtatccaacatatcgaggagagccgagattgccgggcgtttcctactggttgcgctgtggcgtggccgtttttgtctcatatggcgaaagtatgcgccagaggctattgccggccggtgacccacggcgcatccgaatggacgtgcggaatcatcatcgcgatgaccgccagcagacacccgagcatcaccatcaagatgatgttttcgtgtccgtgcgcctgcagaagcgcgccggtcagcgcgccagacgccagcgccagcattacgaccgcacgccgcccgagcttcgactgctggtggccgtgtgccgaagcgtctgcgacgacgccggtcagcgtcatcgtgagcacggtggtgggcaggtccggcaccgacagcttgcgggcggtggagttctggatgcccattgccggggcgagcagcacgatcagcaggatgatgtgcaggtcgatgtgccgtgcggtggggaagttcaggctcggctgtgaggcctgtgaggcctgggtggtctgtgcaagccgtgcaatcgaggagacgccggacgcatcgtctgcggggccggtgatgagctggttcaaaagatagacgccgattagcgcggcgagtacgaacgacgcctgcacgcaggtagaaaccaacagatgcttggcccggttctcctcgaatcgccggatgatgcgcccgccgataagcgcgccgaccatgaaggagacgagcgtcagcgccgacgtccaccagacgaagccttgggcatgggcgatcgaaaacccaagaaacacgatgttgccggtcacgttggccacgaacacatgccccagcgacaggtagctcagcgcgtccaccagcccggcgacgaacgtcagcaccaccaaggcgggggagagcagaccgtatctgtcttccttgcggggaaccaacgtgcgtcctgcttcggcaagatgtgatgtcatggttgcgacgaggctccttttcgggattgaaattatggcgagaacgtgcgtcggtcgacgccgccactctactccctactcccgtacggttcctccggtttccgctcgtgcgcagatcgtcggggcggagaagacgccggtgatgcagatcgatgtgccgaaatcccgcagcgtggtctcgaccaagtcgggcaaggtgttgcgacgccgtatgaaggtggatggtacgccggagagcgtgccgatgtacccgtacgagatcgccacgcgcctgtccgatttgggacgtttggacttttccgcgcagccggtgccggatgcgacccgtgatgatttcgatccccttgaacgcgaccgtctgcgccggattatcggcacctaccaatccagtgaccgtaatttgttggaactgaccgatgaggagctggagaaatccctgcaattgacggtgaccgtcgatggcaagaccatgccgacgctgaccggtttgctgctgctgggcaagggggagtctctgaaacgcttcgttccgactcatcgggcgtctttccaagtcatgtctggtacggatatcaaagtcaaccaagactatgccggaccattgctgaagaccatcgagcaaatcaacgacatgttctctccttggaatccaagcgtcgagctatccgtcggtctgttctcaatgatggtgccggaattcgaccatcgggcgttccgagaggcgctggtgaacgccttcggccatcgtgactacactctgctgggacgtgtgcgcgtgcagttggatgatgcggggcttaccatcgccaatcccgacgggttcgtggagggcatcaacatccataatctgcttaccgccgaaccgcatggtcgcaatccctgcctgatggatgcgttgaagcgaaccggtctcgccgaacgtacggggcgcggcatcgaccgtatattcgagggtgctttgaactatggtcgtcctctgcctgattattcgaggtccaacaggcgtggagtgtcggtgctgttgcctcgtagtgtgcccgacaaggcgtttgtggaactgctggccgaggaacgtgagcgcagcggcaagtccatgtctctcgatggtctgcttattttggacaagctcaagagtgaac

SEQ ID NO: 1213 - DNA, 8648 bp, Unknown
  R81_24m  MAG No. k141_21246
ggacgcgctcggcgttcggcgggcgctccttcacgctggcgtcgatccacttggcgccgtcgccggtgacgatccgtatggaggcgcgctgctcgtcggccggctgtcggaagaacaggtcgagcacctccttgccgtatccgtcgcgcgcccaagcgacccgtctgcgcttgtggtcgacggccacggtgatgtacgtgtgcccccttcctgcagctggtctcgtccacgcctatcgcggtggggccgtcgaacatgcacggcatcgaggattccaaccgggcggcgaccctgcgcgcgatatggccggcggtcctccacgcgatgcgtgggaatccgcccgcggtcttctggttggcgaccgccgccggccacgcgcactccatctcgaaatccccggtgagccggctgtccggctccgcccacggcacttgggcggccaccacgccatgctccgcgcacgccacgcgcggcgccaggcccatgagctcgaccccatagcagccgaagtcctggtggcgccatcgccgttcgccgccacccctcccatataacaggcccgtccgctatgaaccgcaagatgaggtccacagcggacgggcctgttcgttcatatggtcggcggtcatggacatgccccatgcctactccggcaacgaggccggaaccggcggtaccgccacgacacggcaactcgaccggtatagggacggtccataacaagttcatacggttcatcgcacattgaacatcagttgaacgacgaatgatatttgatgcgcgcaccatgaacagtgcctgaatcagccatcgtctccgaaaagcggcggatagccttgtaaaggccatgatgcgtaggcgcattgcaacggcacattcgcatcgtcgttgaaataggagagtgctagggagagcctggtcatgcatataggaaagatacgcaatatcatcaaaccagcggtggcgtgcatagcgcttgccgtgttcgccgcgccgggtacggtagtctccgccgcggcgcttgaacgtgaaggtgccccattggatgtggtggccgattggaaattccagcaggcgcattccaccggttccatcgacggtggtgacctggtcatcaaggatatgtcgggcaacggcaacgatctgcacatgcagacctacgggaaaaatgattacaagctcagcgactatgtcaactggtcgtcgaattcgatgaacggtgacggtggtggaagcctgaagctcaacggcgacagcgatctggcgcataagaaggatcatcccgagcagcgagatcccaagggcgcggatttcatcaccgcgagcggcgctcccatcaacaaagagcaatttgccaacggatacaccatggagttcgtgtactaccttcccgatgacttcaacgccagtaccgattcgtggatggggcttgcggccaggcaatccacaaacagcaacatggatgaacacgagatggggtcgatgagcctgtcgatctccaattgcaaggaaacccagttcaaggccgccaacaaggacaatgagtcgaccatgaacaccgatgatcccaacaacggcgtcaccagctggggcgtcaccatggatcacggtggcgtttggtatcacatcgccgtcgtatccgatggcacgaacgtggtgacatacaccaacggtgccaaagcattccgcaatatcaacaagaacggcaatggcctgtatgccgatccgaccgatggtcgcttccgcatcggctcgtcgtattacaacgacactttcgacaccagccaatacaacaaggacgactttgacaagttcctgcgtggcaacctgcaggaggtgagattctcccgcggtgcgctggcacagggcaactggatcgtgcccaacccgaccgagtatctcaaggattacggtaccaacgatcgtttcgtgctggacaaccccagcgtacatacgatggctttcttgccggacacgcagaatgccatccgttgggcgcccacggtgatggaccgagccatcgaccagttcgattcggaagattccagtcttaatctgaccaacatcgtgtccctcggtgacgtggtggataactgggacagtgacgcgcaatggcaggcatcgtccaaggtgttcgggcgtatgcagaaagtgggcgtccccttcctggagcagccgggcaatcatgattacaatggaggcaggcatggctacggagtgcccagcttgcgcaaggcggacaattacctgaaacacttcggacccgactccgatttcggcaagtatcagaaagaacacggttttgcatactcgcccgatggcctgtcctcataccatctggtagacaacggctcctacaagtatctggtgatgaacatcgacatgggcgcggtggtcagcaactcgtcctcggcaagcaatgacgatatgcgatggttcgagcaggtgctcaaagaccacccgaacaacccgactgtggtggtgagccacgatatcttcaagtgctccgattcacgtccgaatgaaatctccctcgatgacgattccggatacaacggtgaagccggtgacgatgaaggtgctggctcgaaaatctggaacatcgtgaaacggtacaaccaggtattcatgatgtactccggtcacaatcacggatccggacaaatgaccctgaccaatgacgccggcaatccggtgctggggctgttgtccgactatcagttcgcgtataacggcggcaatgcgttcttccagtacgtcggcatggatgaagcgaacaacaagatcaccatgcgtacgtattcgccatactcggcatcgctgcccgcggccgagcgttcgttcttcgatgtcaactccctgaccggtgtcggcaacacctatgacggatcgttcgatttcgccaaacgattcgccggttacgaacattcctccggttatgacacgcagcagtcggtgatctccttggtgcgcggcatcggtgcgttgaatggtcagacgccggcgagcgaagtacggcaactatatactgctctggccgcattgccggataatgtgaaagcgcaattcggtgatccgtcggatagtggctctctggcaggcagactcgccgccgcatacaatgccgcgttccccaagccggaacagcccgacaccaagcccggtgccggcaatcagactggaagccaaggtgggcatcagggtggacagtccggaagccagcaagggcagaagggcgatggccatggcaaggggcagacgaatgccggcccggaggcaatggcctccactggtgccgatgtggccccgatcgtcgttatcgcgatgatgacgatcttgttggccggcgtgcttgtgctcgtgaagcgtaagcatcacctttcgcactaaccgattaccggtgtgcaacctgtcgacgagcgagcagccaatagctgggcttgatatagaacccgcggtactggttgctcgctcgtcgaatcagggaaaaccgaagcacgcttcgcgccaatgccgaagacgccgatggcttgccgtgtcgccacctgcgcattggcgtcatgattgtcgtgatcgtggcctacgtgatgttcggcccgtttcgcggcgacatcgttctggtctttggcgcgtcggcgatcttctacgtttccggtacgttcgcgtttccggtacgttcatcatgatgacggtcatcctttccctgaccggtcccatcgagcacggtcaggaagagcggcaagccatcgaggtcggaaccggcggtgtgtcacctgtcggtcaggagcctccatcaactagtatcagctagtatccgatatgaagccgtggcctcattgccaatcgccaagggaggaaaccgtgtgcgcgcgacgtgactttgcatggccgaaactgctgaccgcggacggacgcggcatcgccttcggcggcgactacaatcccgaccaatggccggaggacgtctgggacgacgacatccgcctgatgacccaggccggtgtcaacaccgtggcccttgccatcttcagctgggaccgcctccaacccaccgaagaccattgggatttcggctggctcgatcgcatcatcgacaagctcggcaaggctggcatcgcggttgatttggcatccgcgacggcgaccgcacccctgtggctctacgaaaaccatcccgaagtccttccgcgagacaagtacggtcatccggtcaacgccggttctcgccagtcctggagcccgaccagcccggtgttcaaggaatacgcgctaaccctatgccgcaaactcgccgaacgctacggcgccaacccatatgtgacggcatggcatatgggaaacgagtatgggtggaacaatcgcgacgactactccgacaatgcgctcgaagccttccgcgcatggtgccgccgcaagtacggcaccatcgacgcacttaaccaggcgtggggcaccacgttctggggacaggagatgaccggtttcgacgaagtgttcatcccgcggttcatgggtgccgattccatggtcaaccccggccagaagcttgattttgaacggttcggcaatgacatgctgctcgacttctacaaagccgaacgtgacgcgatcgccgaaatctgccccgacagacccttcaccacgaacttcatgatctccaccgaccagtgctgtatggactacgccgcgtgggcggaggaagtggacttcgtatcgaacgaccactacttccacgaaggcgaatcccatctcgacgagctggcctgctccgacgcgctcgtggattcgctggcgctcggcaaaccgtggtacgtcatggaacattccacctcagcggtgcagtggaaaccgctgaacacccgcaaatgtaaaggggagacggtgcgcgactccctggcccacgtggccatgggcgcagacgccatcaacttcttccagtggcgcgcatccgcgttcggcgccgaagcgttccattccgccatggtcccgcacgccggcgaggacacgaaactgttccgtcaggtgtgcgaattgggcgcgacgttgcgggcgctcgccgacgccggtgttcaaggcagcggattggcggcatcggacacggcgatcctcttcagcgccgaatcggagtgggccacccgatccgagacattgccgagcatgaaactcagccattggcatgatgtgcgtgactggtaccgtgcgttcctgaacgctggtgcacgcgccgacatcgtgccgctcgcctacgactggagttcctataagaccatcgtgctgccgaccgtactgatactgagcgatgccgatacgcggcggttggccggtttcgtacaggccggaggccgtgtggtggtcgattacgcgaccggtctgctcgacgagcgcttccacacgtggctcggcgggtatcccggtgcgggcgatgggctgttgcgctcgatgctgggcgttcgtggtgaggaattcaacattctcggtgctggggcggaaggcgagccgaacgagattcggctgacgggcaccggggattcatccacgatggacggtgccgtgacccgcctgtggcagaacgacgtgaccgtcgccggaccgcatgtgcaggtgcttgccacatatgccggcgaagaagcggatgagtgggagcttgatggcacggccgcgctcacccgcaacgcatacggcgcgggggaggcgtatttcctcggctgtgatctgggcgtgagcgacctgacgcgattcgtgagcggctggcttgccgtgcagccgcaatcctcccgtcagccgcaggccaacagtcagtcgcaatccagccgtcagccgcaagtcgtcggcgcgacccctgatgttctgcacaccgtgcgtcaatccgacgacgccatattcgacttctatctgacacgtggcagatcggatgtcgaactgcgtggcatcgccggggagccgatcgtcctgttccgggcggaacggggcagtgacggcggtgcgtatacggtgcatcgcaatggcgttctcgtggtgaaacgcccgaacccgtcgctgtagtcaattgcggcgaaacaagggaatgggggcgcggacggttttgggaaacggtccgcccccccctacagagattccggtggcgactggctgtttccggctctatttcaacgtttttggactgccgcttaagtgcctggccgcttaagtcgccgctccttcggcgtgccgcgacgggccgaaacggatagttggtgtagcagggcagcctgaggttgtgtcttgctggtttgggaaaatgatggggaaggaatttggccgatactctggtgcagcgaggagtgggccggggagggggtcctccccggtgttgttatgcggcgttggcgaggaagatgtgcttgtggtgatactcgatgaactcatgcgaaggttggctgattgccggcaatgagatctcatgtccatcgaagtcatagagccatctgtcgttgatgtcggagtgccgcaccttgtcatggttgaccatgatgcggtagtcgtcatcgatggagatgaggccttggtcgaaggcccgatcatggaaggcgttgagcaacggcccattcgatgcggcggttttctcgttgggcgtcgatgccttccaaggtttgatgtgactggcgatcagtagtttgggaatttgcatgccggttatgcagcatgtgccgtggtagttctgcaatagtgagttgcggaaataggattggttgacccgctgaagcatggttattggtcgttcctctctggtgggtgcgtgttcgtcgatgagcagggctgttgctgtttcgagcggcgaatgacggtcgggggccagaggggcgggggtgaagttgcttgcgttcgcttgcaggagtgcgcgtcgcagaacatccaggcactgctccatgaatgcatcggggtcttcggcataccattgccagacttgggaatcgagtttgctgccatgcttcatacccacgcgaccgcaggccttgcggttggcatcgtaggctgcgatgttccagatcttcaatgccactgagctgggagtgcggtgcaggaatgatgcaagacgctgcacgtcaagccctttgtcatcgcattctcgcggttcgagcacgatatacaaggcgaacgccatcatcgtctcttctcgtgaccaattacggcgaggtgctgatgagctgacgtttattgccatgaaatccaggatagttcggaatggctgatctgattgattgatttgtatacgtatctatcagaggctagtttctttgccgtccaatccgttttctctgaactcaggaatctttctcggaattcagagaaagactgtataattcagagaaagattcagagaaatgcaataggtggtgaacggcgaatggcgcatgagtacggcaaagagacgctgtccaaggaattcaaaagtgatctcaagggcttgcctgattccgaattggtggaagccgttgtggctttggccaacacggatggcggatgtgtgtacctaggcgttgaggatgacggcacgccgaccggtgtcaaacaaaagcaccaagaccctattggcatggccgcgatgattgccaacaggaccgtaccgccgatatcggttcgctcagaattggttggtgatgatatcaaggttgtccaagtcgaagtgcctaagtctcagagcgtggtgtcaaccaagtctgggaaaatccttcgccgcatgatgaagatggatggtacgccagaaagtgtgcccatgtatccgtatgagattgccacccgtctttcggatctgggcagacttgactattccgctcagccggtgatggagtccacccgggatgatctcgatccattggagcgtgaccgcctgcgcaaaatcatcgcttcctatcaatccagtgaccggaatcttttggagctttcggatgcggacttggagaaatcgctgcgccttgttgtgtcggtcaatggtgagctgacgccgactttggcagggttgctgcttatcggcaacgaagaagcgctgcagaggcttgtgccgacgaatgaggcggcttttcaggttcttgtgggtaccgacatcaaggtgaatcagacctaccgtggcccgttgctcaaaaccatagaacagatagccgagtcgttcaagccctggaatccaggcacggagctgaccgtgggtctgttttcttcggtggttcccgaatttgacgaaagggctttccgagaggctttggtcaacgcattcggccacagggactattcgcttcttggtcgtgtgcgggtattggtggatgatgccggcttaaccattgctaatcccggtggattcgtggaaggtatcaacgtccataacttgcttactgcggagccgcgtggccgcaatccatgcctgatggatgcgttgaagagaaccggtctcgccgaacgtacggggcgcggcatcgaccgtatattcgagggtgctttgaactatggccgtcctctgcctgattattcgaggtccgacaggcgtggagtgtcggtgctgttgcctcgtagtgtgcccgacaaggcgtttgtggaactgctggccgaggaacgtgagcgcagcggcaagtccatgtctctcgatggtctgcttattttggacaagctcaagagtgaac

SEQ ID NO: 1214 - DNA, 4770 bp, Unknown
  R81_24m  MAG No. k141_21775
gagctgaaaatgaccgtactggccggcaagaaggcgctcgccgacttcaacgccaaccagctgccagcgctggaggccgaggccgccgccagtggcgacgccatgcaggcgcaagtgctgaaggacttcaagtccaagctcgaccgttttgccaagcgactcgacgacctcgaccgcatcagcgtggtcaccttgcagaccgcgccgcagatcaaaatcatccagaacgcggaccagaccatcgtggacaagatcgacaccaccatctccaccacgattccggtgtggaagagccagatggtgatcgcgctgggcctgtccaaccagcgcaaggccctcgacctgcagaacaaggccgacgatgtgaccaacaagctgctggcgcgtaacgcggccgccctgcacaagggtgcggtggacgcggaaaaggccaaccagcgttccgtggtggaaatcgacacgctggagaagatcaacgccgaactcatcgccaccctgaaggagaccgtgcagatccagaaggaaggcaaggccaaccgcgaggccgcccaggtcaagatgcgccaaatcgagtccgacctcaaaaacgccttgctcgaaaacgcccagcagatgtgagccgttcgcgcgccagcatgctcccgttggcagaggtatatgagtacgcctactggtgtgcgtatatatgctcccgctggcgggagctggcagccgtaagactggctgagggtggtcacggcgctcgtctcggccggctttaccggcaaccattccccgccgcaatttctctgtgggcataatcccggaatgattgccgcgctcgggaattgggtgaagtgaaggttaaaggttgagagcccgggagggttccggaaccggccacgataaccgctgctagccccgcgatacgggttggcggccggcatccaagccgattctctcctaatcaaggagtaccgattatggcaatgtttccggctttgatgaatgacacgatgttctcggatctgttcgatgatccgttctttgagggttggcgcaacacggacaacacgatgagtgccgcaatgcctgccaacatgatgaccaccgatgtgcgcgagaccgacaagggttacgacgtcgacatcgatatgcctggctttaagaaggaagatatcaaccttgagctcaacaacggctatctgaccgtgtccgcctcgcgttgcagcgagcatgaggacaaggctccggccgctgagggcgaggcttccgacagcaagtgcgcttgcgcgtccgattcgggcaagtggctgcgtcgcgaacgctacatgggctcctgctcgcgtagtttctacgttggcgaggacgtgaaggagtccgacatccacgccagctaccggaacggcacgctgtgcatccaggttccgaagatgcaggcccagccgcaagtcgagtccaagcaccaaatcgcgattgagggctgacgatacttgattcgtcccgaagtcccgcttcgagtagctttgccccctctgacgagggagctcccgcgaagcgggtgggggagagataaatcgtaaccaaaccatgcttcccacgccgcctgccctacgctttcaacgccgactaacctgacagacggcgggaaacatagccaatgcaaatgccgagtagggatttaccctacccggcattttgctgtttcaatcaccgaaccccaccctgttcgcgcgccggtcgtgtgccgttctgcagctgtacacatccgatgagtagaatgccttcgaaacgaggcaagagaggcggacatatggcgaacggcgcacagaacgcaagcggcacgccggccccggcggcaagccgttccggcggccacgtcgtatccgcgcgcgccacgaccatcggcctgatggcgatcctgctgtggagcttcatggccggcaccgtgcgcatcgtctccgaaaacttcggtgccacgcttggttcggccctgatctacacggtcggcggcatcctgctgctgatgttccggcgcccggccccgattcgcgagttccccaagaaatacttgattatcggcggcctgttgttcgtattttacgaatcgtcgatatccctctcgctgggtctggcctctaccgacgcatcctcggtggaagtgagcctggtcaactatctgtggcccacgatgatggtgctgctgtcggcgggcgtatcccatcgcaagcacgcggtcgtcaaggtgctaccgggcgcgattgtggccactgccggcgtggtgctggcggtcggcggtaattccgggctcgactggcatgcggccgtgcagcatatcgccgccaaccctttgccctatgcgctggcgttcgcgggcgcgctcgcttggtcggtgtacgcggtgttcacgccagccatgagtcatggggtggacggcacttcattgttcttcccctgcgtggccgtggcgttgtggattatccacttcgcgtccgggcaggggtggccggccgagccgccgagtctggtcgcatggctgtttgtgttgattgccgcggcggcgattggcggcggttatgcctgctggggctatggcattctgcatgggtctatggagcggctggctattgcgtcctatgccacgccggtgctgtccaccggggccagtgcggtgctgctgggtttggcgctgtcgctgccgttttggtgtggcgcgctgctggtggccgccggatcggtgctcaattacttggtcagtgcgcgcaaatagcggggtggctttgctcatggggcggtaataatcccatggagcggtaaaaccctcatggggcggtatcccaaaatggctttattctgccgtttcacaatttcttcaaaccgccccatgggccttttaccgccccatgggtaaattaccgcccgatgggcagcagcaacttactcgccgcggcgctcggacgggcggcgaatcgggtcaagcagcgtattcggatcggagatgccgaacatgctgcgcccgccggtggattcagggtgcttggcgagaacggccagcgaaatcgcccccggaatcataatgatcaccgaaagggccgccaatccccagttcacgaagaatccgagccccagtacgatggccaccacaaccaccaccgtgacgataatcgtcaacagtgctcgacatgggttggtttccctggtccaagaggtgctggctgcgggttttgctgttgaactggccgcggcgtttgtggctgttgtgccatcagccgtgccggtcgtgggccttgccgccgcgctcgtcgcggggtcagtaggggcgtcagacacgttatcggcgacattgccggtcgctgctggacgttgttcgtttgcgtgagtcatatccaccaacatattccctgcttccggctaaagctgggacaagcctgcgcaccgctaatccagcgccgacactggccttgagctgcggacgtccaggccggatgtgaacaggagctgaacggagtctggggaaaccatgagaactcgcgacaatttttgtgaaattgggtgacgctctatgaatcgcgcgctagtattgcgtgagcttacaagacgaggagcctggagcgcggggacgaaggatgaagaactccgtttggaaaacgttcatggaattgtcgctggtccgcggaatcgtgccgtggaccgtgttcggactgaccgcgatcgcggcaatcatactgattgttgggctggcattgagcaagaagcgcggcccggcagcagacggcctggcgccggacggcgaatcgtcggcccaatcgcccgtcgacccagataaccagccggccaaccagcctacgaacgcggctgctacggcgtcatccgcagcttcgacggaagagacgtttatttcccatggcctgcgtacgccgcaacgtcgtcacttgcatccgctggccgccgcgctggccgccgccgtgctcgccggcgcgggcggactactggccacatggctgatgtccgacgtgttcatggtgttcggcgtatcgttgggttggccggtgatcctcaccgtcgcgggaggcttcgcgggcctcggcttcgtgctggccgccgccgtgacgttacggggggcccgtcgcgcgctggccgtcgtgctggtgccgctggtgctggcgtccaccgcgcttggcgtggactcgatctacggcgaataccagaccatcggcagtctcgtcggctatacgccataccccccgctcggttcggtcaccgtgcgcaaagcctcgatgagcgtcggcgagtggcgcgacaaggcgcgcaaggacgctctgccatccatgcccgactcgggcagggtgttcgtcgtcagcatcccgaacaccgaatccaagttcaaggcgcgcaaggcgatggtctacctgccgcccgccgcgctgtccgaccgcccgccggccctgccggtgatggagctgctcgccggtcagccgggcagtcccggtcgcctcatcgacgccggcaacatcgccgccacgatgaacgcttacgccgccgaacacgacgggctggcgccgatcgtgctcgcacccgaccaaaacggttcggccatgcacaacagcctgtgcgccgacaccacccgaggcaacgccgaaacctacctcaccaaagacgtggtgaactgggccagggcgacgctgccggtagccaagtcggcccgtatgtgggcgatgggcggattctcgcaaggcggcacctgcaccacgcagctggtgccgcgtcaccccgacatctacggtgcgatgc

SEQ ID NO: 1215 - DNA, 39384 bp, Unknown
  R81_24m  MAG No. k141_22009
catccgattccttggctgcgtatctcgcgcatcacccagctgagtcgtgatccaaggggcttggccatcgccaaatccctatgggaggagcgcgaccgactcgcccggcaatacgatattgcgcccagcctgttattggccgattcatcaatcatcgaggcggcgaccaacaagccgcacaatgctgcccaattccgcgcgctccgatccctgaacgagcgtgtgcgcatccataccggtaccgagcaggacaaaatgttcgagcggtacgcgccgattcagcgtacggtcaaaccgaaggtctggaagcaggccatcgaccgagccatggccctgaagcccacccaatggcctaccatgcccgcccccgaacaggacgaaaacggtgtggtgaacgcgccccgatccatgcgactgtggcaacagcgccatccggagcgttatgaccgtctgcagcgggtacggcgtgtgatcaaccgcatcgccgaagacacccgcacgccggccgagatgatcatcaagccacagatcctacgcaacctgtgctgggtggaagacccggtggaagtggacgtcgagacgttcctgatcgagcagggcgcaagaaactggcaggtgaaactcattgcaccgtccgtaagtggcgttatcatgtagaggttgccttacggcagaactgtaagaaataacgacttttgaggagtcattagcgtgaagatcagcgttcgtaacctcgagcccaccaaggtgaagctcaccgtcactgttgaaccggaagagctcaacccgtatctggatgcggcccgtaaggaaatcgccaagcaggtgaacgttcccggcttccgtaagggccacgttcccggcaagatcatcgaccagcgcatcggtttcgccgccgtcgccggtgaggccgtgaacgacgcggtcccggagctgtactccaaggccctggatgagaagaagattcgtccgatggctcagccggagttcgacgtgcaggatgttccgcaatccgccaacgacgagaccaagctgaagttcaccgccaccgtcgagcgtcgtcctgacatcgaactgccggaaatcgacggtcttgagatcgccatctccaagccggaagtcaaggatgaggacgtcgacaagcgcctcgagaccctgcgtcagcgcttcggcaccttggtcggcgtggaccgcccggccgccaagggcgacttcgccaacatcgacctgactgctgagattgacggcgagaccgtcgactcccaggaaggcgtgagctacgagctcggctccaacaccatgctcgacggtctgtacgaggctcttgacggcctgtccgccggcgaggagaccaccttcgaaggcacgctggaagccggcgagcacgagggccagaaggccaccgtgaaggtcaaggtcaactccgtcaaggctgaggaactgccggagctgaacgatgagttcgcttccgaagcttccgagttcgacactctggacgagctcaaggctgacatccgcaaggctgccgctcaggacgccgaaggtcgtcaggccaccgaggctcgcgatgccttcatcgccaagctgcaggaaggcctcgagatcccggtgccgaagggtgtcaaggccaacatggtcgaagagcagctcaagggcatgaccccggacccggagaaggccaccaaggagcagaaggctcaggccgaggagaccgtggagaaggatctgcgcgatcagatggtgctcgacgctctggccgagaagctggacgttcaggtgtcccagtccgacgtgttcaacttcctcgcttccatcgcccagcagtacggcatggacccgaacaacttcatccaggccatcatcaagaatggccagcttggctccgctgtgcaggaagtcggccgttccaagggtctgctcgccggcatgcgcgccgtcaagttcaccgctgatggcgaggttgtggacctctccggcttcctgggcgaggccgctgaggacgaagagtccgagtccgtcgaggccgcttccgctgctgccgccgtggccgacgaactgtccgccaaggatgacgccaaggacgctgagtgagcatagcctcatcgcgttagcgtgattgtttgagcccggaatcgtgtttcacggttccgggctcttcctattctggtaaaaggactatttctttggctcccctttggggggagctgtcgggcgtagcgagactgaggggagttcccaaggcatactcgttgcatagcgtgcggaggttgacatgcagccaacggttactatcaaacgccttggttggctcgctgcggcgaccattgtgctcggcgtgctcatcggtgtgggagcaggtctgctgaccctgttgctctacggcgttgaacatgtgctgctcggctacatcgaaggcccagaattgtctggtccattcggcgtgcccgctgcacgccgtgtgatatcggtgaccgtgggactcggcatcgcgggcattatctggtatctgctacgacacaaaacgactgtggtgccctcagtcaagaaggccgtggcgggaaagcgaatgcctttctggcaaaccattgtgcatgtggtgttgcagattttcatcgtcggctccggtgcctcgatcggccgagaagtcgccccacgcgaactcggcgccatgatcgcgcaacgtttttgcgacctgttccatatcgagggcgttgatggtatcgaccggcgcatggtggtggcagtggctgccggtgccggtctaggaggcgtctatgacgcgccgctggccggcatgttcttcgccgtcgaaatcctgttggtggatgtgacgatcgaaaaggttgcgtttggactgggcgtgtctgccattgccgcattcgtggcggttgcgatcaaagggcattgcctgttctacgacatcaccgccatgcaaccggaatccacgccaacgttaatgctgttcgctctgatctgcggtgcggcatgtggagtgggcggcgcattgttccgaaaaggttcgcaatgggcggaagcgcacaagccgaccggcaaggccattctgtggcagatgccgctggctggtctcatcaccggtttggtggcgattgttgtgccgcaggtgatgggcaacggccgtgccgcagcgcaacttggattcagcacgttcattcctgaaaccgccggcactgctggtgccatgcagtcggcatcttcagcggccgcctctccatggaacttgctgacgggcggcggtaatgtatccgattcggcctctggcgggggagcgggctctggaatggcctcgttttgggccatgcttcagggtgggagcggctcttctggatccgggatgaacgtcggtttcccgctgtcccagtccaatatctggatgttgctgggtgtgttggcactcacctttgtcgccaaggcgctggtgacgctgatgaccattcgctccggtgcatcgggcggtgtgctgcagcccggcatcgcattaggttccacgctgggtgcgatgctcggcctcgtatggatactgatgtttccgactgattcggtaaccgcgtgtgccttgatcggtgcggcttcgttgctttcggcctcacagcaggcaccgcttatggccatgtgcttggtgatggagctgaccgaagcgccgattaccttcttcgtgccagtcggcatggccgtggccacgtcgtcgttgatatcaaagtggttgctgagtcgtaagtaagtagatgcatatattctggctcccctctctgaggggagctgtcgaacacagtgagactgaggggagccgaggtaaagaaagctatgtcagaaaacaccgaagtccgtgcggcacttgaatcgcttgccgctgagccgctcactgagcagattgactactatcgaaagccattcatggtgttgtgggccgccattcaggaggccgccagcgatgtggccgaagactacgacttgcctgcggatatggcccaattatgggtggccgaacagatgcgccaagtcgccgattcactggtcgatcggctcgcggaaaaagccgtggcccatggtgccagcaagtccaacgtggcgcgagccgccggtgccagccccgccaatgccgcccgtcgcttcccgcgtctgggcgacgatgccgcctcccagacccgcctcctcattgacgacgtcctcgacaccttggaataacccgaaatccctacgctacccgccaaaaagcacgcgaaaagccgccttcagtcgcttcaaggcggtagtctgaacaatgttcgagtaattagaaggagaatcaaggtgagcaatacctttgcgaccttgccggtcatggcgggcgatgacgtcccggccggccccgtcgacccgattttcaaccgtctgctcaaagaccgcatcatctggatgggtgaagaggtcaaggacgatatggccaaccgcatctgcgctcagctgctgatgctggccgccgaggacccgaagaaggacatctggctgtacatcaactcgccgggcggctccatcaccgcaggcatggccatctacgacaccatgcagctcatcgagcctgacgtggcgaccgtgggcctgggcatgtgcgcttccatgggccagttcctgctgagctccggcaccaagggcaagcgttacctgacctcgcacgcccgtgtgctcatgcaccagccttccggcggcatcggcggcaccgccactgacgtgcgcatcaacgccgagctcatcatggacatgaagaaaaccatgagcgagctgaccgctgagcagaccggccacaccctcgaggagatctaccgcgacaacgaatacgaccactggttcaccgcccaggaagccctcgactatggcttcgtggacaagctcgtgaccacgccggacaccatcggcaacaaccagcagggggagtgagactcatggcaagtgaagaagcaaagttcgccgcccgtgccgaccgcttggccggccgtcatggcgtagccggtttcatgccggccgccgcccgcgcagcccagcccgcgccgaccaaccgttacatcatgccgcagttcgtggagaagaccccgtatggcatgaagacccaggacgcctactcccgcctgttcgaggatcgcatcatcttcctcggcgtgcaggtggacgacgcctccgccgacgacgtgatggcccagctgctggtccttgaatcccaggatccgaaccgtgacgtgatgatgtacatcaactcacccggcggttcgatgacggccatgaccgccatctacgacaccatgcagtacatcaagcccgacgtgcagaccgtgtgtctcggccaggccgcctccgccgccgccattctgctggcctccggcaccaagggcaagcgcctgatgctgccgaacgcccgtgtgctcatccaccagccggccatcgaccaaggattcggcaaggccacggagatcgagattcaggccaaggaaatgctgcgtatgcgcgaatggctggaggagaccctcgccaagcacaccggccaggatgtcgagaagattcgccgcgacatcgaagtggacactttcctgaccgctcctgaagccaaggaatacggcatcgtggacgaggtgctggaacaccgccagtaaaacttccgaacattgcaataccctcggtcggcaacgaccgggggtattgtatttcaaggatgacaatgataatgcgcagcgtggcgattcgacggtgcggcgcggtcggcaaaggagaatcatgggacgtgtggtgagctacaacgaggacgtaccccgttgcacgttctgcggcaaaaccgaacgtcaggtcagaaaactggtggccggtcccaacgcctccatctgcgatgaatgcatcgccctgtgcgtggacatcatctccgaggagcgtgtcaaagatgccgaggtcaattcgctgagcctgcccaagcccgctcagatcttcgattatctcaaccgctacgtcatcggtcaggagaacgccaagcgcgcattgtccgtggccgtatacaatcattacaaacgcgtcaatatggagcttcaggagtccgctgagcagcttgacgggaataacgggcacggtggccagaccggcaaacaagccaagcaatccgctcccgcccagacgcgtgctacccgccgcaacagtgaccctttggctgacgttgaggtcgccaaatcaaacattctgttgctcggccccaccggtgtgggcaaaacctatcttgcacaggcgttggcccgcgtaatgaacgtgccattcgtcatcaccgacgccaccaccctgaccgaggccggctatgtaggcgacgatgtggaaaccgtgctccaacgtcttctccaagccgcggatggcgacgtaagccgagcccagcacggcatcatctacattgacgaaatcgataagatcgcgcgcaaatcaggtgagaacacctccatcacccgtgacgtgtccggtgagggcgttcagcaggcgttgctgaagattttggaaggcaccatcgcctccgtgccgttggagggcacgcgcaagcataaggagcaggacactgcgcagatggacacacgcggcatcctattcatctgcggcggtgcgttcgtggggctgacggatattgttcgcaagcgattgggccgtcgagagaccggcttcggcgcgaattggcacgacgccgacatgaaagacgaggaattgctcgaacaggtcaatgccgatgatctggccgagttcgggctgttgcctgagttcatcggacgtttgccggtcaccagtgtgctgaaggaacttaccgtagacgatctgacggcgattctcacccagccagccaacgcgctgatcaagcagtaccgtaagctgttcgccgtcgacggcgtcgacctgcagttcaccgaacaggccattcgggcgattgctgatatcgccatcaagcaggggaccggcgcgcgcgggttgcgttcgattatcgaacgtacgttgcaggacacgatgttccagttgccgagtttggatgatgtgaagcaggtgattgtggacaaggcgtccgtagagggttccagtacgcccaaactcttgcgcgaagccgtggatgtgccgcagggacgcctcaaagttgcgtagtcggttttgcttgaccgagtccgtacacatgcggcgtgaggccagtaaatacgccgttgcggtggtgattaggatggtgcgactcgccgcaacacgccgagttgcattcatctgaacggcgtgtattatatatcgagttgtctgaaaagacaacatgcgccagtagcccagcggattagagcagctgactacggatcagcaggtcgcaggttcgaatcctgtctggcgcactcccgaaccacggggacaacagtggtatgcgccagtagcccagcggattagagcagctgactacggatcagcaggtcgcaggttcgaatcctgtctggcgcacagtaagcctcgaaagcgaaatgcttccgaggcttttccaattgtattggcccgtttgagtcggccacacaggggtggggtaaggtcgcccttcgcgactcagcccggagcggaacgtcctgagatattccgtactattacatacggttcatccaagagagtacagcaaggagacgcgatggccacgaccgccggcgcgaagaagggactttggtccaccatcaggcgaatcgccgcctcagaccgtatttccggactcatcatgctcggcttcgcgctcaccggcctggtgctcgcgaacctgcccgccaccgcgcatgcgttcgagaccgtagcggaaacgcatctgttcatcccctacaccaatctcgacctgccgattggccattgggcccaggatggtctgcttaccatcttcttcctgaccgtgggcctcgaactgaagcaggaactcaccaccggctcgctcgccaatccgaaagcggccgccgtgccgatgctgtgcgcggtgggcggcatgatcgccccgcccatcctgttcctggccgtcacggcattgttctctcagatcgggcctggtgaacccggcacgctgattctgaccaccaccggcagcagcattccgttctcggagatgtcgcacggctgggcagtgcccaccgccacggatatcgcgttctcactggccgtgctcgccctgtttgccaaggccctgcccggttcgatccgcgcgttcctgatgacgcttgccaccgtcgatgacttgctggccattattctgatcgccgtattcttctcctcgatcaacgcctggtattggttcatcggcatcgtcgtgtgcgccgtcatctgggcatacctcgtacgactgaaaaaagtgccgtggattgcggtcggcatcgtcggcgtcctcgcttggatcatgatgttcgaggcaggcgtgcatcccacactggccggcgtgctggttggcctgctgactccctcccgtgaaatgcacggcgaactttcaccgcgtgccgaacgctatgccaacaagcttcagccattctccgcactgctggccctgcccatcttcgccctgttcgccaccggcgtgcacttcgagtcggtgagcccgctgttgctggcttcgccgttggttatcgcactgattgtggctttggtggtcggcaaacctttgggcatcatcaccaccgcatggctggccacgcatgtgggcgggctcaagatggccaaggggctgcgcgtacgtgacatgattcccgctgccgtcgcctgcggcattggcttcactgtgtccttcctcatcgcctcgctggcgtacaagaatgcggaactttccgctgaggcgcgcttcggcgtgctggtggcctccctgatcgccgccgcgatttccggtgtgctgctgagccgtcagtccaagagattcgagaaggccgcagccgcagcagcggccgatgcggaggatgacgaatcgattgatggcgatggcgctggtcagaccggtcgcaccacaaagtccaccacgcccacggaacaccccggcaccctcgccgacggcaccgccagtgtggagattgacttccgccactgatggcttagacgatccctactccattgttggccttgtttcgtgaaaaccgtacgctgaggcgcgctcaccgtacgttcttcacgagatgaggccttatttcgtgaaaaccgtacgctgagtgtcactcaccgtacgttcttcacgaagtcaaggatgatttcgcggaaaacgtatgcagagcttcaggcgctagaatgcgaagagtcgatagcaccgtacaggaggatattggatggcaaagaagcagaagaaatccaagaagaacgacggcaaaaaggccgctgaagcaaagaatctagccgaggccgcatccaagtccacagtcgtggacgatatggaaccattggaagccacagccgcgaatgatgcggcaacgttggaggccgagacggcaaccgaggctgccgcaacgccggtgaacccggtcgacttggaggacgtctcgccgctgggcgacacctatcatcgcggcccggtgattctacgcggccagatgattccctcggacaataccaccgccaatctgctgaaacccgaccaggacaccgactggctgcacatggacccatggcgtgtgctgcgcatccaatcggaattcgtggacggtttcggggcgctcgccgagctcggacctgcggtctctattttcggctccgcacgcacccagcgcaccgaatcgatctacaaggcggcccggcgcatgggtagccagatagccaagcgcaacatcgccgtcatcaccggcggtggtcccggcatcatggaagccgcgaataggggagcggcactggctggcggcaaatccgtgggactcggcatcgaattgccgcacgagcaggggttgaaccagtgggtgaacctcggcatgagcttccggtacttctttgtgcggaaaaccatgttcgtcaagtattcctccggcgtgatcgtgtgcccgggcggcttcggcacactggatgagatgttcgagctgctgaccttggtccagacccacaaggtggcgaatattccggtggtgctctacggcaaggaatactggcaggggctctttgactggctcaacggtccggtggccgagcacggcatgatttcggcaatcgacccgaaactggtcaccgtgaccgatgacgccgacgaagccgtggaggtggccgtcagtgcaattgtgaggtaagcgagatagagtggctcccctctccgaggggagccaagggcagagttactttttgtaggcgatgagcaggcctgtgccgtcaggggtgagcgtggactcgaaaccttcgtcatcttcgacggtggtgagcagctcacgcatggcgatggccttgtcgctgcggtcggccggattaatcatgccgccctgaccgtcctccaacgccagcacatcggtgaacacgatcacgccgtgcgcgcgcagcagacgggaggcctgggcgaacgtggcggcatagttctcggcgtcgcccgccaccacgatcagatcgtaatcattggcgttgaggcgcggcagaaacacgctggccggggcgttcaccgcacgcaacgtggtgtcggtctcatcctgcagttcggcgaacgccttgcgaatcagcgcgatgccctgagcggtggaatcgaccgcagtcagcaggcccttgttatccaacgcatgggcgagctgcaaggtctccaccagcgagccggtgcctacggcgatgaccgaagcggcgccggtgatgcgcaccagcatgcccagcagacgggcctgcgcggccgaaccctgcaactggccggacttgtcggcggccgtacgggcgtcggtcaacgcattggattcacgttcgcgcgcgtgttcctcggtgaattcccatgccttggcgaggttggtgtactgcgttctgtccataattcgttcctttatgtcttctctcgtgcgggcacccagtggatgtatcgactacgtgttgcagcgattgccgtagctggtcatggcgcggcttagcgctcgcggaccttggccacgatctgccacatctcctcgcccacatcgatgccgcgcgggcagtggcgggagcaggcgcgcacggactggcaggcggccacgccgtcggcggtgtcgatggcgtccatacgctccatggccttggtgtcgcgcgaatcgttgacgaaacgggaggcccaaatcagcgaggccgggccgatgaaagcgtcgccgccggcgtacaccgggcaggcgccttcgcacacgccgcaggcgatgcagttgctcagcagctcgtatttggcgagttgttcggggttctgcaggtattcgaacacgtccaccttgccttcggcggtggtggcgagcacgccgtccgcctgaagatatggggtgagcttccttatttggttgagcatcgggtcgatgtcggcgatgaggtcgcgctgcggcgggaagccgggcagggatgccagttcgatgactcccagcgagccgtttgcggccgagtcctggtcggctgccgcgtttgcgtcgttttccgcggaatcgtcggattcttcggactcggtgccggtgtgccggaacccttcgtcatcgacttcggggatggcgccgggctgcttggcccaatcgcggatggtggccgtgcacagcagggtgggggtgccgttgatggccacggcgtccgaaccgcacatgccgtgaccgcacgaatagcggaaggccagcgtcgggtcgacggtgcgtttgatggtcagcaggcagtcgagcacggtgtccgaggggcgcgcgggaatcgtgtattcctgcacccactgcttgccgcgcggacgacggcgtgccgccgaatccgagccgccgccgaacggggagtttttcttggcgaacgggctgccgccgcgtgcacgttcggcgcgctcggggcgcggcgtgaaacgatgcacttgcagggtaaccgtcgtgttgctcgcctcagccatgttctgcctccatgaaacagtgggatgtcaagtccaatatcagccaacctattgtgccacaagccctaggcggcttggtattacccccagcggatcagtactcgcgcttcttgggtggatagtcggtgatgtgcaccggcttgaaacttgccggaccatcatcggcgaccatcgagtgagcaaggaaatgctcatcgtcgcgttcggggaaatcaagtcgttgcatggatccgcgggattcctgacgggattcggaagcgtgcagcatggcctcggccagttcgattagatgacggacttcccagatggcggtgacctcctgattgaaagcggcggtcttgtcatgggcccgcaaggtatcggcaaccggtgtgatgtcgttgttgatctgagtcaacgccgtatcgatggtctgagcggtgcaacgtacggccagagcctgctccatcactgatccgagttgggccatgagctgataaggattggcggtgggcccgccatcgtctgaatcgtccatcggcccggcgagcagttcgtcaagctctgccttgcgggaatcggcagcctgatcggcggcatcggtcagcatgtcatcggtcgaatcatcggccatgggggagtcaaccgggttctcgacgatgcgtgcggccatcgtctgaccagcacgtgtaccgaacaggcaggcgtcgagcagagaattgccgcccagacgattcgcaccatgtacggagacacaagagcattcgccagcggagaacagtccatcgactacctgcacggcaccgtcggcccaacggtacacctcgccattggtggtgatggggatgccgcccatcgtgtaatgcgcagtgggcttgataggcaccaggtccttggccggatcgaggttcgcgtactgctcgatggtttcgaccacctgcggtagcacttccttcatacgttcggggtcgatgccggtcatgtccagccagacgcagtccttcggaccatccgggtccttcgggtcggcgacgccgcggccggcgtcgatctccgccatgatggagcgggagaccacgtctcgcgcggccagatccctatgctccggggcgtagcgttccataaacggctcaccgtcggcgttcctcagaatgccgccctcggcgcgggccgcctcggacagcaggatgccggtgtgcgcgagcccggtggggtggaactgcacaaattcgatgtcctccagctgcaggccggcggccaaggccaatgccatgccgtcgccggtcaggtcccaggaattcgatgtggtatggaacagtcggcccgcgccaccggtggcaagaagcacgttgcgcgcgtggatggcctgaatcttgcccgaatgcgtgtcaaatgccacgatgccggccgcctgcttgccgtcgtcggcgagcaccaggtcggtcacataccattcctcggcgaactcgacgccggcggccacgcactgctgccacaaggtgtgcagaatctggtggccgatgcggtcggccgcataggcggcgcgcttgaccggggcaccgccgaactcgcgcgtgtggccgccgaaccggcgctgggcgatatgcccgtcatcggtacgggagaaggccacgccctgacgctccaggttgatcacggtctgcggcgcgtattcggcgagcagtttggccgcgtcctggtcgacgagccagtcgccgcccttgatggtgtcgtagtaatgccagtgccagtcatcggactccacattgcccaggctcgcggcgatgccgccctcggccgaaccggtgtgcgaacgcagcggctgcagtttggagaccacgaggatcttcgggtccacgccttgttccttgagctcggtgattttgggggagcgcagcagtcccaacgccgccgacaggccggccgctccggcgccgacgatcaccgcatcatacatatcttccaaacgtttcggactcatgggttcgattctcgcacacccgccgaacagtcttcgagccgtgtcatggaagccgattagccgacacggctgctcagcttgagtatgccggcatcccgctcgatcactcccttcagctccaatgcgccgagtagctcaagtatggtgccgatattgggaatctcgtcgggtaccgtctctcgcgccacacgcaatagtgcgtccggagtgacgatgagatgtcgtttacggcattcacgaatcaatgccactaaggtgcgctccatttccggcagcttggcgataatgatacgttgttgggcttccttctcgggatcgagcttcggcttgacacgaagatccggcatctgatgcgacgagggcggctcttcacccttgctcttgttggcaccggcctcggcagttgcgctcgccggcccatccttggattgaacgagtgtaggctgagtatgcttggtcctaagacgtttcgaatgacctgaatcttgtgacgactcctgtgacgccgatgattccgaggatgctggcgataacggagtcgttgccggcacttccatggcctcctcgttttcggacgagtcctgacctgtggatttcggtatgcctgggcatgccgccataacgggcttatgccgttcatggcatatatcctcagtggatgtggcggcacacagaatcatcgcccggtggtcgccgatcatcttattgcacccggcgttgcaaggctgattgatgtcaccgggaaccgcatacacttcgcgcagcaattcgcatgcccatcccgcggtgttgagcgctccggaacgcaaccgggcttgcgtcacaatcaatgtggaagacatggccgcgataatgcggttgcggagtagaaaacgacgggcttcgggaatcgtccctgggcacagttcactgatcagtgcaccaccctgcgcctcgatacgttcgaacagcgtgcggttacgcatcggtccgatatggttgagcccgccggcgaatacggcaacggttctgcccacattggcgggcattctgccgtgcagcgcattcaacgctccccaatgtgccgccgcatccgtgcccattgcgcctccggacacgaccagatgcccggcaacgactgcctgttcggctacggtgtgtgccacataccggccgtattcggtcacgtcccgtgaaccgacgatgccgaccggtttggcgcaactggtcaatgcgcgtggatcgcctttgatccacaaacacagcggtggcgcccaatcggagcgaatggacaggtcggccaactgcgagggccaacatggatggccggggccgataatccattgcgtgccatccatagtgaaccagtcggccagttggatgatgtcttgcgagggcaggtccatcatgcggttatgccagccggccagtgcattgcggaaggagcgcatcgcgttcgccgacgccttgcggccccatcgggtgaggccatccacgaacatgcggtcaatacgtgacagcgccgggccgcagattccagatggctggcttggatgggattgcgccaacgcgtgccagagggattcggcgctttccgcgcctttgagcgtggcgtacatcatcacatccgccccatcaagacagaacgtgagcgcggcgcggtataacgtatccgtgggaggcatgggaatggtgcgcgaaacagcgaggcccgtatcggtgtgatccacactgcctgcggtgccgccagattgtcggatatcagtagcgttactcatgtcatcctcgttctcatttcgatgccctgatggacgtcctgctcggtgggggatacgcggccggccagatcggcgagcgtccaagacagacgcatggcgcgatcggccccgcgcaatgtgagttgatgattggacagggcccgattgaccaattccatcgctttcagcgacgtattggcatgcagccatttgcccgaagcttgcgcgttgcacacccatccatactgtctgaaccggtccttggccacttgacgggcgcgaatcacacgagcttgtatcccggcactggactcgccgatcgtctcgctctgcgcggcaatgcgcgagaccggtggcaccgccatctgaatatccacacgatccaatatcggtccggacaatcgcgagaaataacgaatacggtctttttcccggcaagcgcaacgttcgccggtaccgtaatagtatccgcacgggcaggggttggccgccatgatgagttggaatgaggccgggtaataggtgctgccttttgaacgggaaagcgccacatacccggattccaatggttcgcgcaacgtctgcagggcgcgtgcgctgaattccggtgcctcgtccaggaacagaatgcctcgatgcgcgcgcgtgatcgcgccgggaacggcgatgccgttgccaccacccaccaaggccgccgtgctggcggtgtggtgcggtgcctcgaacggcggcatgtcggtgatgccgtactgaggcagtatgccgcacagcgaccgtatcgacgccacctccagttgttccgcctcgttcaacgggcacatgatgccgggcatacgtgaggccagcatggttttgccgctgcctggcgggccggtcatgatgagattatgtccgcctgccgccgccacttgcagcgcccatttggcatgttcctgacccagaacctcgttcatatcgccacaatcgttgggatggcttgtgggcgattgatccatggtggtctcgtcggcaaccggtgtatcagtaatcgtataggtggcatcgccgcccatcagttcgatgagctcacccacatgcctcacacccactacatccagtccatccaccatcgaagcctcgtcaagattgcgatggggaacaatcattttgcgcacgccacgttcctcggcatgcagcatgatcgggagcagcccatgaatcggcagcaccgagccgtcaagattcacttcgccgagcacaatggtatcttccaagcaatcatgccctatggcacccgccgcgcataggacgctggccgcgatggccagatcatgcgacgaaccacgtttgggcatggccgcagggctcatgttcacggtcacgcgggtttgcggccaaccgaatccagtggcttgacacgccgatttcacgcgctcgcgggcttcggacaacgatgcatccggcaatccgatgatgctgaagtatggcaagccagggctgatgaaagcctgcacttggacgatgaaggccttaaggccgatcagtccgactgagagagtgctgccgatagccatgtctactcctttcgcaatgtgtttcgcaacgtggctgttttttgggggacgaattcagaaggcgttttcgatgtgatgcacgagcggtctgcccacccgaagcacgatggtgacgacatcgaaacggactgccgtatgcggcacacgattacgccggtcaagcagccaatcgcaggcggctttcctgagattgtgctgtttcgccggcgtgatggcctcttgcggatatccgtaatgcatggaccggcgtgatttcacttcgacgaacaccaccgtgtactcgggattgagcatcacgatgtccaattcgccgtaacgggtatgccaattgcggctcaaggtcgtccaaccgtgttcctccagccacgcggcggcatactgctcgccgagcgcaccgaactgtttgggcgtcagattgcggtcgcccatcgtggccgcaatccgttccgaaggcagcgttgcctgcggatcaggtgaagccagcatgggctggtgaaaggcaagaccggcgtcgatgccggacttcgtcgtcggctgggtaggtggtaaagcgttcatgattccactgtgcgggttacttatgtaagagcacaagcgcaaccggcaaatgtggatactatgacgcggtttggcgtgttgtggataacgtgtggatgaaaacccggttatccaccattagttcagaaggtttaccaaggctccccagccgacttacctgtgatgacaaacaacccgccgagttgttcgctgaatacgtcagacccagtgagcggagaggggagccaaggtgcggtcacttcaccaaatcggtgagttcgccgaggttcagttcgaagctgacgccacgatcctcgaaatgcggctggtcacgggtgctgaccatggcgtgtcgcacgaactcgccggcgatttcggccgactcggccaggccgcggccggccatcaccgcgccgcacagggcagatgcgaaggcgtcacccgtgccgtgaatcatgtatggcagcttttcatgagccagctcgatcttgccggcaacaccggtggaagcgctggccatatagttgacgattttgccatcgccatggtcgatgcccttcaacaccacgttcttggcacccaacttcagcagagcaccaagcagctcgtcaaccgtggcctcatcaatattctggccaggatagtcacgcttggtgagaatgctcgcttcggtgaggttcggcatcaacacgtcggcaccatcggccagagcgcccattgcctcgcacagttccggcgtatacgtggggtacatttcgccggcgtcgcccatcaccgggtcaaccagacgtagcgcattcggatattcgcggtagagacgctgaatgatcgccacctgatcgggggagccgaggaagcctgaatacacgccatccagttccacgtcttccttctgccaggcatccaagtaaccggagagaatatccgtggtgtcgtggaacgtgaacactgcatagcgcgtgtgcgccgagaacagggcggtcggcaccgggcacacatcgcagcctgcggccgagagaatcggaatcgcggcggtcagcgagcacttgccgtagccgcacatgtcgtgcacggcggccacgcgcggaatatagttcggatcacggtcatacagtgttacatcggtcatgtctgttcgaatcccttcaccatgttggcggaataattcattggcgatgtttgactgtagtcgttcgtcatgtaaaccatgtaaccgggcggcggaaaaaggaacagacgtcatcgccgagcgggcaaaccgtcttggtgacgggtggaacaagcaatcatcacggacacttgagccatgcgcgaaaggcatggtagcgatatcaccgtgaccgcagtcgaccgtgaaagcgcatgcgtgcggcccggcgtgtcgcgataatttcaacgactttttcgtgacttctgacagtctcccacgtcaatgatcccaaggctttataagcccttataggcaagcccgataacgttcggcttgcgccgcgcggcccaagcgtcgtaacttcataaccaacacctcgccaaccgcccgaacacggcaggcgggtggcaaggaaaaatcctcgcgacctagcacaaccaaggagaaagacccatggccgagaacaacaagaagtaccgttttgaaaccctgcagctgcatgtgggccaggagcaggccgacccggccaccgactcccgtgcagtcccgatctacgccaccaccagctacgtcttccacaacttcgaccacgccgaggctcgcttcggtctcgctgacccgggcaacatctacggccgtttgaccaacaccacccagggtgtcttcgaggaccgcatcgccgcccttgaaggtggtaccgcaggccttgccgtagcctccggtgcagccgccgtggaatacgcggtgcgcaacatcacccagtccggtgaccacatcgtcgccgccaagaacatctacggcggtaccttcaacctgctacgccacaccctgccgcgcgacggcatcaccaccaccttcgtctccgccgagaacccgcaggagttcgaggacgccatccaggagaacaccaagctcgtctacttcgagaccttcggcaacccgaacgccgacctgccggacttcgaggccatctccgaaattgcccacaagcatcacctgccggtgatcgtggacaacaccttcgccactccgtacctgttccgcccgctggagcacggcgccgacgtggtggtcgagtccgccaccaagttcatcggcggccacggcaccaccctcggcggtgtgatcgtcgaaggcggcaagttcaactgggccgaggtgccgggcaagttcccgaccctgaccgagccggacccctcctaccacggcctgaacttctacgaggctctcggcggcaccgccttcgtgacccgtatccgcgccatcctgctgcgcgacaccggcgccaccctgtctccgttcgctgccttcctgctgctgcagggcaccgagaccctgtccctgcgcgtcgagcgccacgtccagaacgctctgaaggtcgtcgagtacctgcagaccgtgccggaagtcgagtccgtctcccacccgtccatcccgggccgtccggatcacgacctgtacgagaagtacttcccgaacggagcaggctccatcttcaccttcgatatcaagggcggaaaggatgcggctcgcgtcttcatcgacaatctgcacctgttctctctgcttgccaatgtggccgacgcaaagtccctcgtcatccacccggcttccactacgcactcccaggagaccttggaagagctcgaggaccagggcattcaccagggcaccatccgcctgtccatcggcaccgagaacatcgaggacattctcgatgacctgaagggcggcttcgaagcccttcgcgcttccggcttggccaagtgaggtcgacaggagggttgacggcccgatgagaaggggcgcgatgctaatggggtgcatcgcgaatcatcgagccgcatggggtgccttccgcctgatcgcttgacccaaggagtagaaagctcgcactgacgtcatgcagtgcgggctttcttgcgtctgtatgcctcacactgtttgcgcagaggcatgaatagtgtgagacctgagacgacataatcctcaaggatgagggccggcgcgtggcccctagcccaattcagtctggcgcacgatggggcgcgccgttatttcttcataagttggaatcgtcatccgggcataaggtccggccaaatatggagaggcattatgaacgtgcagaacccgtccgcatcgcgcggcatcgctattcaggccgtcgacttggtcaagaactacggcaccggcagcaatatggttcacgccctgcgtgacgtgaacgtgagtttcgaacgcggcaaattcaccgccatcatgggcccgtccggctccggcaaatccacgcttatgcacacgctcgccggcctcgactccgccacatccgggcatatccttttcggcggggcagacctgacccgcatggacgacaagcagctcaccttgctacgtcgccacaagatcggcttcatcttccaaagcttcaacctgttgcccatgttcaccgccgaacagaacatcctcatgccactgactctcgccggagacaagcccgaccacgcctggttcgacctgctcgtagaaaccttgggactcaagcaacggctcaaccatcgtccgaacgagctgtccggtggccagcagcagcgcgtggccatcgcccgcgcgctgattaccaagccgaagctggtgttcgctgacgagccgaccggcaacctcgactccgtttccagcgccgaagtgctcggcttcctgaagcgttcggtcaacgagcttggccaaaccatcgtcatggtcacgcacgatgcggtggccgcctcctacgccgaccgtgccatcgtattcgccgacggacagatcgtggccgatgaatcgaatcctactgccgaaacgatgaacgagctgcttatggccgaacgcgaacgcgccacgcgcactgccgtcaccagcacacgcgccgacacgctcgcccgtcttgccggcgtagaggatgtgcccaacctgcccatcaccgacgctccattgcccccagccgggagaaccggcaccatacgccatgcccgcgccgccgcacagcacactcgctgagccggaaagcgagagacaggatacccccatgttttccatcactctgaaacttatgaagaaaagcgccaggatgctgattccggcaggcatcgccatcctgatcggcactgcgttcatcgccgctaccttcctgttcggcaacgcgatgaacgatgcgcttgccgcccagaataccgcccagctcggcggtgcgaactacgtgatcagcccggatagcggcaaggacctgaccgataaggaccaggactacatctacacgcgcacggttaacgacttccagcttgaccgcatccgcgccaccaaaggcgtcaaggacgcacgtgccggctacgcgggttccgtgaccgtaacccgtggcaacaagcatgccagcagctacgtcatcaccaccgccacaaagcgcacgctgctgccggtcaccatcacgcaaggagaccagccggcggacagcaacgagatcgccctgaccaagtccgtggccgaccagctcggcgtcaaggtaggggaccgtgtgaccgtcaactcgcaggcggcgcagtatgcgggcaagaccggcgattcggccggtaataccggtgacgctggtgatgagtcggcccagaacgccgatggcacgagctcgcacgacggtgattccgatgccgcgtccggcgcgtccgccccatccgacggcaccgacacggccgccgactccggcatgaccgtgcgcgtggtcggcctcaccgacgacccgaacggtgcttacgcctactacggtggcgcttccgtgctttccgacaacgtcatcaccgcaatggccggcagcaacgatttcggcaacctgcctgtctacctcgtctatctcgacatcgacgatgccagcgacacggccgcggcatccaccgtaaaacaggtcagcacactgctccctaagcatttcagcgtgcaatcccgtgccgcgctcgtcgaggaatccgtcaaaagcatgagctcgggcgaaaccagcatcaccaccatcttcctgctgagcttcggcatgctcgccatgctggtcgcggcactcgtcatcgccaacaccttccaagtgctcgtggcacagcgccgccgcacactcgccctgctgcgcaccatcggcgcgaacaaaagccagctgtatgtctccgtgctgtttgaagccggtgtgctgggactgatcgcctccgcactgggagtgggcctgggcatcggactcatggccgcactatgccggtcgggcctgatgaaagccaccggcatgaccatgcgactggtactatccggtccggtgttcacggtgcctatggcattcggcatcattatgacggtgattgcctcgctaggctccgcgcgttccgctaccgccgtcaccccgctggaagcgttgcgacccatcgaactgaccgacacgcgacgggccggtgtggtccgcgccgtgatttccatgctgctgattgtgggcggcgtggcactgtgcgcattctctgtatggcagatgtccgagaaaatcgccggacgtgattcaatggccgacaagcagtattcgctggtgctgctcgccgccatcatcggatgtgcattgatcttccttggactggtgctttccgccacgttctggctaccggtgctcatgcgcggcgtgggcgcgctggttgcactggccggtccgtccgccaaagtggcacatgcgaacattcagaagaacccgcgccgcgtggccgccaccggtgccgcactgcttatcggcgtgacgctggtctccaccatcgccaccggtgccgccagcgccaagcaaaccatgaacgaggcgctgaccacgcgctacagcgtcgacatgattgccgctggcgccgatatgactggcaaacaggccggcgaggcagccaaagtcaagggcgttcagagcagtatctacgcgccgacccgcatgatgaccatgaaggatgccgacggcaagagcctgagtgtgctggtcgtgggcgtggatggcgtcgacgcgctgcgcaaggtggtgcgctccgatttgtccggtgtgaccattgatggcgattccgtactgatgcccaagtattccgccgctacaggcaaggatattccgctggacaagagcgttacgttcacggctggagcggccgaagcacaagccgatgccgccaatggtccgtccggtaatgatgcgaacggcagcgccgaaaacggcaatggacaatccggcggcacacagacgctgacgctcaaaccgcggaaggtggactatcgccgcatcgcctccaactacgccgcggtcgccttcgtggacgccagccacttcaccaacggtggaatcaaggccgacgggcatatcatgcttatgcgtattgacgccgagggcgcgggtgttgcgctgaacgacgtattcaccaacgtgcagaatgtgttctccgccagtgctggcgttaccgtgaccggtccggtggccgaacgtacgcaatgggagaccatgatcaacggcatgatggcattgttggtcggtttgattgcggtggctgtgctcatcgccttggtcggcgtagcgaacacgctgagtctgtcggtgatcgaacgcacacgcgaatccgccaccttgcgtgccatcggcatgacgcgcggccaactgcggcgctcgctggcggtggaggcgttgctgctttcgctcgtctccggcgtggtgggagtggtattgggtaccctgttcggctggctcggatcctacatggtgtttagtttgtacggcgacaccgtgttcccgttcgaatgggccaccaacggtgtggtgctcggcgtcgccgcgctcgccgctctgctggccagcgtggcacccgcccgccgggccgtcaaaacgccaccagttgaagccttggccgaagcgtagagcaataagctccctcatcagagggagcttttttgttacaccagcccgttatcgtacgcgaagactacagcctgtacgcggtcacgggcgttgattttggcgaggatatgcgccacgtgggttttgacggtgggaagggagataaagagcttgtccgcgatctcctgattgctcagaccatgggcgatctccaccagcacctcgcgttcacggtcggtaagcagatccagttcgggatcggtgtatgctgggcgtgacgtattggaaccgtcggaagcggccccggcaggggaggggatgccggtcatcgagccggcaccgttgccggccgcaccgccagagacgccgacggcggaaccgtacacggcaccggagcgcgcgacatcgccggtcagcgaaccatgctgcgcgtaaccgtcctgcatcatcttttcgatgagtcgcttggtggcggaaggcgcgataatcgcattgccttggaatacagtacgaatcgaattgagcaacgtttccggttcggtgtccttgagcaggaagcccgaggcgccggcattgatggccgccatcacatactcgtccaaatcgaacgtcgtcagaatgattacgcgcgtcggccggtcgtcagccgattcggccgagacggtcgcgtcggcggccgggctggccgaatcggccgcgttgtccggcgcggcggagagtgaggtaatacggctcgtggcctcaatgccatccatgccgggcatgcgcacatccatcagcaccacgtcgggatgcagggattccgccaacgccacggcttgggcgccgtcggacgcctgcccgaccacctccatatccggttgcgaaccaatgaccatggcaaaaccggcacgtaccagctcctggtcgtccgcaataatcacgcgaatgcttctgctctcgttcatgctctccactgtatccgtttcctatcggagcgccgctccataaacaccctgattgttccctgagttcttattgggcaagtctctcaccggggtaacgttcccgcgtgttgcatctgactatccaacgaagccgccggtcgcaactgcatatccggctgcacaccctcatgggcctcgtcgctgaacccggtttcacgcaacactctcaacagctgacgcatatgagccaatgcggcgcgcccccgagcaccaatcgcggcaaaagccgcttcaatctgcatactatcaggcgcaggttcggcgttgagcatcaccagtccctcgtcagcctgcgcaatcaccgattccagcgtggtcagtacttcggtttgcatcgccgcactaatacggttgcgctccaagttggccgccagcaccttttgccgctcctgctcggctcgcagcgcctcctcgcgtcgcaacagcaccagagcgtttgcgccacgcgaacggctccatcgagccatcgcaatgcaggcaaaaccgaccaacatgattcccgcgcccggcagcaagccggacaaaaccagcctccattttgagagcatggaactaccatcgggcaaaaacagatggaacagctgactgtatccattccacccagccatcaccttgatgcccgcaagccacgaatcggctgccagcgccacgctcacccagcgccaagcggactctcgtccatacaataccgccgaatacacggataccatcgcaaacatattgatggtcaaaatcgatggcaagaacaacagttgcacagcagacagcaccgccatcgccagcgcgctgccctctgggaagcggcgacggaacgccaaaggcgagagcataataatcgtcagcgttatagtcggcacgcggttcggcgaatacggggcattgccgatcatttgcaaatcgccatacgtggcggaatcaaatagcgcaatcagcacgatagtggcgataacgtccatcagaagatagtgccgctcggtccactgcgcaaatcgacccacccagttcgactcacgtgtatctccttggtcgagtactttggggcgcgcccgatccatcaatcctcgtatacgcgagataacggttagcaccggatcctccgtatcggtgccagactgtggggcggctggggagagcggaatcgtagccgccacaataaagccaccattcggccctgggccggcctgcacgctgccacccaacgactcaatgcgttcgtgcataccaaccaatccgtatccgggcttatgaccgtctgctgcagacgtcgcgccacggccgttatcggatacggtaatcgacagcacatcgtttgaccagatttcatcgatggtggctttagcaccctcgcccgcatgtttgcgcgtattggtcagtgcttcctgcacaagacggaacacggcggtttccgcgtcggcggacagccggtcaggttgcgctttgccggtcatatgccgggacaccaccagatgaccgtcaaacagcgaatcgatgtcggcatatccggtactgccactcgcaccgaacacattgaacagacgctgcatatcatgctgcgcgcgttccgcttcatggcgaatcgtacccatcgtgtgcttggcgatggccagatcatgcgcacccgcataccggccgccatccgactgcacaataatcgtggagagcgtatgtgccaccacatcatgcatatcacgggcgatgcgtgcgcgttcggccagcgccgcgatgcgcgtctcctcggcctctttcgccacaatggaggcgttgcgctcgcgcatggccgccagcgtggcgttgcgcgctcgctgccacaaggccatgatgatgacgctcagcacgctcgattcgatgaacgccgcctccatgccgaagtcagcgagcatcttggccccgcagttgacggcgccgcttgcccccacgacgccggtgaccgccgggcatgtgggcatcgtgatggcatcggacagccagccgtcgcggatgacgcgcgaaccggaggaaggtccgtcgaacagcggacccacgttgaaagacaccgaccagaccatcgccgcgaccagtcccatgacgaacgccgtgacgatgaaccgccaggaatgtcggggattgccgtacagaatcaccgaatacaccatgatcagggcgtagaaatcgaaatacatgatcgccgggccgaacacaagatgcgtgatggtcagcgccacgaacagccaggccgccggctccgggcaatacctgcgcagcatcagcggcacgaagaccggcagcgaccacagcgtcatcgacgcctgagttgcgggaaacaatatgccgcccgtcgaatcagggctggtgacgccgatgaacggcacgcagccggcgatcagcgccgcggcgagcaacgtgtcccatagcagtgtgcgggtcgactcccgtgcgcaccatgccctcacgcgcgccataatctccataacgcgcaaggctagcgtgtccggcgacgaaccggtatcactcttcaggaggatttatggactagagtcttgaaccatgacaatgctgagcaaatactacgtgcccggactggccatagaggaccattccatcgatgttccgctcgactggaccggccatgagccaggccaagcgttcgacggcgaaaccatcaaactgttctatcgcgtggtcaccgcgcccgaacacgtgcatgacgacctgcccctgctgattttcctgcaaggcggtcccggcggtgccggcccgcgcctcaacagcccgacctccgacggatggatcgaggaggccatcaggcacttccgggtgatcctgcccgaccagcgcggcaccggccgctcctcgcgcgtggacacgcacgccatggcccgcatcgccgccgcgcacgacgatgatgccgcggccggcgcacgagcccaagccgactacctgaagaagttccttgccgattccatcgtgcgtgacttcgaacatctgcgcctgaccgaattcggtggccgcaagtgggtgacgatgggccaaagctacggcggcttcctgaccctgaccacactgtccctgttcccggccggcgtaatcgccagcttcaccaccggcggcatcccgcacgtgccggtcgacgccgctgaagtgtacgagcataccttcccgcgcatggtgcgcaagacgactcagttctacgagcgctacccacaggacaaggagcgcgtggccgccatcgccgacaagctgccgactactgcggaagtcgccgaattcgttggcaaactcaccgattccgtactgaatccgatggctggtaccgatgtggagcatcgacttggcgtgatcgccggcatggccgcccacggcttcccgctgatgccgaacggcgacccgctcaccgtcgaacgcttccagtgcttgggatccgactttggcatgaagccgagcttcgagcgtgtccattggattcttgacgacgccttccttgatggcgatggttccgcttctgccgactcgccgttgtctgacgaatttttgaccaaggtgatgaacgccacgtcgtcgcgcccactgtactggccgctgcaggagttcatctacgccaacggtgagatggaacagcccattcgctgggccgcccagcgcgtgcgcgatggcaagcccgaattcggtgctgatgaacgcccgctcaacttcaccggcgaggccatgttcccgtggatgttcgaacaggagtctgcgttacgtccgttcaggccggccatggacctgctcatggaagacacgcacttcggcgtgatctatgacgaagaacagctggcccgcaatgaggtgccgttgcaggccgccgtctatttcgacgacatgtatgtcgattccggcctgcagctcgacaccttgagccgcgtgggtaacagccactactggaccaccaacgaattcgagcatgatggtctgcacggcccgctcgtcttcaagcatctctatgacgaagcccttaaccggggcgacctcgaagaactgttctgactcaaggaagcaagctccctctgatgagggagctctgtatacatgcacgaaaggaaaacgtatgactcagaacctcaccatcggttttatcggatatggcaacatggcccaggccatcgcccaaggcttcgtcgacgcgggcgtggtcgccggcggccagatggttgcctgcgccgcccactacgacaagcttgagaagaccaccgccgaacttggcgtgcgtccgttgcgcaatgcgctggaagtggtgacggccgccgacgtggtcatcatcgccatcaagccctaccagatcgccgccgtcgtcaagccgctggccgacgaacttgccaggccgggcaagatcgtcgtctccatcgccgccggctggaatctcaagaagtaccaggacctgttcgccaccgaagacggcgaatccgtcgactccccggacatccatatccagtgcaccattccgaacactccgatggccgtgggcaagggcgtgctcgtcaccgaatccgtcaacaccctgaccgacgacgaaaccgaaaccttcgagcagctattcggccccatcagcctcatcgagcgcgtggacaccgcgcatatgaacatcgccatggtggtggctggctgtgcgcccgccttcactgacatgtacatcgaggccttgggcgacgccggcgtgcagtacggtctgcagcgagccaccgcctaccggctcgccgccaagatggtcgaaggtgtcggcgcgctctacatggccactgaaacccatcccggtgccatgaaggacgccgtctgctcgcccggtggtaccaccatcaagggcgtcgcccagcttgaaaaggacgggttccgcggctcggtcatcgacgccgtagacgccatcgtcggctgactgccaatcagagttcgcgtatattcgcatatcacagtcaaggccttcgagccgtatgctcggaggcctttgcatatggccggttcaccacatgcacgttcaatgtgtccagcttctccctagactggaaccatgtctcttactatcggaatcgtcggactgcccaacgtcggcaagtccaccatgttcaacgcactgacccgcaacaacgtgctggccgaaaactacccgttcgccaccatcgagccgaacaccggcatcgtaccattgccggacaagcgtttgcccgtgctggccaagctggtccacaccgaaaaggtcgtgcccgccacggtgaccttcgtggacatcgccggcatcgtcaagggcgcctccgaaggcgaaggcctgggcaacaagttcctggccaacatccgcgaggcggacgcgatttgcgaggtcgtgcgcgccttcgaggacgacgacatcgtccacgtcaacggcaaggtggatccggccgacgacatcgacaccatcaacaccgagctgatcctcgccgacctgcagaccatcgaaaacgcgctgcccaagctggagaaggatctgagaggcaagaagatcgagccggcctacatggacgcagtcaagcaggcaaagaccatccttgaagccggcgagacgctcgacaaggccgcacgcgaaggccgcttcgacaaggattccgtctacgacctgcatctgatgaccgccaagccgttcatctacgtgttcaacgtggacgacaacgagctggccaacaaggacctgcaggctaagctcgccgcatccgtggccccggctccggccgtgttcctcaacgctcagttcgaggcagacctgaccgagctcgacgaggcggacgcccgcgaaatgctggccgacgctggcttgagcgagtccggtctcgaccaactggcccgcgtgggcttcgacatcctcggactgcagaccttcctgactgcaggcgtcaaggaagtgcgcgcttggcagatccacaagggctggaccgccccgcaggccgccggcgtgattcacaccgacttcgaaaagggcttcatcaaggctgacatcgtctcctacgacgatttcgtggccgccgacggctccatggccaagatcaaggaggaaggcaagctccgtcaggagggccgcgactacgtcatggccgacggagatattgtggagttcaagttcaatgtgtccaagcattagttttcaatggtttgaaccatgtaaatgtaatagccaccattaatagccaccatggtttcagcattatggaatattcacaatattttcacatttcatagtgtatgaaaccatggttcaaatggaatggttcagcggattgtgtcatacatacctcaaaaacgcgtttaaacggcattctaacggcttttcatatgaaatacgatgaagtattcaagttcatgctgaaaccgcgttaaaaccgccatagaatgatttcatttaaattccattgttttcaaactcatgtttgatagatatcatggtaatagaggtgagcaccggcgacttcacaaatggttaatccgatcaaaaggggggccgggatgcgtcaggcagtcatgcgccgtcaatgagattgaaaagcatggattgattggatgaatggcattcattggaatgagcactttcatacagcatttcaatgaaacgcaaatcaggttaacataaaccgcaataagattgaaattatgagaatcaggcagtcatgcgccgtcaatgagattgaaaagcatgtgtatgaaataattgaataaaaggctcgttttccatttgaaagatacggacgggtgattcctaatatttaacacctttggatgtatgccgtcagacaccgtgtaaataaacatgggtcctcatggaagcggtcgtaatcttgattggcaacattgctatttcatgccgattgggatggtcgtagagccgggctaaggggacggggaagttgctctcggaggaatacatggcgatgttggcggagcttccctttgaaatggctgtattaatccaaagattaatagaaacccgtgaaactcgggaagacgcaactgcatctaatatggatagaatagtgtccacctgacagcggcgcttttaaaaaatgaaaccatgatatttaaacattgtcattaatatattgcggcgtgccggcacaaggaacaaaccggcgcgccgtttccttttgatagatgtattcatgaatatattctattaaataaaaggattatggattatgattattttaagtattgtttattcagcggatttggctgatttaagcgcagtatggaacagcatggttcagaaatggataagtcctattgttatcatggtaatgggcgcactatcattaaagttcctgttgaacaggcaatggagtcagttcattaatttcctatccattggtatcggcgttgctgttgttgtatatattgctcctgtgatgttcaatgaaaatagtgatttgattaatagcgccagtgatacggcgaaaatgattaactgaaacgaatatgattggattgtttgatatataatacatgaatccaatccatatccaataatgaaaccggtgagaatacaaatcaccggtttcattgtatttgaatgaaaatatataatattgaagatccgtgaaaatcgatgccgtccacagagctgaatattacgcgctctgtggacggcatattttattgaaaccatgaaaaaccgcgtttatgactcatgatacacgaaatgttgaaaatcgctgtcagaatcgaaatgagcgttcagtcaaatagtgattgtttatagttattcatttcattttcaattgttgttttaagccatgaatcatggtatttaatagtgctacaacgaacattataaacagggttttttatgttcattgtttttgttataatcgcaccgtcaacgccaatatgtaaaccgtaagaatcatttgtattatcgtcagcgttaatgtatatgaaaccgcgtttccaactttgattgtagtcataatcaatgattacatttttatatgtatgtatttcatgtttaatattgtttgaaacaccaatgaaaaatgctgttcgaatctgttcgctacattcattgaatgtttttaatcgttcaaattgtgtttcaccgaaaatattccagtcaggttcacatttcagggtttcaattatatattctggtggcatttcattaacatcactcattgtattaatcctatcgttattgtgttctatttcaatgttatcattcattccattcatcatggaaatatccaccgttcaaaagttataatcagatgaacggtttgaatactatctatcaatatttaaaaagcctgaaaaatactggattttcattttccatttcaatggcgaaaatgcggattctcaaatgatatggcttttgaacacagtttgatagatagatagtgaaaacacacatattctattgaaaggattaataagtatgttatatggttatatgagggtttcaactggaacgcaggcaatacacggctattcattggaagaacagaagcaggctttaattaatgctggtgtggaagaaaaacgcatattcatggacgcgggcaaaaccggaaccaattttaatcgtgatggttggattaatttgacgaaagcagtccgtgatggcgacacgattgtatgttattccatggatagaatgggacgcaacttcaatgaaattgttcttaatatgaatgtattggaaaagaacggtattaacatacgcactattcgtgagaatgttgatacatcaacaccggcaggcaggatgaacgcacaaatattctctgccgttgcggaaatggaacatgctttaatactggaacggacagcagcaggcagggaagcagcgaagcgttcaggtaaggtttgtaatcggccgaaaacttacaacatgcgtaaagcgcgtaaggcattggaataccgtgaacagggctggacgattgatgatatcgcagtgcgtttgaaaacttcacacgcgggtgtctatcgcatgatggcggacgcgaaaaaggaacgcgagacaaaatgatgactatgttgaaacggattgtaagtgtaatggtttcatgtgtattcatttcaatggtatggaaggaaataatatggttgatggtaatacaatgagaaaagcgcgtcgtgttatggcgtggtttaatattaagaatatggataacgcagtgtcgttagttcaatactatcctgattatgattatgaggatttcaatgtattatttgaacaatatgacgcatggaatattgatgattgtattaacaaaatcctgtgtccgaatccgggacttacaaatattccagtgaatattaaaccgccgaaacattaatgttgaaaaagcatattcaacatcactattaatgtcaacacatggtgagtttaaaaaaatcccatggttccactttaaatatggaaccattttttaattccagttgaaagcgcgcacacaaaaaccaacaataaatacattacattaaacaaatcacacgcgtttcacacatgaaacaagttcatgtgttcacatgtgttcatatgttgtgttccaagaacgcgctaccactcgccacacacatttcatagtatttatcaggttctgtggttatgattgttcgcgcgcgtttgaaagttcgcggcggcgcttttttgtgcttattttatttttttcttttttattttttgttttcattgtttattttcatggtttcatcaactatgttgttcattgtttgaacagcagtatcacgcgtgaatcgttcaatggtctcgcgtttcatggttgctgttatgtgcgtgtaatgttgtgttatgctggagctcatgtgtcccagtatcgtttgcgccattgaaagcggaatgccgtcatatgccattaatgacgcggtgatgtgtcgtgtggtatgtggtttcaaatagttgtcatcggtgagtttgttattccatatttcattgaaataatcgcgttgtattctatgccatatccagttgaaatatgagtatgtcataacatgtttgttctttatgaatatgacatgttcattgttaataatcgttccatcgcgccatactggtgttaaaacagtatgatccagtgtttgaatatggttcatcaatattgcgtaataatccattggtaatggtattgttcgtgttttatatgtgtttgtccggccttttgttcccgcttttaatgtattgttattaaccagtgttttattaatagtcagtgtcatgttcgcatttgaaatttgttcccgtgtgattgctaatatttctcctattcttaatccgagtgtcatgagtttaatgattggatacatatgttgatacttttcattcttttcaacataacgcagtattccacgaaaatcattaacatactgttcaatgttaatattgttttttatttcagttttattctcataatgcggttttaataatgctggtttaaccttaatataatcgcgtttcaacgcatagtttaataccgcattaattaatgatgaatagtgaaatgcggttgactgaggtaatgttttatccagtattatccgttctatggtttcacgggaaactgttttaaccggtagtttttcaatggttttaaaaccgttgttccattcatgaactcgttgtgtgtatgttttttcacctaagtttgcttgttcaaggtattcattaaataccattttcaatgaggggttattcttattcacgcgtggtttattcacgcggcgtgccggttttattattccatccacgccgatttccgcgacgcgttttaaatgtttattgtttaaatccgcgcgtgtgtatgcgtaaacataacgccatgttccggcctgtttccatttcatacagtattgttcatgcccgttatgcgtggttttaaatattgaagccatgctatgagcatactgtaagccaccatgaaaagccaccatttcaaacatgccataccatgaaaaccattggaaatactggaatgatggaatacaagttcaacgtgtccaagtagttttcctcggctccccttcctgaggggagccgtcgcggaaagcgactgacgggagtgttgcggaaaggtccgagcagtgttggttgcccagacctttcttcatgttacgaacctttatgaacctcgttgagatgagatgtttgcgtctacttttcttaggcttccgcgttctcgtcggctcctgtggcgagaacattcctcaatgatttcgccacctgtattttcagcggacgttttccggtctgtacgaccagccccgcggccaagagctcttccacgtatttccttgcgctctgtttggacagtccgatgtgatgggccacttcgtccaacgacatggatttggacgagtcgaacagctcttcctgaatcacgccatagagcaccgagacggcattgcgcgatagggcatgcctcttttcaagctgtgtacagagtatccgacctttgtcgagctgatcgaccttgatactgagttcgtcaatcagttcatcctgggcttgttggatgaatccgaggatggtgttcacgaagagcgtgagttcgccgcagttcagcttgtcctccgcttccatgaatgctttgtagtaggcgttcttgttctccgcgatggtgcgggacagggatagcacggtgggcatagtcaggtcgtggttcaggtacagggccaggagataccggccggtcctgccgttgccgtcgtaaaacgggtgaacatactcgaacaggaagtgcgacatgatggccgactgcagccggggaatctcgtcggaggtcgcgagatggatcatatcggtgaggagtgcgccgatgttgccttcgcctttgactccgttatggatcgcgaggccgtgcggcccctgtatttccacatcgcctttccggaacaggtcgccgtccggctgattgctctcatcgatttcgtcgagcacgaccttgtcgtagatgtcgcggatggcggcgatgcctgccggcaacgcggagtccttgtccgtgaggttcaggtacagcttggcaaattcgctgaaccgcgccttggaatcgtcgccgtccctccttgccttgtcggccgcgtccacggcgtcctgggtttccttgcgggtgctgcgcacgccttccatctcgttggtggcgaacagttcctcactgatggaatgccgtatgtagtcccagtgcatgacgccgggaatcaggttccatagccgtgatatgcgcctttcggcgagaagtatattttccatgagcagggtcgtctcgcgtggcgtggcggagaacagctcgcccaatggcgtgatgaccccggtcctgaatgtggaatctgcctcaagccgctgccgtgcgagtgccgcatggttattgaaggaatcgactgacctgtcggcatggaacagccttgccaaacttctatacttcatatccatgagagagactcacttcccaaagagcatccttgattatagaaagtataagatagagaaggaaatgagtcaataaacaactataaaatcatggataatacaaaaatatagttgtgcgcatgactgcatgtgagtgacatatggtagtgcccgaaatgcgtgtcagtagtgaaatacttcatgatctgttgttctttctgaatatgtgatggtatgcaatgggttttgccgcggtgcattgcgttgcgacgatgccaagaacacatgctcgtacaggtgcgtttatgaggcatggtgcgaatgagtcgctcgatatcaccggcaatgattcagctatgcgccaatgagaggtgtactgatcagatggcgtgttcgttcacgccgttgctgctgaatgcgatgtgttgatcatgattcgcgcaccataaggtctttcgtccgaatccgtcaaatcacgcggtgtgtgaaatgcccgttgtatataaaaaagtccggtgcaacgcacgatgataatgcgctgcaccggacctactgcagaaacaattgttacagactgtagatctgtgcgccgaacggccagagcgcgagcttggccattttgaacgactggaggccgaacgggatgccgatgatggtgatgcagttgagcacgcctgcacccagatagccgagtgccatccaccagccgaccagcaccacccagaggatattggccagcgtggagccaacgccgccaccgtattgcacggttttgccgaacggcgtcaaggtaaggcccgccattttgaacgcctgaactcctagtggaataccgataatggtgatgcacagaaacagtccgatcagtgtccagctgatggcgattgccagtccgcccagaatgatccacagaatattgccgatgaccctcatcgtaagttcctcacatttgccggcattgcgccggataccgaatcgaatgctggattccattctattaggcgaacgcgggcgatatgtggggaatcggtgacgggacccctgagcatcccctgaatcgtccctgagccgcatgctcaggcgcctactcgggtgagcattctcacattcggctgatttctagcgaaaacccttgtgcgggcgggctgtggactatagcatcacg

SEQ ID NO: 1216 - DNA, 11098 bp, Unknown
  R81_24m  MAG No. k141_22055
gcgatcttgccggcgtccttggtggcctgacgctgggcatcgttgaagtatgccgggcaggtgatgacagcatcggtgacgggctcaccgaggtaagcctcagcgtccctcttcagcttcatcagaatctgtgcggaaatctcctgcggggtccacttcttgccgtcgatgtcgacggtccaatcggtgcccatgtggcgcttgacggaggagatggtgcggtcaacgttggtcacggcctgacgcttggccacttcgccgacgaggatctcgccggacttggagaaagccaccacggacggcgtggtacgggcgccttcggcgttgacgataacggtgggctcgccaccttcaagagttgcgatgcaggaattcgtggttcccagatcgataccaactgcgcgtgccataatgtgtgctcctttgtgggacttgcgattgcccggccggcgccgccgttcgccacgacctgttcgggttgtgacgcgcggtgtgcgcgagccgtctcgcacgtgttcattctttcgtttttcgcccgggtttcggtcggttccttgtgcggttcctctcggttgtggggtttgcgttcgcaaccgcccattcccgcgcttccgaaacttgagcctacaccactcaactttaaaccgcaagtgcatattcccggattcggcaaaaaacttgagcgattctcactcaggtttctgcgaagcgcggcacacggcacgtatcgcatcacagccaaaagccgccggaaaaccatcgcccgccgggcatcggctcggcgggcgatggttttccggcggctggacgactcgggattaccggtcggccaaggccgaatcaattgttcctggcgttacgcgcggccttgatgagcatcgcgatcgcaaccagcatcacagccgcgatggcgatggccatgacggcggtaccggtggcgcccagcgggccggagaccgcggaatcgttcggcaccttgcccgaagcgatcacgccgttcttgtcggcgcccggcttcttgtcggcggagccggcggccggcgcctggatggcgacggtcgcgaccttgccggactggcgaccggtgacggtgagcgtgtactcggcgccttccgacatcttgtcgagcgcgatcgaagtggtctgcgcgggcttgacgcgcacaccggacaacggggtgctggaatcggacttggacaccacggcgccgttcttgtccttcagctcgtagctgagcagcgcgtcgccgttgaaaccgtcgacattggcgacgtacttgccggcctgcgtgcgggcgaccttcacggtgccgtccttggagagcgcgttctgctcgtcaggggaggtggccaggcccagggcgccggcgatggtgtagaagttatcggtctgatcggtcaggccgatgacgcgctgggcgccggggccggaagcggcgatgcgcagctgggtgccggtgtgctccatgtcgccgccgttgtagccgccttcggcgtcggtggaggcttcctgggcggtgccgtaggagacgaccatgttgttgccgtcggcggacttgagcacggtggacagcgcgtaggccggctgggcgttgaggacctgggaggtgtgcgcatgatcggcggtgacgatcaccagcgtgttcgtgaggtccacgttcttgatggcgtaggcgatggcctggtcgaagtcgtcggtctcgccgatctggccgcaggcgttggcgttgtggtcctgcttatcgatcgaagcgccttcgacctgcaggaggaagccgttcttctggccgttcgggttggcgttgagcagatcgagcgccttcttggtcatgtccttgagcgaggcaccacggttgccgagccaggcgtcattcggggtgcacacggtcgggttggcgtccttggccggatccttggcggtggccttggacgggttgaacttggtcggcatgttgccgtcgctcatcagggcgagcaccggctggccatccttgtactgcagggcgttcatcgcggccgggtcgttctcaacggtctggaagcccatgtccttggcctgctcccacacggtcttgcccttgtattcgccgccctgcacggtctggcggaagtacttggagccaccgccgatggtcacatcggcgcgggtgtcgagcagctgctcggagatggagccgatgccgccgttctccttgagctggttggcgaggcactgtttggaggcgttgttggaggtgccgtcggtcttgccctgcgggccgtagcaggcacgctcggtggagtgcgattccagcacggccggggtggcgtcctggatttccgcggtggacacgttgccggtggccttgccggcggccttggcaagctcgaagagattcagctgcgggttgccgtagatgtcgacatccacggcgttgttgtaggtcttggtgccggtcgcccatgcggaaccggacgcggaggaatcggtgacgggggtgagcttgcccgggttggggttggcgaccagcttgccggcggcatccttgccgacggcgctgtccttgctgccgccgccgagcgagaaggtcgtgtactggccggtgcccgcctgcacgtcgtcaagcgcgccgggctgaccgaccgcgtccagaccatcgaagtggccgttggcgcctttcagatagtcgcgggcgacggtgatttccgaatcgcccatgccgtcgccgatgaacagcacgacgttcttcgcgctcttgttgccgatggcggcgatgcgctgcgcggcgccgtgcttggcgagctcggcgaccgacttgccgttggggctgtaggtgccgttcgcggcatcgacagcaaacgccggagcggcgagcgcgccgagcgtcgcgatggaggcgatcgccgcgacggcgctcgtcaaaaccttgtgattgcccattgttcgtccttcttccatgcagtgtcatctgcgccgtccggcccgcactcctccggccgcacccgtttggccacgtccgtcgtcgtcatgccttccagcttcgcggaaccgttccgcacctgcattgcttggatctttcgattccggattccacggtaggcatcacaagccaacgtccggataccgccggaagaacgccggatgaacattcttcgtcgaatcgggccacggcatcatcgccgcatgaaccggcaagccatacacgatccgcacctggcagtacatgttctcgaaaatccgccccgaattccccgaggcggcgttcgtcgccgaatgtgggccgaccgaacgaatcaatgcaggccggattcgacatggacttctacctcgactggcgctgggacggccccccaacgctctccccgcagtcgttcgtcgtgctcggatagcccgctaattgcccaactcaccgaatgtattgcaatcgttgtcaatatgagttacggtaaagacagaacagctcgaacattggtctgtcagattgccggaacctcaacgcagagcggccctcgaacagcaatgcaaacgactagcagtacccgatctgcaagcaaggagtcatcatgactgacgcgtacggcaacgacgcagcgaccagcaccggcaccatcgcagacaccaccaacgacgccgcttccggtgccccgcagcgcgcggaaagcgcggaacgactcgcccgtccgctggtcaagctggccaaagcatgcgggctttccacctcgttcatcgaccagctcggcacctacaccgaaatcagcgacgaggccttggtcgccgtgctcaaggccctcgacgtggacgcatccagcgacgaggccatcgcacgctccatgaccgaacttgaggccgaaaacagcaaacgtttgctaccacccaccatcatggccaccaccggcaagccgacaagcctgaccctgaattgcccgtcggatgcggacatcaccgcctccatcgagctggaggacagcaccgcgtttggccactttgccctgctgccgaacctcaattccggcaagccggacttgaccatcgcccccgatctgccgatgggctaccacacactgaccgtcacggtggacgggcgcgagggcaaggcggccatcatcgccgcccccgcgcgcattcccgtgccggaggcggtcgccgagcaccagcggtggggctggatgacgcagatgtattccgtgcggtctcgcgaatcgtggggcatcggcgattacggcgatctgaagctgctgctggcggacgcggccgacaagtccaaggccgacttcatgctcatcaacccgattcacgccggcgcgccgattccgccgcttgagccatcgccgtatctaccggaatcgcgccgattcctcaacgtgacgtacatccgcccgcaggacatccccgaatacggcacgctgccggccgatatccgagcgcaggtggatgcgctgcatgattcggtggccgcacgcaatgacgaatcgaacccgatggacatcaacgcggcgtgggcggccaaacgcccggcgctgcgcctgatcttcgacgcgggccgcaacaacaagcgcgagctcgaattcgagcatttcaagaccaccgccggcccggacctcgattccttcgccacctggtgcctgtgcttcgaggtatggggcgcgccgtggggcgagaaccgttggttcttcgaggagaccatcgacgacccggccgtgcgccagctcgtcgaggagcaccacgacctgttcgagttcaaccgctggctgcagtggattgccgccgagcaggtgaacgccgcgcagcaggaggcgctggaccacggcatgacactgggtctgatgcaagacatggccgtgggcgtgcacgggctcggcgcggatgcctgggccaatccggaacgcttcgcctccggcggcgtcacggtcggctgcccgccggacttctataaccagcagggccaggattggggccagccgccgttcagcccacgctatctggaggccaccggctaccaggtgtaccgcgagatggtgcattcgatgtacgagcacgcgggcgcggtgcgcatcgaccatgtgctgggcctgttccgcctgtggtggattccgcaggggctcggcgccctcaacggcgcatacgtaacgtacaaccacgaagcgatgctgggagtactggccatcgaagccacgcgcgccggaggcatggtgattggcgaggatctgggcaccgtgccggattacgtgcgccgcattctggccgatcacggcgtactcggcactgacgtggaatggttcaaccgcgtggacgattcgccgaacgccggcgacccgtaccgcgcacccgaggactaccgcaagcaggcattggcctcggtgaccacgcacgatctgccacccaccgccggctacctgaacttcgaacacgtcaagctgcgcgaggagctgcatctcctgagcgagccggtggaggcgttcgccgcctcggcgatggccgaacgcacggccatgatgaaccgtctggtggagaacggctatatctcacagaccgtggcggatgatgtggaaggccatgtgcaggagatcgtggaggcgatgcacgccatgctcaccgatacgccgtcgctgctgctgcaggcagcgttggtggacggcgtgggcgaatgccgttcccagaatcagccgggcacttccagcgagtattcgaactggcgcgtgccgctggcggacagctcaggccacgtggtgcataccgacgaggtcttcgacctgccacgcgtgcagtccctagccgccgtgatgcgccgagagaagcggtgatcgattccgcaatgggaaattggtctaaatcggcttcgaggggctgatttggcctttcccggacatccacttccgcttcaaggggctggcgcccaagtagacccagcgcgagaacggcggaatgacgttggcacaaagtcgtttgcacttgtggtttcaccggcaaggagccccttgaaacggaagtagatgtccgggacaccctaaatcagcccctcgtaatcgagatagccgaagacgacgacttgttatgggcatgttatcgttgtcatgacaatgattgttcgcgacggcgaaggagcgacggcatatgaccaaggcaagcattcaggcagtggcccgcgaggccggcgtttccgtatccacggtgtcccggaccttcgccaagccggatctggtgcttcccgagactcgagaccgagtgatggccgcggccgaaaagctcgactactcagtctcacgctcggccgccgccctaaaatccggccaatcgttccgtatcgcactacttgccagcgagaccatcgccagttggttcaattcgaacatcttcgccggtcttgactcggcgctgcgcccctccggctacgacactgtgccctaccccatgcgcaacgccgccgagcgccacgacttctttgcggatttgcccgtgcggcgcaatgcggatgcggtgattgtcagctccttcgacatcgaaccggctgaagtgaagcggctgaagcatatgcacgtgccgattgtcggcatcaacatcccctccaccgatgggttcgacgcaggcgtgagcattgatgattacgccgccacacgttcggctatcgagcacctgattgcactcggccaccggcatatcgcgttcgtcggcagcgcaccgaccgaaaccaatatgcgctacagtaccgaggctcgtttgcagggcgtcattgatgccgctgccgcccatccggggatcgagctaacgcccctgagcattcaacgcggtcttggcgaaagcaacgcggcattgaacgccgtactgaacgcctcccccagcatcaccgccttctgttttgaggatgatgaaatggccgcgcccgtgctgtatcgcctgcgtcaatacgggcggcgggtacctcaggacatttccatcatcggcttcgacgattccaccctgtccgccgccgtgggactgaccacgctgcatcaggacccgttcgcaatgggcgcgactgccgggcacatggtattggatgccattgccggcaagtcaatcgaaccggcattcgtacggccggacactccgctaatactgcgcgaaaccaccgcgccgcctgccgcgacagcagcgcccgcgcaggcgtgaccacgttaccaccgcaaaacgccgataaatcgatttttgcatgtgtaattcacatgatatcgttgtcatcatcaatacaacggtcgggccttcacacagcagttcgggcgcgaccggaacaacccaaccacaacgcacccggaacaggagggaatcggcatgaccgcaaataacctcaatgacgactggtggaagcaggccgtcgtctaccagatctacccgcgcagcttcaaggacgttaacggcgacggcatcggcgacatcgccggcgttaccgagaaaatggactacctgaagaacctcggcgtggacgccatctggctctccccgttctacccctccgatctggcggacggcggctacgacgtgatcgactaccgcaacgtcgacccgcgactgggcaccatggacgacttcgacgccatggccaaagccgcgcatgaggccggcatcaaggtaatcgtggacatcgtgcccaaccacaccgccgacaagcacgtgttcttccaggaggccctcgccgccgagcctggctccccggcgcgcgaccgctacatcttccgcgacggccgcggcgagcatggcgaactgcccccgaacgactggcaatccttcttcggcggcccggcctgggcgcgcgtggccgacggccagtggtatctgcacctgttcgataaggcgcagccggacgtcaactggaagaatccggacatccacgaggagttcaagaagaccctgcgtttctggtccgaccacggcaccgacggcttccgcatcgacgtggcgcacggcctggccaaggacctcgaatccaagccgttggaagagctcggccgcgaatacagcgtggtcggcgtgctgaatcatgacttcagccacccgctgttcgaccgtcgcgaggtgcacgatatctaccgcgaatggcgcgaggtgttcaacgagtacaacccgccgcgctttgccgtggccgaggcgtgggtggtgcccgagcaccagcacctgtacgcttcgatggacgagctgggccagtccttcaacttcgacttcgcgcaagccaactggtatgccgacgagttccgcgaggccatcgccgccggactcaaggcggcggccgaaaccggcggttccaccaccacgtgggtcatgaacaatcacgacgtgccgcgcagcccctcccgttacggcctgccgcagatcaagggcgcgccctaccaccagctgccgcacgactggctgctgcgcaacggcactacctatcccgaggatcgcgagcttggcactcgccgcgcccgcgccgccgctttgatggagctcggcctgcccggtgccgcctatatctatcagggcgaggagctgggcctgtttgaggtggccgatattccgtgggatcacttggaggatccgaccgctttccacactgctcaggccacgatggacaagggccgcgacggctgccgcgtgccgctgccgtggaccgccgccgatgagccggccttggccgacttcagccgtccgactccggccgatgacggtaccggcgagaaccttgtgccgctgtgcgccgccggccagttcggcacgggcgcttccttcggcttctcgccggctacgcgcgctgagggcgtgacgccggccgccgatccgcacctgccgcaaccgctgtggttcaaggattacgcggtggacgtggagcaagccgacccggactcgatgctcgcgctgtatcgcgccgcactggcgattcgccaggagtcgctgaccgccacgcgcgacaccacggccgagcaggtggacatgggcgacgatgtggtggcgtacacccgcgcggcggttggcgggcgggtgttcacctcaatcaccaacttcggcaatgctccggtcgcgctgcccgatggctccgtggtgctggcgtccggcccgctgacccccgaaggccagctccccaccgacacttctgcgtgggttattcagtagagcttttgcgagcttacccgacgccagtcatccatcttctccggatgctggcgtcgtcctttttcccggctaagctgtctccatttcggggatgactgccctttctttccattcgcgacatgccaaccccgaaatacttaataatattctatatacttaacaagagatgtgaatcttacagattttcgttaaggattgaggtcgacatggatgccgagcattacattcgcgagacacttggtctgccctgccaaatcacttcttgggatggcactgcctcactgccgctatttctgaccaacggacggacattcagcaaactcaccatcgacaacacgagcatgctaatcgcgagcggagaggctcacccattcagcatcacacgcgtcaccgccgacgccagcaggcttgagcagcggacggatctgcccattgtctttcagtttccccggctttctgcataccagcgaaaagccttgattcagaatcacgttcctttcatcgtgcccggtacccaactgtatatcccttcactgggcatggtgttcacccagcgcatctcctcacggctgctggagaacgcacaggatatcgaggtgcgacccttctcccccgcaacacagctggtctggctgtatttgctctactccaacgagagcaaagtccaatcagatattgcccgagcgcttcagtttaccgaagctcaggtcagcgttgccgtgacgctgttagaacagctggcattcgtgcaccgcaccaagcaaggccgcagcaatagcgtcgaactactgacttcaaggcagaccagccgacttgatttactgaaatcatcttggcatctcctgaagtcaccaatattcagcaaatataccgtcacgaatcgcaatcgccagatgattgccgacgagctgattccggccggcgaatttgctctttcgcgcaggacgcaactggccaccccaaaactgcgaatctatgccgttgaacgtcattggctcaagcagcacaacaaggaactatgcattatcgaccccgctttggaaaaggtgccagataatgcatatattctggagctgtggaggtacgatccccgcctacttgctcaatatacgcaggaagactaccttgccgaccccatttccacggccctgactcttggcgagattgccgacgaacgtttggaagacgccatacaagaatccatccgcaatactttctcaggagcgacaatatgacacaaggcctgcagctcatcagaacggcctttgccggctacgaagattcttacgtaatcatcggcggcaccgcttgtgacatcatcatgaccgacaacgacctggacttccgagccaccaaagatattgacatggtgctgattgccgagggacatcttcgcgagtttgcacaacgattgtggtctttcattcgcgatggcggatacacctctatcacgaagaactccgcacagcctcacctgtaccgtttcatgcaccccagtacgtacgggtatcccactatgatcgagctattttcacgtcaccctgacttccctattgtgccgaactcgttcctgacgccattgcatattgcaaacgacgtttccagcctgtcagccatcatgctgaacgacagctactatcggctattgcagcaaggccgcgaatcaatacaaggcatcagcgtgcttaacgagaaatatctcattcctttcaaggcgaaagcatggttggatctcaacgcccgagaacaacatggcgagcacgtagacggaaaagatctcaagaagcataaatatgatgtattccgtttggctcaactacttgctccagaggatcgcgtgtctctcaacgacgaggcctaccatgatctcgctgattttcttggggaaatatcccatgaaacgcttccgatgaagcagctcggcatacggggaacacagcaaggcatcattgatttgatagccggcgtatatcaactgtctatcccaccacgcgatgaa

SEQ ID NO: 1217 - DNA, 6323 bp, Unknown
  R81_24m  MAG No. k141_22060
atccacgaatgcgatatctccatagatgattgcgttctgtgcgttacgcagtactagggaaatcttgatttgctgtccatcagatggcttgaatccatctgccacggcgcggacctcgccattgaacgtcgtgccgccgtccctgttgtctattttggatattccactgatggggaaggcggcggttccctgagtcttggcgacgttgtatgtatccggattgagcacagtaaaatcaaccgtttctggggcggtgccttcgcctgcttgaccggcgtcatatacagtctgattcgggaatgccatattcagtgcttgcgtctgcgagaacacgatggaaccgtctttggcccgccccgtaatggtaatctgcggatactgcacctgctgggtcttactggtgttgcgcagggcgaaagcgtagtggacatacccttgctggtccgccgaccagccggattccactattttcagaggattgtcggtgacggtgtcttgattgtctccatcagcgccgtcagtgccgcctactccgcccgtgccattggcattgtcggttcctgacccgttcgaggagtgcccgccatcggccttatcggttgattggctgctggattgtgtcgaggaatcgggtgatgttgccgacccgataatgccaagttggcctgccaacacaatgcctcccgcaatggcggcgattatcagtgccgctccggcaatggaccacagcacgatggcgcgtttgctcaagtgcagacgccggaatagtcgagacgccgacgcgctgccgttcgttgttctcgttgatggcggatttgccgatgatgcgttcggtatgggcggattggactgggagaacagcgcctggcgaaactcttggacgctctgtggccgtttgctgggctcgaatgcgcacgcatagccgatgacggcgcgtagtcgagccggtactgcggcatcatcggcaagtcgctgctcgtagtcgctggcgtcgggatatacgccggtcagcatgaatccgagtagccggcccagcgagaatacgtcggaacgcgcgtcggttttggcaaagccatattgctcaggcgaggcgaatccgtaggtgccaagcgccgtggtatcccgtgaacggttgcttgcctctgaccggatgcgcgcgatgccgaaatcgatgagatgcgcgccatcctgggccacgatgacgttggccggcgtgatgtcgcggtggataacgccgtgctggtgaagctcctgcacggcttcgcaaatttggtcgataagctgcacggccacattcggtgcaagccgcccgttttcctccgcaatttgcgcaagcgtgctgcccggcacgtaatcgtagacgatgacgaaccggtcgggcagctcgtacgtcgcttccacacgcggcagacgattactctggcaggcgctgagcgccgcccacacattgcgttgcgctaggggagagggaatcttcttgcgtacgaacgggccgttgccgtcaatgctcaccagttcggtgacgccggaaggtccgcgagcgagcgtacgctcgacatggtacgcatcgtcgatgctcatcgcatgcatcgcctgcttatcgtccatgtctctccttgatgccctcttacttgcgtctcactggtgagtgttgttgggccgaatgtcgtcaatcggccggtagcaacgtcgcctctcccatacgatacaactcgtcgtccgtggcaatgcggtcgaatccattgcgtatacaccagatgataatcgcgtcgcgtcgctgtttgcaccacagttcggaaacgcctgcaagacgaagtagccgttgggtttcacgtaatgtgcacttgagaccaaaagccagcataatggcgtgatctcggccggggcggcttttgccggagaaaatgtcataaaccactgtggcgttgaggccggatgcccgcaccacgtcggctcgtctcaggtcatgggcttccatacggtcgaacagatagtcggtcagcgtgcgtgcgctgacgagtccctcatcgagatactgctcaatgctggcgctggcgagcagccgatccaacagttcctcggtcaaatgttcttcggggatgtctgccattgcccatgctccttgtcgctgtgttgcgggtgctgtgctgcgccatcgtacgcggttgctcgattcccagcgtacaggacgccgacttttcggaaacacgccgaaaaattcagttgtcagctgatgtatggcccgcgcgtgtcgccgacaatggtcgatgccatccgtgtaggtgcggtggcggaaaggatgttcatgcgcggtatcaagcatcgacaataaagctaatatgcatacaaaatgctaatttgcgtacataataacaacgccatacactggtttcgatgtatcgcagagcaaagcgagcaataagaagggacgcaatgatgagcgaacgataccggcttgccatggcagtcggattgaccgtaacggttgccgggcttgcctcttctgtgctggtaatgctgctgcttaaggaaagaagggcatcatgacaacgccatttgatcaacaacctcagccggttccaccgtccgaaggcacgaatgacgcaccggaagatcgcgcgaatgcgcctaccgtgccgaatactgtaccggctggccaaccgaacgtagcgtctgatggtgctaccaccactccgatgactccggctacggcatcgcagcggcccgccggcgcgccatttgatcgtgtatatgcggtcagtccgcaacagctgttccaagttattcacgaccagctgactactggcgccacgtttaccttggataacgaaaacacccagaccggagcgttttccttccactcctatgatggggtgaactgcacgctaaccgtagtcccgcagggtgcggcaggggccgccattcgtctggaggcgactggaaacgaaagcgccaagcgcgttgatgagttcctcgccgctctggacaagcgtattggtgtggctcctgcacccgccacacatggtgccggtgctgccactggttttgctggtgccgctgcgcctgccgtgcttgctccgaatgcacaaggggtgaagaagacttccaagctggctgtgttcgccattatttggggagtgttgttcgtactcgcccaatttgtggatgtttctggccgatcctggggcggactgctgttcgccacggtgattccggcactgctctcaggcttcgccgtatacgtgacccgcccgagtggcaaggtgcaaggccgagtgctggcctgggtggcagtcggtatcaccgttgtgggtctggtaatcggtggcgtgttcgtaattcgtgacgatgcgaaggccaaggctgatcgggcggaattggaagcatcgctcgccaccaagtgcgaagcatattcatggccggagtcggatatcgcggcgctgctgccgcagccgaaatccacaaagggtgaaattaaaagcgagtcttcggactatttctccatcgaggtgtgcggtaccgacgccaagcagtatgccgactacgtcaagtccgtgcaagacaacggtttcaccgtggactatagcaagtccgctgacagtttcaatgccaagaacgccgatggatacagtgtgagcgtttctcgtaacactgacgacgagaccatcatgtccatcactatccaggttccggaaaagaaggaagatacgtctacggacggcgacgccgcgaagcaggatgataagagcactgatacgggcactgattccagcgatgccaacaagcagagcgaccagtcttcggatcagaaggcgcagcagaacaccaatgacagtgctgacctcaaggccacgatggacagctacgaggcctttatcgatgagtatgttgccttcatgaacaaatatcagaaatccgacaacgtggtcagcatggctaccgactatgccagcatgatgaagcgttactctgagttctcccagaaggtagacgccattgacgaaaactccctcagcagtgaggattcggcctactacaccgaggtcatgactcgatgcatgcagaagctcgcatcggtgggccagtgatcagactggcgtatcgaggtaacggttttccaagaaaggaacgatgacggtatatgggtatacgcggcagacagtatacgccaatggatgagccggccttcaacaaggccatccccggaacggaggctctggccggggcgctgaaggacacttttggcgcattccgtagtgggcttggtattaccgaacccgtggtttcggtgaattgcgaaggttgtggcgctccgctttccggtcatcgcaaagaagtcgttcgatgcgaatactgcgatcgcgaaacgcagctataaccaacatgccagcataacggccggtcttgcgattgcatagtcgcaagatcggccatatgcatgagatatcgaggaaaaaacagatggcagttattaaggcgttcgccggcgcgctcggcggtacattcgcggacctgtggcgtgatatcatcaccgctggtccgttcacggaacacaccgtcgttgtgccgggcattccccgcggaagcaacaacgatcgcggttcgaatgaatacggttccgagggaataatcaccaatggttcgcgtatctatgtgccagagaatactgcggcgttcattttctctgaaacaggtatcgaaaacgtcatcaccgagtcgggcggttatgaatatcgcaacggggagcagagtgtgctcgccggagacggcatcggatcgttcttcaatcaggttgccgatcgattcaccttcggaggccagcctggccgcaccaaatatgtggccttcgtcaacctgcgtgagattcgtggcatcaaattcggcacttctgcgccgctggtgtataacgaccggttctatggcgtcgatttggaaattcgcgcacgcggatccatgtcgctaaaggtcactgatccagttcgattcgttcgtaactttgtgcctgccactaccgtgtcgtattcattcgatgatgaagggccacgtaggcagattctgtctgaattcgtacagtcgtttattgtggccatcaattcgttgtccaatgaatatcgtatttcgcaattgcccggcaaggcgaatgacatcgcggcatgcgtgcgtggcgatcgggccaatgcgggtacgtggaatgatcgttttggctttgaagtgtccagtgtgggcatcgaaagtatcgagttcaccgagcaatcacgtcaactcgtgcagcagttcgcctcgaataagatgaatgttgccgcatacgagggcgtttcccagcaagctggcaatatggctgcccagcagcgcattgcgcaaggcatccaagacaacggctttggcgatggtggcatgttgctgggcatgaatatggcacaagccatcaatcctatgacggccgccccggttcaagcgccggcgcctgcgccggcaccggaagccgctgctcccgcctctcacacggcatccatgtctgtggaagaacaagtcgaggcgatgaaaaaattgaaggaattggttgatatcggcattctctcccaagaagaatttgatgcaaaaaagcacgaaattctcggcctataaacggcgcattcatgcaactcgagacagttgataatgagggaaacgttggtgcggtatatcggcgaaaacaatggatgaatatatcattgaataagcagtaattatcaggatggttggattcacattgacgtggttccgaccatccgcagatctgcgactacaagggagagaataatgttgaacaacagggttcgtttcgggaacatgaagcgtgtcaatcgtgcggtttgggcgttgaccgtgattcttatgatggctctgggtcttgtgcttgctggatgctcggggtcttctgacggtgcggacggcaaggaggaatccacatattcgaaaattgtcgccatcgccaagaaagggcgttcgctggccgatgtgaaagacgagctcaaggatgccggtttttcctcctctgattatgaggtgaaaagcgacacggacaaaatggtgctcaaagcttcgaactgggttgttcaatccgtggaagatggggacaagcctgttatcaatgttcgtaaagccagcgatatagcgcaggaggaagaaacgaagaaggtagctgaggagaagaaagcagctgaagaggcagccgccaagaaggcagctgaagaggcagccgccaagaaggcagctgaagaggcagccgccaagaaggcagctgaagaagaggctgcaagaacggccgctgaagaacaggctgc

SEQ ID NO: 1218 - DNA, 5098 bp, Unknown
  R81_24m  MAG No. k141_22780
agagaagcccgcaaggccagtacgagacgttcggcatccccgcaagatacggcaccggcatcgactggaacgagttccacacacgggtcgaatggcagtcgaacgactagaccgccggacacacattttggcctataaccccacgcgcggcgggtcggggccaaaggtgtccaaacggagggtacctggagggaaccgacaatcggggggaatcaaagcgaaaccccggaaaccgaatgatttcaacggtttccggggctccaatccgggcggaggatacgagattcgaactcgtgaggctgttacaccaacacgctttccaagcgtgcgccatagaccactaggcgaatcctccatgctttgcagcgcgcagttgaactgtgttccgcaggcaactcgaataagttaccacaggtttcggataagtgcacgcttcggcgtggcgcgtgtcgcgacgcggatgtgaagaatgatcactgcgagtgaaagactcactggaaagtcccgcgcaacacccgcacaaggaccgcatgcttgtgcagggcccacacacccgcgcgcacctacacaacccccggtaaagaaatcaccgtatccgggtgaattttcgatgttcgcccggcgcgcgcccgcaatcgcgcctaggctgttgagtcatgaacgaggggacagcggccgacgtaaccgcagcacatggcggccggtcgcgccaatcgaagaaacactcaaagacgtaccgcagcatatccgcgatccttagttggctcacggcccgccgcccgaccacgttatccacatcgctgcgcgcgcgattcctcccttacctgctcacgctcgctatcgcctggctgccgtggctcatactcacctggccgggctcgatgcgcgacgatacgcttgcccaatatctgcaatcgtccggtctgcaccactactacacccagcatccgctgtttgatacgctcacgttcggcctgttctggcatatcggcagcgcactcggctcccctctgatcgggcaggccctgtacaccgtgacccaagcggttctactcgccgccgggtgcgcgcttctgctgtgctacatccgcaaaatcggctcgccgcgctggctcatcggtctcggcctcgtctatcttgccaccaactatgtggtggtcggcgcaatcaccacgatgggcaaggactcgttgcacgccgtgttctatctgccgttggccgtgctgttcgtggaggcttgtctgacgcgcggctcggtactggcacgccgcccggtggcattcgcgttcgtcatcctgttgttcgccaccatcgtctccaagcggacggcgctcataatcgtgctatgcgacggctgctgtttgctcgccgtctgcacgcccaaaggcgcgcggcgtcgtgcgttcgcgtgtcttgcggttgccatcgttgtggcgcagggcgtgtggacgccattaagcgcggccgccacgcatgcgaatcgatcgcccggacgtgaggtgtggggcctggtcacccagcccgtggcccggctcgcgcacgatgatcccagcgcgatagacaaggttcagcggcggcggctgaacgcaatcatggacctcgactgggccgccgtcggcatcaacccgcaccgcaccgatgagaccttccgcactctgcgcgagcaccctaggccaaccgcggcgcaacaactcgcggccctgcaggtctgggcgcagctcggcctcgcgcatccggttgaatatgccacggcctatgccggggtgactcgcggatggtgggacccgcgcgtcaatttcgcgtaccccactgattccgactacctgttcacgcctagctatctcaggcaatgggcgtctttcctgtctgaaggtgcttggaagcatacttccgacggcgatgctgataccgtggcggccgaacgacttgccgccatcgaacatgaccttgcgccgctgaggggtacctccgacaagccgcaatggcagaaaaacatattgcgggcgattcatcggtgggtgcgttcggatggtcatgtcggtgttcgcaaaggcaatccgctgacttcgatggccctgtacgtcacgtggattccgctggctgctggtcttgcgctggcggtgcggcctgcgcgacgacgctacggccccgcactggccgcttacggtttgttggcattcacggtgctgtcgctgtatgcctcacccgtggcactattttggtatccgattccggtattcctcacgttgccgctttttgtggtgttgccgttcacattccgggaaagccatcctctctgagcatagttatctcagatagtgaaataattgcggggttgaaaagcactaaaacgccttctattacctcgcacccgtcaaaaaatcaagactgttgttcaagaatttttttctatagagttcatagttgtttttggaccattcgagtacttgaagtgagaggaattcagcatggttcgtcgcgcctgcgcgcagtccgctgaaatgaacacgatgcgggaacgtgatacgcgcgttgccgtttctcgcgtgcgcgcgaagtcgggcagcaccggtcgtctgcagtcggccacggtctcggctcgtgcatttgcggtcatcgtttttctgtttgcgatgatcgccgcgaccttcctcccctccgccatcattccgcagtccgcgttcgccgtgacgccggcaaccactgccactgctgccaccgtcaagagcgacgacaccaccagcgtcgattacgcgacctgggccgacgttgccaaggccgtcgaagcgcagttgcaggaaggccttaaggaatacaaggacggcaacccaatgggtgccaagtccgatttcggggctgcatacaccaccgtctacgtgacgtccaacttcaacaaagtggtgagcgacaccatcggcgcagacaagcagaccgcgcagcagcaggccttccaggacctgcaaagccaggtgttcacgtcagaccaggccgatcagcttacccagaaggtcaacgacctgaccgccgacctcgacgccacggcccagcagctcgacgccaacaccagcctcgccaacccgaagcagtactccgaagacctccagaagcagatcgccaaggagcgcaaagagctcgacgccaagaagaagcgcaccgaggaaacggccaagacttggaaggaagtcgcggatgcgatgcttccgatcctggacaacgcctacaaggcctatgagggtggcgacgccgccaagggcgccacgctcgtgaacgacgcctactaccagcactacgagaagctcggcttcgagaagaccgtgctgagcgccatcagcggcaaccgcgtctcccaggtggaataccagttcaagctgtgccgctcctcgatgaacaccggcaagcctgcttccgaagtcaagaagtacatcgacgacctgaagaacatgctggccaccgatgccgccaagctcgacggcggcgcggccgatgaggagggtggcttcctcaagttcatcaccagctcggtcggccaggcgttcctgattctgatccgcgagggtctcgaggccctgctcgtggtcgccgctgtggtggcctacctcgtcaagtccggcaacaagcgcttcaccaagtggatctacgtgggcgtgctcgccggtctggccggcgcaggcatcgtggcggtcatcttcatgctcgcgttcggcggctccggcccgctgcaggagatcatggaaggcgtgtgcgcgctcgtcgccatgtgcatgctgctgtggaccagcaactggatgctcaacaagtcctcggtggaagcgtggaaccgctacatcagggaaaagaccgaagccgcggtggcctctgtctcctcgcaggtcgaatccggcgagaaggtggcttcccgcacggtgatttcgctcgccatgctgagcttcctcgccgtgttccgtgagggcgccgaaaccgtgatcttctaccagtccatctacacgatgagccaggatacgcatggcatggtggtcggcgcactcgccgccgccgtggtgctcgtgatcatcttcctggtgattcgcttcacctccgtaaagattccgattggcccgttcttcctggtcacctcgatcctcatgtccgtgctggtggttgtcttcgccggcggcggcgtgcacgcgctcatcgagggcgacctgctgcccgccaactacctgccgggcgttcccaccaacgactggctcggattctacccgtacgccgaatgcatcatcgcccaggtactggcagccatcgccgtcatcgcgctgttcgtggttggctttgccaaacagcgtaaggccaaggcccggcttgcggccggtgcgagcaagtcggacgcgaaggctgacgaggagagcgcgcaggcgtagcacaacgcccggtgcgaccatctcgcgcaacacaacttgcgacatggcaatggaagcgattccagcccacgccgccacaactaaaaacagataagtcgtgaataatccattcaccacaacagaaggaataagagaaatgatgaagaacaagaagcttgccgctctgctcggcgtgctgctcgccggctccatggctgtttcgatggctgcttgcggttccaccaacaacgcttccgataccaagtcctcgaccagctcctccgacaccgccaagaaagacgactccaagaaggccgacgccccgactgagacctccggcttcgaagaggtcccggtcggcccctccggcaccgccaaggagcaagacaaggccgctggcccgctgaccgtgggtgccgtctacttccagcccatcgacatgtaccctgcttccatgggtctgaaggctgctgacgcttccttccacctggaagccgacatccacgcctctgaggaaggcaccgactacggctacggcaagggcgacttcgtccctgacctgactgtgaactacaccatcatcgacaagtccaccggcaaggaagtcgagggcggccaggccacctccggtaccttcatgcagatgcacgcctccgacggcccgcactacggcgccaacgtcaagctcgacaaggccggcacctaccaactcaagctctcca

SEQ ID NO: 1219 - DNA, 4943 bp, Unknown
  R81_24m  MAG No. k141_22809
accacgcacctgccgttcctcgacgatttggccgcgcagtttcccaaggcgctggtgcagaaggaccgtctgctgacgcacaacgcgaagcagcgcatctggacgtccgccggcggcagcatctgtctcgacctgtgcatcacgaagaacgcataaaccgtccgaccatccactcgtcacatcaaccgtcacatcatcaacaagtcaacaagggagtatcacccatgatcaatgtcggtttcatcggatgcggcgccatgggccgcgaccacgtgcgtcggatcacggacaagtgcggcaacgcgaaggtcgtcggcgtatacgacaccgtgctcggcaacgcgaagcaggccatcgaagacaaccgcctcgacgcgatgaagaccttcgtcggcgacggacagatcggcgccctgctgatggccggcatgcgtcactacaacgcgcaggcatccacgagctactacggcaccgacaacgtcatcaacgacacgctcatccacaacttcgacgtgctgcattacatgttcgacggcgacatcaccagcgtcgagatgaagttcgcccggatgaacacgctcaacccgaacggggagtccctgcgcgaaccgcagctggccatcgtcgagttctccgacggagccctcgccacagccgaggcgaacgtcaactgccagtacggctacgacatccaatgccgcctggtcggcgagtccggcatcatctcgctgccggatgtcgccacgccggaggtgcgcaaggccggtcagatcagccacgcgatctcgtccgcctggttcgaccgattcatcgaggcatacgaccgcgagttcgaccggttcttcgcgaatatcgaggccgaccggcagccgggcggcaaggaggcgaccgcatgggacggctatgtggcgaacgtggttgccgacgccgcgctggacagcctgcaccacggcggacgcatccccgtgacgctcaacgagcagccggcgctgtaccggtaatccgccgtttgttcaacggctcagcccgccagcgggggcaatgcgtgcatcctgctggcggaaattcatgacgccaacagggcgacacgtccaagctcaggccgcccaccacggacgcagcgggtaccagttgcccttcggcagcccctccttgtcgggcttgacggcgaggaactggtgcacctggatgccgttgagctcgaagttcaactcgcacgcggccagatacaggccgtacaccttcgcccgctcgtagccgacctgcttgacggcgtcggcccagttggccttgagattggcgttccaatgatgcagcgtcagcgcgtaatgctgccgcaggttctcctggttgacgacctcgaagccggcgtcgtgcagcgccgactcgatgaacccgggcgaggcgagatcgccgtcggggaagatgtatcggtcgaggaactcgtccgttccgggccggttgttcggcttgtccttggagatcgtgatctggtggttgagcaggcggccggccggcttgagcagcttgaacatctcatcgaagtagtggcggtagttcttcgcgcccacatgttccatcatgcccaccgaggtgatgccgtcgaagtctcgttccggcacttcgcggtagtccatcacgcgcagctcggccagatcctccagcccttcgcgcctgatccactcctgaccgtactcgatctgctcgtgcgacagcgatacgcccagtgccttgatgccgcgcttggctgcggcgatgaccagagcgccccagccgcatccgatgtcgagcatgcggtcgccgggcttgaggcccagcttgtcgagcaccaggtcgattttgttgcgctgcgcgtcatccaggctcatgtcgggcgtgtcgaacaccgcgcacgtgtacgtcatcgacggtccgatgaagtcggcgtagaactcgttcgacaggtcataatggaagctgacggtctcggagtcggccttttcggtgtgcgggaacagaccggacctgatgcgttcgaatttcgaggggccttcggactgcggcacctccaccttgtggtagccgtggctgagaacggccgcccccatgcgcgccagttcgagcggagatggctttcggatgtacgatgccagttcgacgagcttgcgcagctgcggatacgggtcggccacgtccagtccttcgatgtcgaagtagcccaggatgtatgcgcgggccaaaccgatctcgttcaggttgctcgccaactgatagatggccttaggactggtgacccggacctgcaggtcggcgtcttccggcccgaacgtcgatccgtcgaaggcttcgatgcacaccggcgcgtcctctttgaggaccgcctgcgccatttcacttaccaacatggtttttccactgcccatgtttcgcctcttttcccaacgactgcgacttgccggatatggcaatcaccgtgtcactgtagtcccgcgtcgtcatttttcgcgctgcgaggaaacaaaatcgctcactatgcatgcatcgggcaaccactatgtgaccagccactctgaaagcgaacatttggcggatatatatggacagcgcggccgcgccagtcgcattccgcatgtgaatcggaacgcggccagcggggccgcggttttcaggatgatcccggaccagccgtcatgagacggcgttcgtgtactccttcagggattcgccgatgccgccggactcgccagacgacttcaacgcggtgacgtgcccgtcggtatcgacgccaagcactccggagattgggttgatggcattgtagacgacgtcatattcgttgagtagcagcaggaactcggcggtgccactcgccttcgcctcgttcagcagcgtggttgacgtctcgcgtcgaacgatgccgctcttgtcgacgccgcccacctgcgcgatctcaatgatgtcgccgactttcgcgtcgcccttgatgactttggtgacacgcacccgggtgacggtctccggcacgcccagcgcgtccatgtcgatgtcgtcctccgtcagcccgtattgcgggttcgtttcaggcgttccggacgtgaaatcgatctcgggatacaggatgcgctcgcgcgagtcgagcgggacaccggtgaccaccagaccggcggccttgacgcccttttcgacggaagagtagccgggatagtcggcggtgatggactcggcggtcttcgccgtggtctccgtcgcggtcttcgccgtattctgcgtcgagtggccagcggtcggagagccgacggaatgcatatgcacggcgacacctaccaccagcgccgcaacaagcgccacgacggcgagcgtgcccttgatgacgtttgactgcttcatcagtaacagctcctcacgtaactcatgtcatatgcctgaggcatacggatatacctttcaatcacagttcagcaacggtattcatcagcggccagaccggtcggctgattgatccgtcgattattttttttcatatcagtctccgatgtccagcatgcagtgaatccgcgccaacttcgccgtcgacagagcattgagtaaagaacagccgtttttctgtaaaagattaccggaacaaaggacaatggaaagaactgaccctttccggtgttgaatttatacgacggtttctgatgcacgtaccgccaaaacgttttgtcagaattcggcattatggtttgttatgttctcgtactaaaagcaagaaacttactttgtgccggaatcttcttggctgccaaaagtatctctcaaagctgcgtggtaaggaaatgccggaaatattaaaacaactttatgagataaacatttgtgtatgtaaatcctgtggtgggcatcttggaaaaccacagcttagagtaccgcaaagatgttaaaatcttgttctttcatatgttttctgaagcctcaatgtttgaggttttgttgttgtacctatttatctgaaaacacttgatttctgtaacttctgcacaggaaatcctgtataatcatgtataagaacaaaagattgaaagtccataggtagcagctacacggacgctcactttgttcaattaggtcaaatcgaaaatggtgtaaacgaaggggcagttcactggaatgccaaaactgctttttcgtttaccccatcatcgattctaacctaaagaatttttagggagtgagaatagtatatggacagttggtttaccgtcgaacaaatagaccaagatacattcgtcatcagcgaatacagacactgggaagaaacacattgttatctattgtgtgggacaaaaagagccattctgattgatacaggtttaggtgtttccaacatcagagaggttattgatggattgacgaaactgcccgttacagtaatcactactcatgttcattgggatcatatcggtggacataaatattttcggtctattgcagttcatgaagcagaaaaagaatggctatcggtcaaattccctatacctttgcaagtggtaaaaaacaatattatgtgcaatccatgtgatttcccctcggattttaatgtagagaaatatcagatttttcaaggggttccgcaaatgattttacatgatgaagattgtattgacttaggaaacagaaagttggtagttattcacacgcccggtcattctcccggacattgttgtttctatgaagcggatagaaaatatctgtattccggcgatttgatatatagcggttgccttgatgctttttatccatcaacaaacccacaagaattttggaagtctgttagaaaaattcaatctttaaagataagtcgaattttgccaggacatcatcatttatctattccagttactataattgacaagatagagacagcttttcacaacttgtcaaatgaagggaaattaaaacaagggaatggtattttcagctat

SEQ ID NO: 1220 - DNA, 18863 bp, Unknown
  R81_24m  MAG No. k141_23002
ggagagacgcccggtcccattccgaacccggaagctaaggcctggcacggcgatggtactgcacccgacagggtgtgggagagtagcacgccgccgcaccacacgtacaggaagccccgatacccctcaaaggtaccggggcttcccgcatatcaggacacttgcgcgtgggggggtgtatctcgcgtccttgggccccggcaggagtatcccgtcggggcccagtgcgttttgggcggcaacccgctgaatacccggtaagatgtctgaggtatcaacaaacaggtcaggaggtgacgcgcatggtggcgccaagccgtgatgaccgtagcgtagatgcattggtgaaatccaaggcagtacttgatgtattggcggaactgggaccaagcaccgcaaaaaccataagcgaacgtactggtgaacccgtaagctcaacgtatcgtttgctggataatctcgtcgcagtcggttgggtggaacggggcatcaatcgtggcgagtatcggcttggtatcgattgcgtacgtatcggcggccaaatcgaaagcagactggacattcagcagatcgctcgccgtaccttccgcgcccatcacggccagttcggcatctggggtctgttcgttcggaggcaattgcgcacggtgtgcatcgagacacgcacccgtgagacattgcaaagctatgcacagctggtgggcaatagcttgcctctgagcatgagcgctccctctcatgtactgacggcctggcttcccccggctcgctacgagcagctgttggaacactatgcctataccaacgagctcggcggcacattctccacgatgcgtgccacagcaatgggacaggctcgtcatatacgcgaatgcggcttcacctatgacgtcggccagaccatggccggctccgtgactatcagcgtaccggtattcaatcacgccggagagattcaagcggcaatcgccctgagtggcctttcccgctccttggaacctgagctggcctgtctggtagatgggcaaccggcaacggcatcggctcaagacatggtgcgattggtgcggactgccggccgtgaggtgtcgcgaggccttggatacagtggtgatcatcttggcctgaacagttgaatatgatgagtcagggataagtcaggggaaggaacgtcgacgatggcggaagacaaacgtgaaccgacccgcgctttagacaaggcgagtcgtgtgatggacgcattggcggcggagaatggcctgtcgccggcagatatcgccgacgcctgtgatatcccgcgatcctccgtataccgcgtgctggatggactggtcgatgtggggtgggccgtaacggatacggatggtaactactcattatcactggactggctgcgattggctgatgccgctcgcacgtctcgtaccgaatggcagcctgcgattgcggtcatgcatgccatcaccgcgcaaaccggcatgacctcattcctcagtgtggtctccggcactgaattggtatgcgtggaatgtgcgcaaggtcatgccatcgattcgctgatcctgcgcccgggccgcgtgctgcctctgcatgctggcgcggccggccgcgtggccttggcgtatttcgaggatgccgatgtcgaacgctatcttgcaggagtgccgtttccggcatataacgagaacacgctggtcagtgtggaacagttgcgcgaggatattcgcttgactcgcgaacgtggatatgcactgtcggatgaggatgtgacgttgggtgtcggtgccgtcggtgtaccgattgtggacaacgagtccggtcgcgtgatcgccagcctgtccgccggtggattcgtggacgaagtgttagccactcaagaatccttggccgcgttactgcgcgatggcgtacgcgaaattcaggcagcctgattcggcccgctaggctgtcgggctggacggttatgtccggtcagctatggcctttgccggctacggttctgctggttatgcttctgcccgactacgctgcggtccgttacgcttcggccacacggcccaacgcgatggcggtgatcagcacgtacgcctcgcgcgggtcggtggcatcccagccggtggattcggcggcgcgcttcaaacggtagcggatcgtattgggatgtacgttgagctccttggccgtggtctcgagcgaaccgccgaacttcaggaatgtggagacggtgagcagcgtcggatcatccgggcctgctgctgtcaggcttccgtagaccacgcggaccagttcgtcacgggcgtccgcgtcgccgatcaacgcacgttcgggcagggcgtcgtcggtgcgtaacgggcgcggcaatggctgcacggtggcggccagggccggcgcggcctgaagacagtagagcgtggcctgaatcgaacgcatcgcgccatcggcaccggtgcgctgtggacccaaggcgattggccgatcggcggcgaacgacggggcgatggtattgcagatgatttccggcgtggccgcaccgaccggacgaatcaacgccactacggcggtgctgttgccgatcgggcgcttggcggtcagacacacaccgccgaaatcggccacgattttctcgatttccttggccgtacgtgcggcggaccgggcagggtatccggcgatggtgtaacaatcgaagtcatgctcgaaaccgaggatggtgaacagggactccactcgttcgtcggccagatgattgaacaggcactcgaacagtacggtgcgtacgcggttggtcgcggtgatgccgggtgcggccgaatcggatgaatcgggcgcacccggcataccggatgcaccggacgaatcggcaacgtcggcagcaagaagttcgagaaaatctgacatagtcactagtgtagcgtcgctgattggcgttgcctttcagccaaagactctcgccaatacgtcagcaccacgaatccgaatacaaacgcaaccggcaacatgtgccgctcgaaattattggccggcgcggtaatcatcacgcccatcagcagtagcagcggaatatgggtcatgagggtgagccaacgtcggcgaatcacctcggccgcgccgatcagcaatgtcatcaccacgtagaaattgccgtgcgtaggccagccgagcacgggaatactgccccatacgcgagtgaagccggcgatgtgctcacgccagtcatggttgtaatccttgatccatgtggagtttttctgcacgtaatcgctggccacgtaataatccatcgatacgtacggctgatcgttcacattgaagtatccgaagcatttggccagcaacgcatccagcgcgatgatcggattgtccttgacgatttcgaaccatgccttgttgaaattggtcatatcctcgggcgtcaccgtgcgccacttgtagctgaccttcttggcctgaataccggaggatttcaccgggtcggcatcctgctgggagtaagcgtcggccatctgatcgagattgaagacgggcgcgaggttctttttggcttcgtctgaaataccgtccggattgcgctgagccacgcgggcgatcatttgcagctgtacgccgcggctttcgattggatcgccgccgatgatcgcaccagaggagatggcgaaggagatgccgccgtgaatcagtacggtggggatgagcagtgccacgacgtaagtcgcccagcgtttgcggtcggcgatcagagccagcacgatttgcagagcgatgatgtaccacgcatatttcgcggaaatcagcatcaccgacgtggccaggatgaaggcgatgaagctgtggcacggcaggtggacgggcgtggcgatggcaggggtctgaggatgtttgcgggtgccggcggggtgccaggtctggacgagttcataccagacgctgaaccaccagacgaacgagaacgcgaacagcggcgatttggtgatggagatagtggaaaacacggccagcgggcagaccatgaagaacagcagaatcaggaatctggccaatcctccggcctgtgggggaacggcggaatccgttgccgtttttcctatccaaggccggttcaggaatcgattggcggcggcagcgcagcagaacacggcgaacagcgtctgcagggcagccaacgtcacgatgccggcatcgtttgagccggtcagatgcctcgcaaacgtgactatcgcgccatagaacacagtgagtaccacattgtgctggtcggtcagatacgtgggatcggacggccacatgtagtgcgcggtggggtagatgtccatcggcacgaaggagaagaagccgatatagggctgtttcaggccggtccactggttccaggcccagctgaattcgcggatctgtgagcggaggtccgcgccgaatgcggccagcagagtggtcggcacccagagccagccgacaaaaaacaccagcataagcttccagaaccggttcgtgccgcgtgtgatccagcggtccagaacagtgacggtggacgtgacgatagcgcgaacggtacgacgggtcttggctggttggctggcctgctgatcggcggcgggccgtgatgtttcgctattctgctgatggtggcgtaggcgctcgccgatggtcttcggcagtatgcgctggcctgctgcgaatcgcgccatcagcgtgatgattccgagatatatcaggaacgacacgacgaatattgcggtattggcccagttccaatgggcgagggtgccgttctcctcgtcccggtacagcgggccgaccgccgagcacagtgcaagccacaggcaggccagcacggccagtgtccagcgcgcggcagcgcccacgcgcgcaagatgcgggtgggactggcggctggatacggcggcaagcttcgcggtggctggtgacgtcatgacaatatatggtagccgcacaggtcaacggttgatattcgatgtctgccgggcatcgccattgttcgcaagccaatacgacggccgggtgcatgcgtgggctcggcgaatgcggaatttccgaagttgtgaacgctaacacgggctgtccggcccaaaatggttgattttgtgcgcttttccgtggaatatcgcgggcaaaaaacggcgcaaccgaggtaacgtagtgtccatgatgattgcattgaaagctgcaacgccgcagctacccagaactacagccgtcgcggatcatgtggtcgccgtggacgaaaccgattcgaccaacgcgctggccgcgcagatgatcggcgacgggtcgttgacgctgcccgaccaccaggatggcgaactggcggtggccgtggtggccgccgaccggcagaccgccggccgtggccgcaatggtcacaagtggatcagtcagcccggccgttgctcgacgatgtcctatgccgtgcgcattccgcgcgcgatcgccaccgacgaatccgtcaatggctggctgcagatgatcgccggactggtcacgctggatgccctgaacggcatgatcgaggaatacggtgccgcgccgaaccagccggactgcttgctggaactcaaatggccgaacgacgtgttctgccacgggctcaagctgggcgggctgctctcggaactggtgattccgccgtcgtccggtactgatgctgatgccgatgacgacgtcgtcatcgtgttcggcgtaggcctgaatctggcgctgggtgcctgttggctgcccacgccgcagtcgacttcgctgcagctgcatgtcacgggcttgccgtcgtttggcgagatgcgcgatgcggtggccgaacgtcaggtcgagggcttccgtgaacgactggcgaagttcatcgccgacccgaagggccaggccgagtcgttgcgcaaggaaatgaaggcggtgtgctgggcgcgcggccgtcaggtcgaggcgcatttcacggacggcaccacgctgaccggcgaagccatcggcctcaacgaagacgcctcactgatcctgagaacacaagacggcacggaccatacggtccgcaccgccgatgtgggagtgctgtaatagccggccagtagctagctagtagctcaggtcagcgaccgagcttggacaggccggcggcggccagagaggccaccacggccttgatggcgtcgccgacgacgaagcccatggaggccagggccacggcggcgagcggcgcaccggtcaacgcggactggatgatgaagccgaaggcgtacaccaccacgacgccgccgaccagcgcggccagcaggtagcggcccgcggtgcgcgcggcggccgcgaaggacgaagtgtcggacttgccgcgcagcagggcgatgaccaccacacccggcaggaagccgaagaggaagccggcgctcgggccgaccagggccagcgtggaggtgccgccggcgaacaccggcaggccgaccgcaccggccgccagataggtggcgacggcggcaccggcctgacgccacggcagcatgagaccggcgagcatcaccacgaacgtctgcagcgtgatcggcaccggcgtgcccggaatcggaatctcgccggcggccgcggacagccacatcagcacggcgaacagcaccggcttccaggatgcggcgacgatacgacgggcgagcggcgtggtggccgctgcggatgcggtggtgtgtgaagtctgcatatcaataacccctatgttgtgtgatatcgccgtgaacggcgggcggtatgcgatggatgaggggaggttccggcgggccgtgcggtatccccgacagcccgaaccgtccatatggtggacggtcccaaatgaatccggccctgtgcgggcgaatcgtgcggcgatggaccgatgccggtccggtcgccttccgttcgcccgcagatgagccttcccccgaacttacggttgccatcgtagaggtgttcgatttcgtgcggtttcgtaccaacttacaaaattgtcgatttcgatttgtcataagttgacgaacgcaaccgtaacgtcaacttcttgaaccggcgcgcaaggatgtgcaatcggcggatttgcaacgtttttgatagccggcgccaacggttacgttgccggaacctacgcgcgcgtttgttcgtagcctacaaaagggcgtgaaagcttttgtgcgaacgcggcttgccctctcctctatatggagagcacaatttgacactatggctcatactgtcaaaaaactgctgattgcgaaccgaggtgagatcgctctgcgcgtggtgcgcacggccaaggagatgggtatctccaccgtggccgtctactccgaacaagaccgcaatagccgctatgtggacatggccgacgaggcatacctgctctccggcgacacctacaaggacacgtacctcaacgaggatctgctgatcgacatcctgcacaaaaccggtgcggacgccgtgcaccccggctacggattcctttccgaagtgccgagcttcgcgcagaaggtcgaggatgccggtgccatctgggtgggtccgcaccacaccgcgctggtggatttgggcgacaagatcaccgcccgccgagtggccttgcgcgccaaagtgccgccggtgcctggcctgtccgaaccggtgaccgacgtgcgaacgctgctcgacttcgcacacacccacggctacccgatcatgatgaagcgcactgatggcggtggcggccacggcatcaccgtggtgcatgacgacgaggagctgcgccgcttctacatgaaccacgacgcgctgcaaggcggcgatctgaaggaatacttcatcgagaagttcgtggacaaggcacgccacgtcgagacccagtccgggcgcgactcgcacggcaacttcaccgtgtactccacccgtgactgctcgctgcagcgccgcaaccagaaactcgtggaagaggcgcccgcgcccttcctgtccgaggaaatcgtcagcacgctggaggaatactcccgccgcctgttcaccacggtcggctacgtgggcctgggcacctgcgaattcatggtgaccccgaacggcaaagtgtacttcctggaagtcaacccgcgtctgcaggtggagcacaccgtctccgaagaggtcagcggcctcgacctggtgcgcgaacagctcaatatcgccgccggtggcgagctcacccgcgcccccgaaccgcgcggccacagcttcgaactgcgcatcaccagcgaagacccggccaccaacctgacccccggctccggcaccttggagaagatccagtggccggccggccccggcgtgcgcatcgataccggtgtggaacagggcgacaccatctccccgaagttcgattcgatgatgggcaaggtcatcgtcactgcccagaaccgtctcgatgccgtggcccgtgtgcgccgcgtgctcgacgagctcgtgatcgaaggcgtgcccacgccgattccgctgttcaaggagatcttccgcaacgacgacttcaccgccgagcatggccatccgttcgccgtgtccaccaagtggctggagcgcacgtacctgaaccgcacaccggcttccgccgcctccggccagccggcctccttggccactgccccgggtgccgctgccccggccgcgcccgacaagtccaagtcggagacgttcgtcatcgagatgaacaaccgccgcgtcaagctcaccgtgccactcgacatcgtggagaacatcaccggctcggcccgcgcccgcggtgccaagcgccccacccagccgttgcgcggcgcaggcttgcacaacgtggcctccggtgccgccacggccaacgacggtgccaaatccggcgtcatcgcctccccgatgcaggccgtggtcacgcgcatcaacgtgtccgaaggccagcaagtggccaagggcgaccttctggtggtgctcgaatccatgaagatggagaactacgtgtacgcgccggccgccggcgaagtgaagaagattttcgttggcccggccgatggcgtggaggccggcgacacgctggtcacgctggacgtgaacgccggcaaggccaaggccgccgacgccaagaaggagggcggcaatgactgacatcatggattcgccggccgtgaaggccgcggctgcggcctcggccgccaacgccgcccagccctcggcccaccagccgctgcgcaccgccgtggtcaaggccgccgaactggcccgcgccgccgaagagcgcgcccgcgacaagcagcacgctaaaggcaagaaaaccgcgcgcgaacgcctcgacctgctcttcgacaccggcacgttcgaggagatcggccgcttccagggcggcaacatcgccggcggcaacgccggtgcagctgtcatcaccggcttcggccaggtctacggccgcaaagtggccgtctacgcccaggacttctccgtcaagggcggcaccctcggcaccgccgaaggcgagaagatctgccgactgatggacatggccatcgacctcaaagtgccgatcgtggccatcgtggactccggcggcgcccgcatacaggagggcgtggccgctctgacccagtacggccgcatcttccgcaagacttgcgaggccagcggcttcgtgccccagctgagcctgattctcggcccctgcgccggcggtgccgtctactgcccggctctgacggacctcatcatcatgacccgtgagaactcgaacatgttcgtcaccgggccggacgtggtcaaggcctcgaccggcgagaccatctccatggccgaccttggcggcggcgaagtgcataaccgggtgtccggcgtggcccactacctcggcgaggacgaatccgacgccatcgactatgcgcgcaccgtgctcgcctacctgccgtccaacagcgaaagcaagccgccggtctacgcctacgccgtcacccgcgccgaacgcgagacagccaagcgactcgccgccatcgtgcccgccaacgaacgtcagccctacgacatgctcgaagtgattcgttgcatcgtcgattacggcgaattcgtgcaggtgcaggaactgttcggcgcctccgcgctcgtcggcttcgcctgtatcgacggcaagccggtcggcatcgtggcgaaccagccgaacgtgctcgccggcatcctggacgtcgactcgtccgagaaggtcgcccgattcgtacgcctgtgcgacgcgttcaacctgcccgtggtcaccctcgtggatgtgcccggctacaagcccggctccgaccaggaacacgccggcatcatccgccgcggcgccaaggtgatctacgcctacgccaacgcgcaagtgccgatggtgaccgtggtgttgcgcaaggcgttcggcggcgcgtacatcgtgatgggctccaaagccatcggcgcggacctgaacttcgcgtggccctcctcccagatcgcggtgctcggcgcggccggcgcggtgaacatcatccaccgccacgacctggccaaggccaaagcctccgggcaggacgtcgatgcgctgcgggccaagtacatcaaggagtacgagaccagcaccgtcaacgcgaacctgtcgctggaaatcgggcagatcgacggcatgatcgaccccgaacagacccgtgaggtgatcgtcgaatcgctggccacgctcgccaccaagcggcgcgtcaagcgcaccaccaaacaccacggcaaccagcccctctgatttctgaagacatcaaccaaacacaagtaaggaaagcaatgaccaccttcttcctcaatcgcctggccaccgagccccatgcgctcgccttcgccggccagtccaccccgtggccggtagccctggcagaccagaccaccgatcccagccttgacgaggccctgcgcggccacatcgccgcagccaaccgactgctcaccccggtcgccgccgacctgctgaccaccaccggacgtccggtcgacctgttcggcttcactccgaacccggcccgcctcggcgccgcagccgacgccaccgcgtccgtggaaggcgtggcactgacccagctcggcgccctgctcgacctcgaacaccttggctacagtgtggcccaggccaagccgctcgccgtgctcggccactcccagggcgtgctcgccgtgcacatggcccgcgccatcgaggccgccggctccatcgaggccgccggcaagaccctcgacgagattctggccgtcgccgccctgatcggcgccgccggaacccgccgtgtgcgcgaactgggcctgaaccccaagtatggcgaagccagtccgatgctctccgtcaagggcgccacccgcgaacaggttgaggctctggtcaagcgcgtgaacaacgcccgaggcccgatctccatcgccgtcaccaactccgacaaccaccacgtgctttccggctacccggaagacctggcagccttcgccctcgaagccgagcgcgagcacaagcaccaggccaagctgcgcgagcagaagctccacggcggcaccgtgttcaacccgaccctcgaataccttgaagtcaccctgcccttccactctccgctcatggccgacgccgtcgagcagaccgtggcctgggccggcgcctgcggctttgaccaggatcgcacccgcgcactcgctgcggaagtgctgctcaaccatgtggactggaatgcccgcgtcaaggcgctgttcgacgccgccgacccggccaagctgtggattgtggacctcggccccggcaacacgctcggcaagctgatcggcaacgtggtgcagggcaccggcatcggcgtggtcgaagccaccacgctgtccgaacgctccacgctctccacgctggaaagcgagcctgagcgcacccagaactggaaggcgttcgccccgcgcgtcatcaacaccccggccggcgccaagctggtcaccaagttctccaagctcaccggcaagccgccggtactgctgcccggcatgacccccaccaccgtggaaccggacatcgtggccgccgcggccaacgccggctactgggccgagctcgccggcggcggccaggtgaccgccgaagtgttcgaccgccacatcgccgccctcgaagacgagctggaggaaggccgcacggtcgaattcaacgcgatgttcatggaccgttacctgtggaacctgcagttcggctcctcccgcatcgtgcccaagaagcgtgcttccggcgcgccgatcgacggcgtggtcgtctccgccggcatccccgagctggacgaagccgtggccctgatcgagtcgctgcaggcggacggtctgccgtacgtgagtttcaagcccggcaccgtggaccagattcgccaggtcgtgcgcatcgccaaggccgtgtcccccaccaccatcatggttcaggtcgagggcggtgaagccggcggccaccacagctgggaagcactggacgacctgcttgccgccacctacgccgaagtgcgcgcctgcgacaacctcgtgctggtcgccggcggcggcatcggcacccccgaacgcgcggccgactacatttccggccagtgggcccacgcctacggcctgcccgacatgccggtcgacggcgtgcttatcggtaccgccgcgatgaccgccaaggaggctcacaccagccccgaagtcaagcagctgctcgtcaagacgcccggtatttcggccgacgccaagtccgacgacgtgttcgccccgcaggccgcccactgggtgccgtccggcaagtccgtcggtggcatgtcctccggcctgagccacctgcacgccgacatttacgagctcgagaacgactccgccgaatgcggccgtctgctcgtgcgcgtcatgaagcaccccgaagagctcgactcccgccgcaaggaaatcatcgaagccctgaacaagaccgccaagccttacttcggcgacctggcctccatgacctaccttgagtgggcgcagcgcttcgccgaactcgccttcccgtgggtcgacccgacttacgccgaccgcttccagcacctgctgcagcgcatcgaagcccgtgtgaacgacacggactccggcgaattcacctccaagctgttcgccgctgatggcgtttctgctgaagaggcagctgccgctggcctgctgacccacgacgacattctcgccgacccggcccccgcgctcgaaaagctcgcactggcctacccgcagaccgccgaactcaaggtggtcccgaccgacgtggcttggttcccggtgctcgtgcgcgaataccccaagcccatgccgttcgtacccgtcatcgacaacgacctgctgcgttggtggggtcaggaccagctctggcagtccgaagaccagcgctactccgccgattccgtgcgtgccatccccggcccgatctccgttgccggcatcaccaccatcgacgagccgatcgccgacatcctcggccgcttcgaaaccgccgccatcaagcgcgtgcaggacgaacagcagggcgccgatgccgctgagaacgacgatttcgccgcacttggcgaggccaccagcgccgaagacttcatccgcaagtccccgaacatctcctgggtcggccacatcaccgacaacccggcctacggcaccgccctgggcgaccagtactacgagatccgcgcgtttgacgccgcggccggcaagtacgatctggacatccacctcgacacctactgggacaacgacccggacggcggcacctccaagcacgccgtgcgcgatatcgtcatcccgctcatcgtggaaggcaccgagcccggccgtgtgccggtcgtggaccgcgaacgcctgattccggacgtctacgcgatgctcgccgccaccgcaggcatcggcaacaccgccatcaccggcgacaagctcaccgagatgccgcagcttgacgacaagacctctgacgagcgtccgttcggtaccgcaaccgcaacctacaccctatccgccaacctcggcttcgaccacgaagcggccactggcgccgctctgccgaccaccctgcagcccagccgcatcgcccccgatgcgctggtcggccctgcctggccggcaatctacacggcgctcggctccgtgtacgtcaagggctacccggtgattgaaggcctgctcaacgccgtccacctcgaccacctcatcgaacttgaggtgaacgaggaggacctgctcaagcacaccggcgaaaccatcaccctgaagtcttgggccgaggattacttcgagtccgcctccggccgcgtggtcaccatccacgtgacccacaccgccgccgacggcacgccgcttgcctgcgaaaccgagcgtttcgcgatccgcggccgcgtctactccgatgctttgcctgcagacgcccccgagtatggtggtgccctcctgaataaggaagcggatggctccgtcgccggacagtccactggactgtccgcctcctcgcgcggcctgcaagtagtgcaggccactccgcgccgtctgctgcgccgcgtgaaggtcgtcgccccacacgacatgaccgccttcgcccgcacttccggcgacttcaacccgatccacacctccactcgtggcgctcgcatctccggcctggccgccccgctcgtgcacggcatgtggctgtccgccaccgcccagcacgccgtgcaggcgaccgacgagaagggtgcccactacgagattgccggctggacctacaacatgtacggcatggtccagcttgacgacaccgtcgaaatctccgtcgagcgcgtcggcaaagtgcgccacggcggcatgaccctcgaagtcacctgccgtatcgacggccagctcgtctcccgcggcaccgcactggtccgtgcgccgcgcgccgccttcgtctaccccggccagggcatccagaagcagggcatggttctggacgagcgcgccaagtccgccgccgcccgcgacgtgtgggagcgcgccgacaagctcacccgctccaagctcggcttctcgatcctgggcctcgtgcgtgacaacccgaaggaactcaccgccaacggcgtgacctaccgtcaccccgaaggcctgctcaacctgacgcagttcacgcaggtggcgctcgcgacggttgcttttgcccagaccgcccgtctgcgcgaagccggcgccgacatctggcccgcctacttcgccggccactcgctcggcgaatacaacgcgttgtccgcgttcgccgacgtgattccgctggaaaccgtgctggagctcgtgttccaccgtggttccaccatgcaccacctcatcgagcgtgacgcacagggtcgctccaactaccgcatgggtgccctgcgcccgaaccagttcggtgtggacgacgcgcacgtcaaggaatatgtggaatccgtggccaaggcgtccggcgaattcctggagatcgtgaactacaacctcgccggccagcagtacgccatcgccggtacgatcgccggactcaaggccctgaaggccgattccgcccgccgcgtggccgcattcggaggcaagcccgcgttcatgctggtgcccggcatcgatgtgccgttccactccacgctactgcgcaagggcgtgccggaattccgcgacaagctcgacgcgctgcttcctgcttacatcgactaccgtggccgtctggtggaccgctacatcccgaacctggtggccaccccgttcgagatgaccaaggaattcgccgccaagatcctcgaagccgtgccgtccgaacgcatcaaggccgcgctcgacgacccggccgtgtgggattcctacgccgccgacgaccagaagctcggccgtctgctcttgaccgaactgctctcctggcagttcgcctccccggtgcgttggattgaaacccaggcgctgctcttcggtcagcgcgaacagggcggcctcggcgtggaagaatacgtcgaagtcggcctcggcaacgccccgaccctggccaacctcggtaccaagaccctacgtctgcccgagttcgccggcaacgatacggtcgtctacaacgtcggccgcgatgaaggccgcgtctacatgaccgacaccgattcgctggttcccgacgacgagccggaagaggctgcggcctcggccccggtcgaaaccgctcctgccggtggttccgccgtcgccaagcttggctcgggtgctgctccggcaaatgccgcgactgaggctgctcagacaacggatggctccgtcgccggacagtccactggactgtccgcctcctcgcgcggcctgcaatcagggcaggccgctgctggcgcaccgtctggtgccgccgtcgccgacctgcccttcaaggcttccgatgccatcggcgtactcatggcctactccgccaaggtgcgcctcgaccagatcggcagcaacgacaccaccgacaccctgaccaacggtgtctcttctcgccgcaaccagctgctcatggacatcagctccgagctgggagtcgccagcgtggacggtgctgctgaagcgacgctcgacaagctcgcccaaatcgtcaacaaggccgccccgaactacaagccgttcggtgccgtgctctccgaggcgctgcgcgaccgcctgcgctcgctgttcggtgccgccggcgtcaaacagcagtacatccgcgaccgcgtgaccaacgtatggcagctcggcgaaggctgggtggccagcgtgctcgccgcactgctgctcgacactcgcgagggtgccagctcccgtggcggcgacctggccaagctgcccaccgccgccgtgcagaacaagccggaagccgacaagctgatcgatgcggccgttgaggtcgtcgcccagctcaagggtgttgccgtggccctgccgtccgccggtggtgccgctggtggcgctgtggtcgattccgccgcgctcgacgccttcgccgagaaggtcaccggttccaacggcgtgctcgccgccaccgcccgcttcgtgctgaacgagctcggcgtggccgctccggctccggaagaatccgaggacgagaacgccgccgtcgtggccgcggtcgaagccgaacttggctccgactggcccatgcaggtcgctccgcgcttcgacgccaacaaggccatcctcttcgatgaccggtgggcctccgcccgtgaagacctcgcccgcgcctactacggcaacgaccccgccgccttgaacggcagcttcatcggccttggcaagaccatcgccgccgaagcccagtggttcgcaaacgagtcggagagcgaggaacttaaggccgccttccagaaggccggctccgaggccctcgaacaggtcgcttccaacaagaacgcctcccgttacgcgaatgatatcgccatcgtcaccggcgtgagcccgaactcgattgccgctcaggtggtcgaaggcctgctcgcaggcggtgccactgtggtggccacctcgcacagcttcaagccgtccatcaaggcttgggccaagcaggcctaccgcgagcacgccaccggcaacgccaagctgtggctggttccggccaacctctccagctaccgcgacgtcgacgctctggtcgactgggtgggccacgagcagaagaagacctccggtgccaccaccacgattctgaagcccgcgtgggagccgaccctgttcttcccgttcgccgctccgccggtccatggcacgctcgccgactccggcgacctgttcgaatcacaggcgcgactgatgctgtggggcgtggaacgcgccatcgccggcttcagccacatcggtgccgacaccaacgtgcagcacaagctccacgtggtgctgcccggctccccgaaccgcggcgtattcggcggcgacggtgcctacggcgaagtcaagagcgcctttgacgccatcgtcaaccgtgcccgcgctgaaaaggtgtggtcgagccgcgtcaccttcgctcacccgaagatcggctgggtgcgtggcaccggcctgatgggcggtaacgacccgctggtcgccgtcgttgagcgtcacggcatccacacctactccaccgcgcagatcgcggccaagctgctcgacctgtgcactgccgaatcgcgcgagcaggccctcaaggccccgctcgatgtggacctgaccggtggcctcggctccgagcccatcgacatcaaggcgttgcgcgcggaggccatggccgatgcggagaaggaagctgctgcggcctcgtctcaggaaacggatggctccgtcgccggacagtccactggactgtccgactcctcgcgtgggcagcaaatcaaggcgctgcccaccccgatcatcaccaagcaggcttcggtcgacctcaacgactggaccaacgtcaccgccaagccggaagacgaaatcgtcatcgtttccgtcggtgagctgggcccgtggggctccggtcgtacgcgcacccaggccgaactcggcatccacccggacggcaccgtcgacctgagcgccggcgcagtgctcgaacttgcatggaacatgggcctgctgacttgggccgacagcccgaagcccggctggtacgacaccgacggcaacctggtgcccgaagaggacatcgccgagcgctaccacgatgaggtcgtggctcgctccggtatccgtccgttcgaggagggcatgggcgacgactacaaggacggcgccgacgaagaagaagccgaggtcttcctggaccacgacgtcaccttctccgtgccgacccgcgatgtcgccgccgaatacgtcaagctggacgaggcgcacaccaccatcgccccggatgaggaatccggcgaatggaacgtgacccgccacgccggctcgatgatccgcgtgccgcgccgcgccaccatgac

SEQ ID NO: 1221 - DNA, 4279 bp, Unknown
  R81_24m  MAG No. k141_23199
aagcggggcgaggcctacacgagaccttcaaaatcggccttcgtacaggtcggacacgccctgcggcgcacacacgtgcgtttcgcgtcgccgcaggccgcgggacatcgtcaattacgatgcagcgactgcccggtcggtctgatcaccgacatcagtacggcggcgaaaatcaaagcgaaacccaccagtgagctccacatgatcctctcgccccagaacaaagcggaaaacgtgacggcgaacagactttccgtacacatgatgattgacgcctgcgaggcaggcacgtgagccagaccgatgttctgcatgatctgggcactcatcgtggcgccgaggaacagatagagcacgctggccactactgagggtgccagccagctggcgttcggcatgggttcggtgaacaacgcgccgatgatgaacaatacgccggcaacgccgaactgcacaaaagtgacggcgatagggtcgaagcgtttggtgtagacaccaaggcaggtcagattgaacgagaagatgacggcggttgcgatggtcagccagtcgccggcgcccagcgacaacgaaccgcccggcttcaacgagacgaagccgacgccgatcagacagatcacgccggcgaccagattgatggccttcgggcgggttttcgaaatgatccacgtggcgaacggggtgagtacgcagtaggcggccgtcaggaacgcgctgcggcccggttcaatggtctgcaggccgatggtctgggtgaccatcgtgccccagtaggtcagacccaccacgagcgccggcacaatgatcttcggcgtcagatacggcacgatgtgcttatggaacaaggccagcatgcacaggcaggcgcctatcatgcgcagacccatcagccattggggcggaatcgcctccatggcgaatttggcgagcagataactgccaccccataatgcggcgcagcccagcaacatgagtcgggcgagattcgggggaaagctgcgggaccagcggctgcgcagcttgctgaaacgttcgaccaaacccatggtgcacctcaggacagttaggaaaacttgtggctctctcggctcacagattacgggaactaccggccaaaatcgaccggtcgatgggcgtcgggtgtgtgacaggtgtgtggctggtgcgcggccggggcgcggcatcgccaagcaggtaagaaccggatgaaagctgtgcgaaggtgaggttactcacagcgaacatccgggctagtcgcgttcgaaaccggtactctggaaagagtaaaaatacgttgtccatagcaatcatgaaaggattcgacatggcagtcattactccggaaatcaaggaattcatcaagaacaacctcggttggatcaccaccgtctccaaggacggcgaactggacctcggcccgaagatgtccctgttcgtgctggacgacacgcacatcgcctaccacgagcgcaccgccggccagcactacgagaacctcaagaacggctctccgctggtcatcgccttcgccaacctcgagaagaagcagggctaccgcttccgcggcaacgtggtgctgcacgttgacgacgacatctacaacgagcaggtcaagatcgccgaggaaaagggcaccaagaagccggccgtgattccggttctcgaagtcaccgaaatccagaaccttgcctccggtccgaccgccggcaagaccatcgccaaggactgattagctgacgtattggtggcttcctcgtcagagggagccactttttcgcttttcagtgcgcagtactaggtgatggcctttgaggtcggtggtggcgaagaggtaggtgttgccgccgtccttgagtttgagttttttgcgtagctgggccacggttagggggaaattgcgtacggagatgttggcgtgcgtgagaccggccaatagctgcttcagttctctcttgttcatggtggcgatggattcgatgacgaatgatctgcctggaaaatcggaaataggttcggccgccacgaacaggtggctattcgggctgatgtgatgcacggcgaagcgctgttcgagaacatcaaagcacccggccttcatgattgaggcgttgggttcgtaaaggtacttccaatgcgaggaatcgaagccgttcgcgctttcctcagccgggagatcctcggtattacaggtattgcatgcaaccaaggcagaatcgctgataggggtgtgattgtcgctgttatcgccggccttgtacgacagcacctgcccgtcattgacgcataccacgagcggtgaggcgcaacggccgcgccccaacaccaacaacaattccttgcattcattcccggtggagacgatatgcacctcatgcaccgcgccggcgaaatcggcgacggtcttatgccagtcgagcatgggggagagcttgaccatgaccgtcggtgccttggccagcagcgtatccttcagggtcagcacatccggcgtgcaatcggcaatcgcgtaggtacgcgagccatgatcgtcacggcgggccggatcgaggaagatcatggagactcggccaagcgtatcaagcactgctgttgaatcatcattgatgacttcggcgtggccaaggccgagtatcgggaaattatggcgagcgataccacataaaatggattgttgttccacatatatggcatggtcaaacactcgggacatgtaagaaaagtcgacgccgaaaccgccggtcagatcgactagggatgtcggggaatcgtcggcgtcgtcgactgcttccccgtccaacaatcgctgtgctaaccgggctttgtattgagccgtgaactggctggaacattgttccattgggacttgcggcgggaaaatcagcccatcatgggacgcccagtcaggtagcttgagcgaagcgcgctgccagccggcaatctgctccagcgcgaacggcacatccacgtcgccatcatgcttggcgtgcaaggccacatcacgcacatcttcacggcggtgtttggcgatgaacgcccaagtcgactcagaaatctccatgccgccattctaggggttgtgctgagatgagtatgaaaaaaccgcaagagaacgaggtggcgaaaaccgatgatcgatgaagtgatgatgctgcgccatggccgtacgcaatacaatctcgaacatcgcttgcaaggccagatcgatgtgccgctcgacatcgtaggccaatggcaggtcgaccagaccggattcgcgctcgcttcacggtactactgggccaaggtgaaccggcttgccgagcatcccgaagccatcgcccagcccggtcctgacgccgccgaacgcactgatacgcgacagttcgaggaggcccccgccgccggccggcgcatggtggtgatgacctccgacctgttccgtgcccaacagaccgcacacgccttcgccgatattttgggattgccggtcacctgtgaccaacgactgcgtgaacgcagcttcggcgagtgggaaggcatgacccgcgccgaaatcaaagccgtggcagccgacgactacgcctcttggaaacagcacaccgggggcgaaaccaagcatggtgtggaaagccgtgccgccgtgggccagcgaggtgccgatgccgtgcgcgcactggtcatcgactccgcctattcagacagcacgcccaccacgctgatgctcgtcacccatggctcatggattaccgccaccatctccaacctgctcgaactcgacccggacggcatgaacgcactcggcggcatgcgcaacgcctgttggtgccggctcaaagtgcgccacagcgtcaacggcatccccgccgaacagcccctgtgggagttggaggaatacaacaaggctcccgccatcgccgacagcgccgactgggagaacgggccgaccgatctgcgaggaccgcacatgccgagttggcagccaatcgtctggtgacggtcgctatgcgaaaccccgctcgcaaattcgaacggtgggtctagactaatctcggtttggaaccgtacagcgatagaacagtaggaaagcgcggaaggcgggtgaggcgacatgctgagaatcttcagctcaatcaatggccaagtggagcagatcgagaaaccggaaaacggctcctggttatgtttgagcgaacccactgatgtggagctcgccaccgtcgcctcgcagaccggcatcgacctggccgacctgcgcgcccctttggatgacgaggaacgttcacgtgtggacgtcgaagac

SEQ ID NO: 1222 - DNA, 8596 bp, Unknown
  R81_24m  MAG No. k141_23280
acaccctctccgccacgctggtggaatcccgttggcagcgcgatctgaccgattcgaccacccagcgcaacatcggttccgcgctcggctactccttgctcgccctgaccaacctcatggacggccttgagtccatccacccgaacacccacgtcatcgagcgtgagcttgatgagaactgggaggtgcttggcgagccgatccaaaccgccatgcgcgcctgcgagctcaagggcctgccgggcatggacaagccgtacgagaaggtcaaggagcttatgcgcggccacaccatcaacaaggaacaggtcgagcagttcatcgaccagcagtccttcgacccggaaaccgccgctcgcttgaaggctctgacccccgccacctacaccggtgtggccagccagctcgtcgctttcgaccgctgaaataggtgcgatgcgagtccctcgagcccatcgcatccaccacactactgcgctgagtcacaaaccaaaccgcaaactgaaccgaacaaggacaggcgtcaggtaactatttcatgactactgaacaggagcagtccactacggaagatcgcccggacaaggcgacctcctccactaccgaccggccgatcgcctctggtgacggccggtcggccagttttgctgtcagcggaccggacagcccggcaaccgacgacagcaacgattccggaccgtacatcgacgacatcgctccgcgccgcacgcgcgacttcggcgatctgacccgggccggtctgtcgctgttgatggccgccgtggtcatggtgttcgccgtgtatctgggcggcatgacgcgcggcgtcgaatccgacgcacacaccgcagcccaggtcatcaactggttggctgacttcccctccaccgtgctgacgcagctggccaccatcgtcatcgtgatcatcgtgctcgctcaattgctactggcccgggaatggctgcaggccgcggtgtccgcgctggccatgttcgccggctacggcatggtgtgggtcgtatcgacggcaatcagcagtctgaacgatttcaccctgccaatggcactagtctcagccgccacctcatacggctccgggctgttgcccgacatctacgccggcatggcgtccttcctgaccgccgccgggccacgccgcacccgctccacggtcaaatggagctggaatatcctgtatgccatcgctgcggtgatggtggtgctgtcgtggcattcggtcaccggcatgctggtgtcgatggccgccggccgcacagtgggcatgctgatccgattcgtggtcggcacgcagaacaagggcgtgtggggccaagatctggtcgccgccctgaaaggcatcggactggacaccgcctcgctgattcggcatcaggagcccggcgtcggccacggttcactggccgtcacgctggacgacgatctggccgaaggctcgcgcatctacgatctggataccacggacaaccgtcgtttcatcgtttccgtcatcgacgcgcagacccataccgtcggctatctgaagcagttgtgggactgggtgcgtttcaccagtgtgtccatccgacgtgaccgttccgtgcgtgacgccgtccagcatcatttcgccatgctgctgggtctgcacaatatcaaactgcccgcgcccgcaccctacggcatcgccgataccgacgaatccgcgattctggtgctggatgcacacaccatcgaactgcccgccaacctgaacacgcttaccaaggcggatgccgtggcctacatgcgctacctgtccgtggcgagccggcgcggctatacgcaccggcgcatcacgccggacacgctcgcccggcttgaagacggcaccgccgtgattgccggctggctcaacggcgacaacgcttccggtccggccaacaccgcgctcgacaaagttcagctgctagtgctgttcgccgcgctgatcggcgtggaaccggcggtggaggccgcccgcgaggcgtggggagacacgactctgacggccttggccccgttcattcagaaggtcgcggtcccctcccccacgcgcgcgctggaatcctgggacaagcagctgctcaagggcctgaggagtcgtatcaccgcgctggctgacgaggagacggtggaatccgccgaaccggtgacgctggcccgattctcctggcgttcgatgatcaccatgctgctggtcatcgtggccgtggtcgtggtcttcacccaactgaagcccgaggagatcatcaccgcgctgaccaacgccaacccgttgatggcggtggtgacgctcgcgttcggtgtctgcggctggatcggctcgtcgatttcgctcggttccctgatggcgcggcacaagcgtgacaatatgggcgtcttcatgagccaggtggcaggcggcttcgccaccgtatccatgccagccggcgtgggcccctcgttcgtcaacctgcagttcctgcgcaaatccggctatcgcaacacccaggcgaccgcaattatgagcgccgtgctcgtggtgtattacgccgtgtacttctccatgctggtcatcatcggcctgttcaccggccgcaacatgttctccggcgcaatcccgacaaacacgttggttatcgtgctgggcgttgtggtcgtggtgctgtccattgcgatgatgattccgccgttgcgccactgggtgacccgtcgtcttatgccgctggccaagacgtatatcaaccagctgctggacgtgctttcccagccccgacagctcacagtcagctgcctgggcgcgctgttccagaacgcgaccactgggctcgctttctgggcggccctgcaagcgttcggccattcatcgaatccgattgaaacgacgttcgtcttcctgctggcctatgcattgggttccgcagtgcccactccaggcggtctgggcggtgtggaagcggcgctgacattcgcgttcgtggcggtcggagtgccgcagggcgtggcgctttccgccactttgctgcaccgcgtggtgttctattggctgcgcattccgctgggcgcggcggccatgaagtggcttgacaagcataatcttgtctgattcgtctattttcatacccccttcggggaaatagatgtgaaaacccttataaaacgcgggttttcgcagaaacatgcgctagtatcattgatgacaacatggactaagcaaaagtgcttgtcccctgacccaagaaggatgctttatggcatacaacaagtctgacctcgtttcgaagatcgcccagaagtccaacctgaccaaggctcaggccgaggccgctgttaacgccttccaggatgtgttcgtcgaggccatgaagtccggcgaaggcctgaagctcaccggcctgttctccgctgagcgcgtcaagcgcgccgctcgcaccggccgcaacccgcgcactggcgagcagattgacattccggcttcctacggcgttcgtatctccgctggctccctgctgaagaaggccgtcaccgagtgaccttctgctcgtagcgattacttcgagcattactgacgacaaagaccccgaccgagatggtcggggtctttttgttgtggtgctgtgacgtgttgtccaaccgtattattccggactagttcagcgcttccataagctgctcgaatcccagggtgggctcggcctcgaagggatcgaggagtatggcttcccggcgttcgggggcggtcagggtcaggtgggtccagtcggcggagaactgggctccgacgttcagggccgcgtccacgaaccggccacgcagggcggcacgggtgtcggtcggcggattgtgcacggcgtattccacgttgtctcctgtcagcagctcacgcatctggttgcgggctacgagcgaaccgtacaggcgaccgttggcgatgtcgtggtagtcgagctcaagctgttccatctgggcgaaggtgacgtccgggcgacggcgtttgagcgcgtcgaacagacgcttcttggcggcccagtccacgcggtcggcgagcgcatcgtatgcaccacgctccagcgcgtccagaacgcggctccactcccccataatcgtgtcgatcgtggtggccggcagcgaacttgccagcgcatcgccatgggtttcgatgaaggccttgaccgccgcataataccggcgctgcagacccagtgcggacacggattcgcctgattcgagcgtcagttcggcgcgcggattgtcaaggaatcgactgaccgtgcgattggcggcagccggatcagcaaaggcatactgctcgaatccggacggaacgccatggcggaaggcgtcttcgatcgcgcacagcacaaggtgcgtgacggcaagcttcatccatgtggaccattgcgaacggttcgagtcgccgatgatcacatgcagccggcggaaggagtcggggtcggcgtgcggttcgtcgcgcgtgttgaccatcgggcgggagcgggtggtggccgaggagacggcctcgtccaggaagtccgcgcgctgggtgatctggaagccgtccggggtcatgcggccggcaccggtgtacagctggcgggtgatgaggaacggcagcagctggtgttcgatggtctccaacggcacgaagcggcggaccaggtagttttcgtggcagccgaaggcgtggccggcggagtcgacgttgtttttgaacacatggatcgtggcgtgtgcgccgtaggattcgcgcagcttgcgctgggccttcagggctaggttgcgcatcacgtgttcgccggcgaggtcctgggccagggcctcgcgcgggtcgcgcgcttcggcggtggcgtattcggggtgggatccgacgtccagatacagacgtgagccattggccagatacgtgttggtggagcgggaacgggagacgatgggctggaacatggtcatcgccacctggccggcgtccacggggcgttcggcaccggtgaccgccacgccgtattcggtttcgacgccgaaaatacggcagaacccgtccatctcggcggatggtacgggttccgtggcgtgcagggagcgggtgccgctgtcacgcagttggggcatcactcgccgcctttttgcacgaagctgttgacgtattcctcggcgttggtttccaaggcggattcgatgtcgtcgaggatgtcgtccaacacgtcggcttggtcggtggactcggtttgggcggcggcctgcgtggtggcgagggcgtcgtcttcctgggtcgcggcctgctgtgcttgaggttgttcgaattgttgtggcatgttgtcttctttttgggctgtcaaactcccctcagtcagccttcggccgacggctcccctcacccgaggggagccggaggagtcaaaaaattatcgctggttgatggagtcgagccacggatactgctgcaggtaatgctgcagttcgcggatgatgagtccattggaggccactacatcgttatcgtgacgccagtggatgcgttcgccgtcccaacggctcagcgtgccctgtgcctcccagaccactacggtgccggcggcgatgcccgcgatatcccacacgtgcagcatcggctcgaagtaggcgtcataggtgccgtcggccactttgcacaggtcgagcgagacggggcccacgcgcttgatgtcggccgggcgtccggcgagcgaggaggccacgtcgagcgcacgctgcgattcgctggggatgaaggacatgccgtagctcagcacagaaccatccagcgaggaggtcatcgacggcacgaccttgtcgcgcttctcgccgaccgcggttttgtggatgcgcacggcacccgctcccctggcggccaggtaggtcaggccgagggccggggcgtgcacgatgccgatgatcggcttgggctcgttgtccgggccgaattcgaacagggcggcggtcaccgtccattcgctcatgcgacgtacgtagttgatcacaccgtcgatcttgccgatgtaccagtaacgctggccagggcggctttcggcggggcgggtggtccagaagccgtcgaagtgggcgatgtcggcgattctggcgctcatgaagcgcatgatcttgttgtccacttcaagcttgtagcgggggccacggtccgcgttctcggtgctcggctgggcgaggttacgcggattgagttggtcgtggagggcatgctggccggcttcttcgagcaggccggcgactttgagcgcaaggttgcgcaggtcctgtggggtctcttcgcgtgtttcttccatagctaccaagtctatcgttcggcgttgatggccagcgacttcagcagatcgatggcgtgttcggctgaattgagttcggtttcgcagtgcgccttggtgaaggcgagcggatcggagatgtcgagggagaacaggtgatggtcggtagcggccatatggccggcattgccgtagaattcgaccgcctcgccctcgtctgcggcgcgcgggtcgcgaacagtgagtcgggaccagctggcggcggccacctcatcgccgaattgcgccacgagttttgccctgagccaggcgcgggtgtcttccggcggttcggtggtggcgcgtgcgatgtcggcggcgctcaccacccgttcggtgcggggttcaagtttggtgaagatgctgtccgcggggtcgagcgccgcccatttcaggtcgatgaccttcagtcgcggatcattccatccgttggccacgccgggtgcggacgttgtggtgattttgcggcgcagtttttcgagcagctgccatttgagcagccattcgatgcggctggcctcgccggtcatggccagacgttcgtcatcgtcggcggcatggcggatggaggcgcagtcgatgagcgcctgctgccacatcgccataatggatgtggtggatctgtccggccaggcgggttcgccggcggtgtcggtaccttcgaccagtgcggcaacctggtagacggcttggcgcagtttgagctggataagccatgcgttggtttcgccgccgttggccagcggcaagattgcccccagcgtcaggtcgcgggaaacggtgtgtatggcctcgactgggtcagacagttcgagttcgtcgaggaaggcgttcaggtcgaatccggcctcgtccgcatgttcgagcagccacagcagcatgctcgtggtgccgagtttcagtgcctgcggcacctccatgcgattggcgtcgccgacgatgacgtgcagacggcggtatgcatcggtggagtgggattcgtcgcgcgtattgatgatcgggcgttcgaaggtggtttgcaggccgactttggcgtggatgtagtcggcgcgctggctgagctggtagcccgggatctcgctgttctcgccaatccctacgcggccggagccggcgtagatctggcgggtgacgaagtggagggtcatcaggcgtgtgaccaagtcgaatggcaccgcgcgggccatcatatagttctcgtgcgtgccccagcaggagcccttgccatccacattgttgcgatgcagggcaatgggagtgccagtctgtttgcgggcgcgttcggtggcggcctgcatgatgaggtctccggcgtggtcgtatcggaccgcttcgaacgggtcggtggtttccggcgccgagtattcggggtgggcgtggtccacatagacgcggccgccgttgggggcgatcacgttggtgatgttgagctgcggggcgtcggtgagcatgtccgggcgggcggcggcgcgttcgagacgggtgccgcgcgcgtcgttgaccgggtcctcctgccggtagtcccagcggatggatttgctgtggctgtccgcggcgccgttcaccacgtcgaaggacagttgcaccggattgtagcggtccggggtgttcagggataccgcgtattcggtttcggtgcccatcactcgtttaacggtcatgtagtgctccttgagcttgagctattcggcggtgcggatgcggcggatcgggtccatgccgttgatgcgcgaccattgttcggggtccacgtcggccatggaatcgcgggtctcgcggtattcgtcttccacggcggcagcgagcagcggcacggtgagtgccacgtccaagccggtttcgatggattccttgaccgctcgggtcttggcccggtccacgatgttcttgagcatcgcgccggagaccacgtcggccaggaacaacgcatgccactggccgttctcctcctgcacgtcgcatagatggcggcgttcggaggttccgtagatgtcatgcaccagcacggcggacaaggcgtgcgcgtcgacgccatcttccagaggcaggtcgtcggtgaggtaatggtccacgatggcgatggcctgattggttttgggccggccgacgcgaatcttgacgtcgagacgccccggtcgcaacacagccggatcgatcatgtccacgcggttggaggcaccgattaccatcacattgtcgagtgattccacgccgtcgagttcggagaggaactggggcacaatcgtggtctccacatcggaggagacgccggagccgcgggtgcg

SEQ ID NO: 1223 - DNA, 5542 bp, Unknown
  R81_24m  MAG No. k141_23367
cccacagggccgcgcatggctatgatgagagcaatcgcacgtcgagttcgagacaatattcaaaacgaatccaaggcaatagggggaatgacgatgaccaaggcactgattgtggtggatgtgcagccgacgttctgtgaaggcggcgaactgggagtcgaaggcggcaacgcggtcgccgagcggatcgccgattatgtgaacgcgcatcgcagcgagtacgcgtatatcgcaaccacgcaggactggcatatcgagccgggcgcgcactggtcagcggaaccggatttcgtggacacgtggccgaagcatggtgcggccggcacgccgaacgccgaattgcatacggcgatcaaggcgctgaatatccagcatcatttcaagaagggccagtattcggcggcatattccggttttgagggcatcgaggacaataccgaccgtatccagacccgtgaggaggttgcggccgagcaatccgccggcaagacgctggccaatgcgctgaaggccgccggcgtgagtcgcgtggatgtggtgggcatcgccgaatcgcattgcgtcaaggacaccgcgctcgatgccgggaaactcggtttcgaggtcaccgtgttcgaggacctgaccgtaccggtcagcgaggagctcggtgtcgcggcccgcaaacagatgacggcggccggcatcacattggccgagtccctctgatcaggccggatatacccagagcgaacgcacgaacactttcgtatattcaagcccgacactgccgcatagtcgcctagtcgatatgtgaagaaggcttttatggttacgatgctgctgacttcgatattccgcaacgcctcgtccgccgtgcatgaagtcgaaccgcatccgcaaggcaagcgggtcgcgttcatcccgacggcgagcgccgtggaaccgtgggggccagttcactcggcgttgagcaaacgcgcgctgcaacgcctcggtttcgaggtggagcaactggatgtggaagatgtgccgagcgggtccgccgaacgcgtcacgcgtagcatcgccgaggccgactacatctatgtgggcggcggcaacacgttcttcctcctgcaggagttgcgccgcaccggcgccgaccgggccatcatcgagcaggtgcgcgccggcatgccgtacatcggcgagtccgcgggctcggtcatcacggcacctgacatcggctatatcaagctcatggaccgcacggacaaagcccccgatctcaccgattacgcaggattgggcttggctgatttccgcgtggtcccccaccatcatgcaacggccatgggccacgccgcacaacgcattctcgaccggtatggtgccgatctcagtctcaagcccctcaccaaccggcaggccctgctcgtcaaggatggcaaaacccggttgctgcgatgatgcgggtcgtcggcccgtcgcccattcggcaccgccgtggtgtgtccggcctgatatgcctatcgagcggcatcaatcacacagcaatgtggttgggaacctcgccgaacgtcaacacctgcatacatcagcacggcaaaatctgccgaaaaacgcccggcgcacgagatgccagccggccccatccgtcacctcagtgccgtaccgggccaggcatggccttgagcaacgggatgaatccggcgcacagtaccagggccacgacggcgagtatctgccagtgggcggagccgagccagccgccccacgtgccgacggcaccgccgatcgcatacgcgaacctggcacggccgctgaatttggccaagtcaccaccgctcagcagcagttgtcgcgatacgatcacgccatgcgccagcaggccatagccgaggttgttgatgagccatccgacgcacaccgcggcaaactcgggaaccagtacggcggcaagggaaatcgccgtggcgattgccccgatggcggacacggcgcgcatgccgagttttgcggagagccgcatgtagacaaacgatccgatgatgctgcccacgccgccgaatgcgtagaccacggtcagcatatcgctgccgtaccgggagccgatgcccagcaacgcatagcttgcccacagcgacggaatcagcgcaagcagcagcgatgcgatcagcagtctgacccgggtcaagcgggtgaccggagtgcgctgcggcgcgtgtgacgtgtcggccgccgtggattcgtcggcggagccgtcgccgtcatcgccgcccgcaccatcgttgccgaatcccggcatgaactcgcgggtgcggaatcgcgtcagcgcgcaggcgaatgacagtgccgacgaggtgagcagcatggccatgatggaggcgttggccagggccgatccggcaacctggcccagcaacgtaccggccacgctggcaatcacggcgacgtagccgctgtacttgacgagcatgtcatcgtcgtcgccggccgcatccacctcgaacacttcggaggccacgtcgatgacctgcccggtcatcagcagcaggcatgacagggccagcagcagccacttccaatacgtccaaccgttgggcaccagcgcgaccgccaggcacagtacgccttccacgccctccgtggtcgcaagcgaacggaacgagccgaaccgctgcacgatccatgcggataccggagaagcgaagtcgatgaccagattgaacgtcttgcggaacgcgatcacccatgccggcagtccgacgatcagaatcgaaggaatcaccgacccctcgaaaatcgcgttggacagcatcgaaaacgtcatacccaccaacgcccatcgcaacgccctgctcaataccgacaatccgcgcataccaatcccccacgagcaaaccccaacatatccgccgcaacagcatacccaccatttcgatggtttgcaaaccggtctacagtgagaatcagaggaggccactatgcgaatcatcgaacagcactgccaaggcaagaggtctgaccagtcgctcaatgaagacgggctgatcatcaccgatggtttcgcggcagtggtggatggagtgaccagcaaaagtgtgcaccaccctgccggccttgttcttggccgcgtccagcaccggcgcgaggccggcggcccattcgcgcaccgaacggccggcgagcatgtcgttgccgcccacgcacacgatcagcacatccggccggtcattgatatcgccgatcatccgatagcgcacacgtcgagcggtcgagacgagcttgccgaccgtactccaggccaccggtcgaccggtacgcttggcgacgcgcgcggcaagcagcggcataatgcctttcgactggtcgtccacgccacatccggccaccaatgaatcgccgaccatgacggcacgaatcggcttcacgccgttcgcgcctttccaatcggggccgatcggcgcctcgatatccaccccgcgacccttggcatcgaacaaaccgaaccgcttgcccttcggctcggacgccaacttcacccggcccttggcccacataccctcaatcggagcaacggcagcatcaatcacacgcaagattcccacggccacccaacatagtccgccctcctcgacctcgttagcggccagtagcaacccatattcgaaaactcgataaccatcgtcaattcgcataatttgaacgttttaggtgttttggtcgctttggacgttttatactgtgatagataaaaaggaggccaccatggcagaatccgacaaactcaccattccacgaacaatccttccatccatcaacattgacgacatgacgacattggaggcattcaccgcacgatttcttgatgagcggatcttcatcaaagatgccagcggcgtggagactcccctaccttcgcagctttgcgacgccgtcaggcagacggccatccttctcgccgaaggcaaaagtgtaacgatcagtgccaccgaacaagatctgactaccgaacaggcggcggcaatgctcggcatttcgcggcaaacactgataagactgcttgataaaggacttattcctttttcacgtccgtccaatcaccgtcgcatccggctggaagacctgcttgaatacaagcgagcctcgaaacacaccaaggattgcgccctgagccaaatgatcggcgtcggggaagacgccgaattgtacgacctgcccgagccgaccccgcaggaagccatgcatgcggtatcggaggtaaggagagtacgggccgatgctgtcggtgtttcttgatgccaatgtcatctattccatcaccttgaccgatgttctgctcaccttggccgagcatgacctttttcttcccctgtggtcgcctaacgtattacaagaagcacaggaagccgcctcccgaacactgcctgacgccgcacaacaagccttccgaaaaagactgataatgatggaccaggcattccccgaatcctccatacatgttgaggaatcggaatggagccaattcgatctgcctgacccggatgatcgtcacgtacttgcggctgcggcacagggacaagcagacgcactggccacgcgcaatatcaaggattttccccagaaactgcttgactctttctccattcaggtcatcacgccagatgatttgctctgtgtattacttagacgaaatccggaagccacagctagcgccatacgtgagcttatcgattctcgacatcggccaccgataaacattcccgactttgctaaaagacttgaacgctctggcgcaacacagtttgcagccgctattgcgcatatacgacagcctctcggcaatcattcgtactttgaccagtaacccatgaattctggatgaattggagtgaaccggcgggtctggaggcgagcgggcggcgaatcatggggcacaatggtgtcaaggaggccgccatggtcgatgactatactgccaaaatgactgagctgatcgaactcatgcgtctgatcggcaacgatacgcagcagtgcgaggtcaaggaatgcaagcgcaagatctcctcgaccatcaccgatacgctgtccgcgttctccaacggctccggcggctggatcatcctgggcctgtccgaaaagaacgggttcacgccggtcgagggattcgacgcgcgcgccatgcaggaggcgctgagccaggcgtgcgagaagatgacgccggtggtgcggcccgtgatcgtcacctgcccgttcgaaggcgcgaatctggtgttcgcgcgcatcgacgaaatgctgccgcgcgacaagccctgcttcaccaccgcgctcggaccgcacggcggctcgttcatccgcaccggcgacggcgaccggcgcatgacctcctatgaggtcgaccggctcatcgaggagcatctgcagcccacatacgatctggatatcgtgcccggcgccacgaccgatgacctcgacccgcagcttgttgccggattgttggcgcgcgtgcgcgaacagcatccgcgcgtgttcgccgaccgggacggcatcgatgtgctgctggatctgcaggtgttgc

SEQ ID NO: 1224 - DNA, 14801 bp, Unknown
  R81_24m  MAG No. k141_23562
gcggcggggtgcggcgcgtccttgttgatggcctggttgtagtagctgacgacctgggctttggggaaggtcttgtacttccagttcacgcccttggacttgagttccttcttgtaggaggcctggttgtaggtccagtcgaagaccacgccggtctggccggagtcgatggtgccgttggtcacatcgatggtgttcaggttgccggcttccttgagctttttgaagaagtcgagaccgggctgaaggttgttgatgtcgccgccggcgagctggttgaccatcagatagccgttgaaggccgcgccggcctcggtaggcttgccgttcagggacacggtgccggcgaacttcggatcgagcaggtcgttcagggaggcgacatcgccgtacttgtcggcgttccagcccacggacatgatgccggtgtagtcggcgtagtaggcgccgtcgacgttcttggcagcatcagggatcttgttccaggcctgcaccttgtacggggcgaaatagtcggtggaggtggcggcgatggcctggccgacgtcgaagacatcgggggcggcgtcggtacccttgttggtcttggcggcgtcgatctcctccttggaggaggcgttcgggttcagctcggtgatcttgatctccgggtacttcttcttgaagccctcgatgacctcgccgtagttggaccaatcatgcggcaaggcgatgacgttcagcgcgccctcttccttggcggccgattccgcaccacacttacctcagcacgccctcaatcaatcgcgtgatgagttcggtgtagctcactccggtggcatcccaagccttgggatacatagaaatcggcgtgaagccgggcatggtgttgatttcgttgaccatcaccgtgccatcaggcgtcacgaaggtgtccacacggctcaagccggcaccatccacggccttgaacgcgcgacgggccacgtcacgcacgtcctcaagcacgctgaccggcagattggccggcacttccacgtggctggcggaggcatccatgtacttggagtcgaaatcgtagaactggtcgtcgttctgatgatcgagcacgatttcgccgggccagctggcctcgggctcgtcaccggccttcgggcacagcacggcacattcgatttcgcgaccatcaatcccctgttcgacgagcaccttccaatcgtgctcgccggcggtggcgatggcggcggccagacgatcctgctgggtctcgcggtcatcggctttctcgaccttggtcacaccgaagctggagcctgcgcgcgaaggcttgatgaacagcggataggtaagaccggcgtcctcgatcttggcaagcacatcggcggcggtgaagttgcgcgcatcgaccgtcacaccgggcgcggtgggaatgccggcggcacccagcaccaccttggtgtaatgcttatccatgcaggcggcggaagcaaacactccgcaccccacgtacggcacacccatcatttccagcaggccttgaaccgtgccgtcctcgccatagggaccgtgcagcaccggcagtaccgcgtccacatggccaagggaggtcagcgcatggtgcatttccgggtcggacatgctgacgaagctggtgccgaagccggaatcggcggaattgatgcggctgggctcgccgatgaagaaaccgtcctggccgcgagaggggtcaatcatcaccgggcgcgatcccggggtgatctttacggtcggcagctcgccgccatccagattccagccacgaggatcttcgccgttgatgatccacttgccgtccttggtgatgccgaccggaatcggctcgaaccgttcagtgtccatggcccccagcacaccggcagtggagatgcaggaaatcgaatgctcgtctgcacgcccaccatagagcaccacaacacgcttcttggccataaccatccttttattgaaactacaaccgttttcaagcctatgctttgcaccgccaaccggaccgaaccgcgctcggaccgccgcgcacaagagacgcacaccagtctactcgcgcacgtcaacgacgtatacgccacacgactttgcacgtacgacgtatacgccacgtatacgtcgcttctctcgttattcgccggtaacctcgtgcccgaacagtccggcaagcatctccgagcaggaaatgccttcgttcagcacgcggctcatctgatacgccaacggggtcggcacatcaagctgctcgccaagagccaccaccgcatccgtggtgggcacgccttcggccacaccgttgctgaccttggtggcctcctcgaccgtcaatcccttgccgagattcgcgccgaacgtatagttacgagacagcggagagccacaggtggcgatgagatcgcctacaccggccaagccgaagaaggtcttgggatcggcgccagcggctgcgcccagcgcggtcagttcggccagtccacgagtttcgatcatggctgcggtgttctcaccgtagccggcaccacgggccatgcccacggccagcgcggtcacgttcttcaggctgccgcacatttccaggccgatgacgtcggtggtcacgaacggcttgaaataggaggtggtacatgcctcggccaccttcgtggcattatcgaggttcgtacaagccaccacggtggcggcaggatgacgatcggcgatttccttggacaggttcggtccggaaatggcggcgaaccggtcggccggcaggtcaagggattcgcggacgacttcgtccatacgcttgttggtgccacgctcgatgcccttcatcaggctgacgacgatggcgtgatcgggaatcagtcccttgaattcgacgagtgccactcgcgcgaactgcgcggcgatggccacaaccacgatgtccgcgttcttgacggcttcggcgcgatccccggtggcggtcatgttgtccggcaacttttcgacggacggcaggcgcacggcgttgtggtggcgatcgcgaatgtcctcgacaatccgctgctccttggcccacatggtcaccgtgttgccggcgtccgccagcacttggccgaaagcggtaccccatgctcctgcaccgagaaccgttatatttttacccatatcagattcctaccttcgcttgtcgcgcaacttcatcggcacaatcttgtgccatgctactcgcctaggctccccgtacgggaaccggtgcggctacttctcagccgggaacgggccgccggcttccggccaaggcttacgactcatgctgcggtagtcccagtagccttcagcggggaactgctcgccacgaatttcctccagtactgtgttcatgcgtttgagcacgcgccacatcagctcgttcacggcctcggcaggcggctcttcaccccatgagtccatgtcggcaagcagatcggagtaatcgagcgcatggtcatagcacatcaccacgtttttgcgcggccatggccaccagtggttgatggaggcggcaccccacgtcaccgccgggtacagcggcacctgatgccccagtctgcgcgaggattcaagggcgatgtatcccacgccctccttaatgctcatcacccactttttcgggtcgcgggtcacggtgccttccggccagaccgtcagcgggcggccggacgtcagaatatcaatcgaggtctcttcgatctgcttggccttgcccgaatgacgctgcaccggctgcatgccgaccaaccggaaccacttgccgatcaatggccacttcgccatctcggccttggccatgtaacgggggcggcggcccatgtggaacaggctcatcatcggcacgaacacatcaaacatggtgatatgactggcggcggtgatgaacggtccggtttccggcacctgttccagaccccaggccttggtcttgcagctggcgcggaacacaatggacacccctcccagcagtcgtttggtggccttgggattctgggcgtcgatttccggctgattgggcgtgcgagggccggtcgggtaatactgtgtcgagtccacaagcgtgtggcgggcggccagacgcttgacctgctcatcactcagcgggcttacggccgaacgcggcgacggttttcctttggatgccatggtctctattgtggcacggaccaccgcccaacgattccagcgcaacattcccgggaatgtgccgcggaaccacccctcacaccccgcctagcgcgacattcccgggaatgcgtcgcacaatacgcggcggcccgtctgcacacaccatgcgcgcagacgggccgccggggaaacgttcgaatcactccaccgcgatggcgtcgatctccacgagcgcgcccttgggaatcatgttgttgccaaaggccacgcgggcgggcttgacggagccgatgaacgcctcggcgtaacgtgcgtccacttccttgaagtcctcgacgttcttcaggtagatggtggcacggcacacatgctcaatgccggtaccggcagtgtcgagaatgtgcttaatattcttcagcgcctgtgcagcctgctctccagcggtctcgcccgccagttcgccggtggccggatcaatgcccagctggccggatacgaacacgaagccattggccttcaccgcctggctgtatgcgcccagcgcggccggcgcctcggaagtggctacggcttccatcttttcgctcatattgtgctccttctcatcttgggggcgcccacctgctgcggccggcgccggtacacatcaccaccggctacgaccaatcgcacgatcagcaacgattggcaatgccgattacgtagcagtctactgagcgaagtcgcgtttagcgcgcatgatgcccggcatacggccatcaacagactattccttgctattccagacgattccagacgattcgactaccgttctcgccaaaccgggcggtttttccacgacccaagcgagccggcatcaccgacaccagcaccagcaccagcaccagcaccagcaccagcaccagctttgcacgcgcttaatatcacgcgccgaatatgcaaaaggcttccggcggctagccgaaagccatgctggtgggcttgatggggatcgaacccacgaccttctgttccggagacagacgctctatccactgagctacaaacccgagcaacttctttactgtacaccacatcacgctgcatgaggcacatacgtcgccaaaataacgagaaaatcgccatcatcggccctacaatggggttatgtcggaacctacagatgacttcgaatacgaacgccgcttcttctgccgcgagctgccggcggaatacgacgacggcgacgccccgaccctcattattcagagctactacgtgcatgccgacaattacgccttgcgcgtgcggctggtctcgcacaaggttcacgtcgacatgacgtccgacgtaaatccggtggccgtgctggacgagtaccgcgaccggttctcggaagcgtatgtcaccgtcaaaggtccgtccgtgggtggcacgcgctacgaggtcgagcgcgagatcgacacgcgcatcgccgccgaactcatcaagcgcggcggctcggtaatcatcaagaaccggtattccgtgtggattgcggaagacggctggagcgtggacgtgttcggcgggccgaacgcgccgctgatcgtagccgaggccgaacgatccgggccggttaccaatctgacgattccgaaattctgcatcaccgaaatcaccgatcaggcgcgattcaataacgatggtctcgccaaccgtccgttctgcaagtgggcggatgatttcgaggaggaactggcgctggaggggccaaggttccagcaatatttcgggaagaatcggatggtttaggggaatcaatcaagtacgctcgcgcgctcctctcagtcatctacgcctgacagctcctctcaaagaggggagccaaaaccacttagtacatgagggtggctaggcgacggcgggcgcgagccagacgcgggtcggtgggttcggggatggcgaagtattcgagcagacgcttgcgaaccggctcgatatcggccttgtgcccggcggccaaaaagtccagcaaacggtcgaaagcgtcttgaatctggccaccgatcatgtcgatatcagccacagccaactgcgcttccacatcgtccggcgctgcggcggcagcggcacgcacgtcacgtacatcagcggacccggagcgggccagcaacagcgccttcgcacgttcgcgggcggccagtgcatcggacgggtcggattcgagcacgcgctcgtattcggcggcagcaccggcgtaatcgccctcctcggccaaacgatgggcttcggcatgctccggcggcacctgctcagcacccacgccggcaccggtggcaccagcgctcttggcggcatcggaatcaggatcacccgagtacggcgcggtaccgttcacaccagactgcgcggcggcctgaatgatcttcggaatcacctcgtcggtaagttgcttgagctcgtcgtcacccggaaggccctgcaacagtggcatcggacggccggcaatcaacgcgaacagtgcgggcgcgccctgcacctgcaacgcttgggcaatcgaaggattggacgagatatcgatacgggagagctgaatctggccgttcagggcgttcaccgcgtcgcccaacgcacgggccatcgggaacaggcggtcatcggtcggtatccacaggagcagcaggatcgggaaggtcgcagaagtctgcaccattgcctggaaggtgttttcggtggtgtcgatcacgtacccaccagcggcaggagcgccacccgcctggccgggctcggccttgacctgatgcttcagcgcctccaaatcgacggcgcccgccaatgagactcccggattgaactgctgctctgccataatgcctcccgattccacgcgattcgcgtacaacaacaatcacatttgctgacattgattgtaatgccgattcccaccacgtagggattcttccactacgcggtgaaattcccaccacgtagcaaaacgcccaccacgatgtgactcaaaacggcaccattgtgcgaaaggtaaaacttaccgacatcgtggtggatgaatcatatcgtggtggggcgttaaccgcgcggtgggcggcggcaacaactacagcgcttcgacctttaccggctgacggtcggcgcccacggcggtgatttgctcaccggagcttgccaacggaatgtacaaggccaccacgttcacatacgtgaccttcatggtgctggtgtacttgtcgctattgaacagcgccttctcgtcgtcggaagccggctgcgattcgcggccatcccccgccttgcgagtccattcgccgttaatacggccaaccaccaaatcaccggcaccgtctgcagcacgcatcacccacatctgttcaggcacaacggtgaatttctgctcctgcgtaccgttgttgcgttgcataccttcctgcaccttggccgtggtattggccagttcctggcgcagcaaatcgtctgcgaacttggaagcgtattggctcttggagccgttctgcagcacatcggcgtattgggtcaaggcatcggcgggagtggccaccagcttctcatcctttgcagtgcccatctgcgagccaatagtcggaatctcgaacttcggcagcttggccccctcaaacagtcgagccatggccatcagcttgtaattctgccgggcggattcctgatcgaagaccagcaaacgcttggactgctgatcttcggtggtggtcgtgatggtgaacaccgagcgaggccatccgtcgtccatgggaatcaccgtctgggcgatgtccttgggaatggtcgcgtatttggacataccgccgccgcgctggttgatcgtggtctggctgatgcgaatgtccagctggggcccgcccataacggccgcatatccatcgggattcttggcctgatcggcttcatcgatcgtcttgagaatcttcaggcgaatcttcttctcctgtgcctcggtcaaatccggcgcaaccttggtggaggtatcagcagccggcgtcggcagccggccttcacaggcggtcaacggcacgaccaacgccacgcaggcgagggcggccacacacagtttgttccatcgcttgttcatcagctttcctcctgtccgtcatcggccgagtcgtctccggtattgacctcttgggccaagcgggagaagtaggcctgcagttcgtcaggggtgattaccgaagtcgattcgttatcgccggcgctgaagccggtctcagcgccgctctcggcaccagtctgctggtcggcgaccaggttacgtgaacttgggtcgatgataaccggtgtttcggtggcttcagattgcgaggacgcacggcccgaacgccgatttgtggcgtggcggcgacgattacgtcgacttgcaccatccggcttcccggacactgcgatgctggcgggtgcctcttcctcaattacggcgcttgccgtgccttccaccatgcgcttgcggcgcttatgcggcggcatggcgaacacggaggcgcacaatacggccagcacggccagcaatccaccggacagatagaacggcatcgcaaagtccggcacttcggagcgcacccagtgcagctgcaccttggcgttggtggcattttcacccaaatccacaatggccaccgtcgaggcgccggtcttcttgctctccagcgaaacggacccggtgccgcatttcacggcagtccacatatcggaatccttgaacgccaccgcgtcatcggcactggcaggcgctccctgactcgtgctgcttcccttctgggtgctcagctcgctccatgacgccaatccggtgatacgggtataggacttctcggacgcgacccatccggcaacatccttggacggacccaacgccacgcacgcctcgtcctgagaggatcccgagtccacggttatcgtggcgttctgatccaacaaggtcagcacattcggatcagtgacggcataccgggagccgctcatggttgcggaagcggtgatttcagtggagggcttccatatcgtggcattcatgtaccccaacaccacagccgccacggccaatagaccgaagataggcgtcaccactccacgcatgatcttggcatgacgggatggacgcttggcgcccttatccggtcttgtagtctgttcttcagcactcataacttaaccattctacaatcttcacctgtttattacctaggagcgcagaaaatcaaggttcaccagtagggtggtgtgtcatgcgtaagtctgttaaatctatgttatcccctctcggcaaggccgttgctcttgcctgctcgctggcgatgtgcgtatcgctggctgcctgctccagttcgagctcggactcgaaatcctcttccgactcttctgacaagaaggggcaaattgccggcgtgaccgccaagggcaagctcggcgagaagccgaccatctcctttaatacgccgatgaccgtgtccgacggctcctatgtggtgctgcaaaagggcgatggcgacgtaatcgaggagggcgaccgcgtctgcgcccaaggcatcgcgctcaacgttaaagacggcaccgagctcatggacacctggaccaagaacacgccggattgctcgctgaaggtggattccaagaccctctcctcgacctactacaaccagatcaagggtgccaagatcaacaccacgatcggctttggcgtcaacgctcaggattcgtccggatactcttacattttggcgatgacgtttgtatccaagtccaaggacctgaagaaggccactggcgaggaagtcaaggatgtgccggccaatctgccgaaggtgacgcgagccaagaatggcaagccgtccattgacatgaacggtcagggttcggttgattcgctgatctcgcagacgctgatcaagggtaacggcgccaagctgaccgacaagaacaccgtggtggtcaagtacaccggttggcttacggatggcaagcagttcgattcgtcctgggatcgcgattccacaatcgacgccgatctgttcagcgattccagcggccagcatcaggttatcgagggctggcagaagggtctggtcggccagaccgtcggctctcaggttctgctggtgattccgccggatcaggcctatggagataaggagcaaggttcgattcccgccaactccacgttggtcttcgtaatcgatattctcgccgcgtactaaacaatctcgatggctctccccaagaggggagctggcagcgaaactgactgaggggaggcctcacggaatataccgtgaggcctcccctcagtctctctatgtacgttcgaaaactccccttcaagagggaagccaagaacaatcagaacagcctgagactgtcgtcctcggtgcctttcatatcgtcgtaatcgaggatgaggcaggtgaagccgcggtccttggccaagacctgggcttgcggcgtgatggtttgtgcggcgaagatgccatgcaccggggccagcagcggatcgcgattgagcagttcgcagtagcgagtcagctgctcgacgccatcaatgccgccgtgacgtttgatttccacagccacatgctcgccctcggcattcacggccatgatatccaccggaccaatggcggtagggtattcgcgacgcaccagcttggctcccttgccgatacgctcgatctgctcggccagatagcattgcagatggtcttccacgccatccttgatgagacccggatcttcgcccagatcataggtttggtcggaatagatgtgttgcagcgtcacttcaagaatgtcagagcccttgtcggcgctgacacgtagcaccttttccggctcaccagcggcgacactttccggggaatgcgtcgcggaatcaccatccacagccccaccagcgacactttcccgggaatgttgcgcggatttggcggctgggtcgatctcacgaatcgtgcagggcgcggtcatccagttcagcggcttgtaggagcccaattcggagaaaatcaacaggctggaatcagccttgatcagcaatacacgcttggccaggggcagtgaggcgttgaggcggcccgaatactcggccgaacagtcggcaacaataactcgcataggccaccactgtagcgcaacacatggcatacatagcaaaaggggctctctggaaaaccagagagccccttgaggagttggttcagatcactcggcggtgccggagtactggacgtcgtggccgcgctcgaccgccacggtgagtttgttcgagtcgaaggagatgaatccgtcggtcacctcgaacatgtggcgatcgccatcgggctcaaccacggtgagcgtaccctgcttgatcaccgtgagcacaggctcatggtcgggcaggatgcccatgccgccctcagaggcgggaatggtcacgctcgtcgcctcgccgtgccacacagggtggtcagcggcgacgatgttgaccttcatcgtggttttttccgcagccatcacgcacccagttccttctgcatgttgtgccacttctcttcgagatcatcgatgccgccgataccggagaacgcctgctccgggacgtcgtcgtacacgccgtcgcagatgcgggtgaaggcttcgatggtctcgtcggccggcacgtaggagccggggcgaccggtgaacttctcggcaacgtagaagttctggccgaggaactgctcgatcttacgagcgcggttcacggtggtcttgtcctcttcgccgagctcgtcgataccgatcaaggcgatgatgtcctgcagctccttgttacgctgcagaatcgccttgacgcggttggcgcagtcgtagtgagcctggcccacgtaacgcggatcgaggattcgcgaggtggagctcagcgggtccacagccgggtagatacccttggaggcaatgtcacgagacagctcggtggttgcatccaagtgggcgaaggtcgtggccggggccgggtcggtgtaatcatcggccggcacgtagatggcctgcagcgaggtgatcgagtgaccacgggtcgaggtgatgcgctcctggagggaacccatctcatcggccaggttcggctggtaacccacggcggaaggcatacgacccagcagggtggacacctcggaaccggcctgggtgaagcggaagatgttgtcgatgaacagcagcacgtcctggttctgcacgtcacggaagtactctgccatggtcagtgcggtcagcggcacgcgcagacgggtacccggctgctcatccatctggccgaagaccagtgcggtcttctcaagcacgccggcctcggccatttcgccgatcagatcgttaccctcacgggtacgctcgccgacgcccgcgaacacggacacgccaccgtggttctgagccacgcgctgaatcatttcctgaatcagcacggtcttgcccacacctgcaccaccgaacagaccgatcttgccgccctgcacgtacggggtcagcaggtcgatgaccttgatgcccgtttcgaacatctgggtcttggactccagctgatcgaaggccggcgggttgcggtggataggccaacgctcggagacggtgatggtctcatccggcttcttgttgaggatgttaccggacacgtcgaagacgtggcccttggtcacgtcgccgaccggcacggagatcggggcgccggtgtcggagacggaggcaccacggaccaggccgtcggtgggcttcagagcgacgcaacggaccgtggaatcaccgaggtgctgttcgacctcgagggtgatctcggtctccttcgcctcgccttcttccttggcgccggtgttgacgatcgttactttcagggcgttgtagatgtcgggcagatgacccaccgggaattcaacgtcgataaccgagccctggacgcgggtgacgcgaccgttggtaggctcggccgcagtggtctggttgtcagccatatgcgttcctactcttccttcttggtcagcgcgtcagcgctgccgatgatttcggtaagttcctgggtgatcgaggcctggcgggaagcgttgagcttgcgcgtaaggtcgtcgatcaggtttcgtgcgttgtcggttgccgtgtgcatggcgttctggcggcttgcggtttccgacgcggccgcggtcagcaggcactcgtggatgcgggactgaatgtacttcggcagaatcgcgtccagtaccttttcgaggctgggctcgaaagtgtacagcggagcgacatccgcagtagccggtgcctcttcatcaggatcgggcaccttggtctcgtttttcacgatttcgaccggcagcatgcgcagcacgcgcaccttttgcaccaccatgttgatgaactcggtgtagacgatgtagagttcggaaactccacctttctcagccggcttcatgtaggcgtccatcaaagtgttggagatcgtttcagcaatttccacgccgggctggtcggtgtcgccttcccacgtcgccgcgatgtcacgattacggtacttgtagtacgtcgaaccgcgacgcccgtacacgaacagctccggctgcttgcctgccgcatcgaggcgggacagcagcgactccgtttcacggataatcgaagaggtgtacgggccggccataccacgatccgaggtgagggcgagaacagccacgcgcgggttcttctcgtccttcaccgcgatcggatgcgtgatatgggtgtgggccaccaacgcttgcacggcatcgaaaatcgcatcggtgtacggcttcgcgttcagggccacatcacgggccttggcgatatgcgaagacgcgatcatctcctgagcgttgaagatcttcgccaacgactcggtggagtggatgcgtgatttcaatgcgagttgcgagcccatggcttacttttctcccgccacgatcttttcctgatcgaccggcgcggccttgtcaacgtccggcttcttctcgaccagcggcttgccggcggaagagacgaacgtcgaacggaactcgtccacggccttatcgagggcagcctcggtgtcggcggtgaattcctcggtctcgcgaatggtcttgaggatatcggtattgtggtcgatgtagtccagcagtccctgctcgaacggaaggacgtccttcaggtcgaggtcgtcgagcttgccgtgggtgccggtccatacggacacgacttcctgttccggcgagtacgggtggaactgcggctgcttcaacagctcggtcaggtgggcaccacgggtcagctgggccttggaagccgcatccagatcggaggcgaacatggcgaaggattccagcgaacggtactgtgccagggagatcttcagcgtaccggagaccttcttcagagccttggtctgtgcggcgccaccgactcgagagacggagataccgacgtccacggcggggcgctggttggcgttgaacagatcggactgcaggaagatctggccgtcagtgatggagatcacgttggtcgggatgtaggcggacacatcgttcgccttggtctcgacgatcggcagacccgtcatcgaaccgccgccgagatcatcggagaccttggcgcaacgttcgagcaggcgggcgtgccggtagaacacatcacccgggtaggcttcacgccccggcgggcggcgcagcagc

SEQ ID NO: 1225 - DNA, 4352 bp, Unknown
  R81_24m  MAG No. k141_23570
cgcaattcgtcgatccggatgcgttcctgtgccgacaagtgggaatacactttcctcatgggcgcaacaccttctccagttagaacctgaacacttccaaccatagagcgggtgttgcgcttctatctagaacccgggttcagcccggggcaaaaccgaaaaacgtagaatgaaagggcaacgttccacctactgaaagaaggaacattatgacacttgcgtttgttgtgccgggccttgatgaagcggccagtgagaaggccatcgccatcctacagaaccgactgagccaggagcaggaggccgctctggtcctgaagcacgcacactggaacgtgaccggcccgaacttcatcgccgttcacgagatgcttgaccccgaggtcgaggccgtgctggctcaggccgacgagaccgccgagcgcatcgccactctgggcggcaccccggacggccgcgcggacgccatcgtgcgcaaccgcacgtggaagtcgttcgacgccgagggccgcgtgggcaccgaggagtatctcaaggcgctgatcgagtactatgacgccttcatcgccgacgaccgcaaggccatcgccgagctggacgagctggatgtgatcagctccaacatcatccaggaccacgtgcaggaactcgaaaagttccagtggttcatgcgctctcacctggcataagtaaaagcagtattccgtggctcccctcaaagaggggagccactttcgtctcacgtgaaatagagagtctccacatacataagttggaaaagtgtataaaactccccattttgaggttggaaaacgtagccaaaaccgcattcttatggttggaaaagtgtaaaatatgcgctataaacagttggaaaacgtgcccagcatagatgcaaggcctacaaatgactggagattctcatgctgcgaagaaaaatcgagacacagctggaagcttggagatccgcgccgaaacgcactgcactgctggtcaccggagcccgtcagattggcaaaacctatatcatcaggcactttgcccaacagcattacgaccatatcgccgagctcaatttcatcgagaaccctgacctcgttgcattattcgatcggccccgcgatgccaaaaacctactgatgaggctggaactggccgtaaatacgccattagtacccggcaaaaccctgattttctttgacgaggtccagcgttgcaaggaaatggtcaccgcaattaagttccttgtagatgatggtcggttcaattacgcgctttccggctcgctacttggagtcgagctcgaagatatacgctcggtaccggtcgggtacctgaccgagctggatatgtatccactggatttccaagagttctgctggtcgcagcatatcggcaacgacgtattcgatatgcttgccgaatgctttgccaagcaccaggaagtggatgagttcattcatcaaaggctcatggagctatactccaaatatctggtcatcggcggcatgcctgccgcagtcgactcgttcgtggcaaacggcagcgttgcggacgtgcgcactatacaagagaacataaagcgtgaatatcgccgcgatatcagccaatacgcgcgcaaagaagaccggctgcatatccgcgctatctacgatttggtgcccagcgagttaaataacccaaacaagcgctttaccttcgccaaaatcgaaaagaacatgagattccaatcggttgcttccgatttcgattggctggtcaatgcggatgtagccgtcgccgcgtacaacgtggacgaaccgtgcacaccgttggagatgagcaaggaacgtaacctcttcaaactcttttacaacgacgtgggtctgcttaccggctcgtttctcaagaaaaccgcgctcgacgtactcgacggcaaccctgatatcaactacggttcaatctatgaaaatgcggtggcccaagagctacgcgctcacggatttgacctgtactactacaacagtaagaagcttggcgagctcgatttcctcatccaagaccgcaacgatcacgtgctgccgattgaggtgaagtccggcaaatcctacaaacgccatcgcgcaatggacaacgtgctcgcccaccctgaataccatctcaatacaggctatgtgcttggcccgtgcaacgtctcagtcgaagggaatgtaacctacctgcctgtatacatggccggcatgttccataacgaatgacgggccgcacacttagtcaacaagtacatgtcggtcagatggttcggactggtcagagggcccgctctgatcagttaggtcggtctgaacggactggctgggctggtcggcctgagtagcccgtttggaccgatccggttcgcccttgctggccttcacactgcttcagctccagctgaagttcgctgatgcgccgttcgagttcgtcgatgcgccgtacttgtggcgaagtgagactgaggggagcctacaaaatgctcacaggccgagggcaccggccacggccatggcctcgtgttcgggatcggcctggccgatgtgtacgttgacgtgaatttcgtcatcgcccggctcttcgagaatgtcggactgggattgcagcatgctcggcttcatgaagtggccttggcggtgggaaaggcgttccatcacctcgtcgaatgtgccctgcatgtagacgaacaccacgccttgacggcgcagcttgtcgcggtagatcttcttcaacgccgagcaggtgaccacggcgggctcgccggcggccacgcgctcgtcgatccacgcggcgatggtgtcgagccaaggccagcggtcttcgtcggtgagcgggtgtccggcggccatcgagatggtggcgcattcgaaccatgcgaacgaatccgatcaggccatcagccacatcgccggcactgaagcctgacctgtcatcgtcacagcaccacgcggcggttgaggtcgcggcgtagcgtcttccagccgggtaggtaggcggtcatgcggcgttggaatccggcgccgtggccgctttcccacagatgcgtcatctcatggaccaagacgtattccaggaattgcggttccatcactcccaattgaaggttcagacggatgcggccggttcgcggcgtacacgatccccagcgcgaggtcatgacccgtagcgtgatatgcgtgggctgccggccgatgaccggcccccacttggccagcagctgtggcaacgcggcgttgatcgcggccgccgcttgtcgtttgcgttcgtcggtccagatttgggagcggtcaaaatacggttggacattcgtaccggcttggcccggcccggcgtcaccaattcccggacgactgatatcaccggttttcggacgaccggcaacgcctccatcatggccgctgacaccagctacgccacgacctccgttctcgaagccggcaccctcgttcaatgccatgatggagcgccgttgcgcctcagccatgcgctgctgctgggcaagaatccacgaatgtcgctctttgacgaaatccgcgatacgactctcgctcatccgcatcggtgcggagatttcgacgcggccgctcggcggtttgatgcgcagatacaggtttttgatgggtttgcgcgtcaggtgcagatggatgccgtcaatgtccaacgactgcccggcggcagcggaccgaacggatttcggcgcaccggacttcggagcggtggattgacgacggcgataaggcatgcaagtcattcttacacaacggcggacaacaagcggcacacaatgccgcccctcacgaatcggcaaccggcgctgctacattcaatccgcataccaactgcccacaccggagaaggtcgcgcaggagaaggcctcgctgctcgagatcgacgacagcttccagaagatcgtcctcgtacgcgacgtggtcaaacccgtccgcgacgaacacggcatcctcacgatgagcgtctacgatttcctcctcgacccggacagcctgacgatgtgacgccggacggccggcaaatgccccggaacgcagcccccccactcctcgaacaccgccttcgcggtggccgaggacaccatgacgagacagccgagcatgatggcacccagcagagggtgccgaagttcgcgatgacgtactgccacaggtccgacccgtccgtgtagccgtcgaagcgcagcgcctcgacggggacgagaaatccgtcaagcgcatgcgcggcgtcagatacaccgtcctgaagaaccccggcaagctgaccgacagacggtccgaggcgtccgggaacctgcgggacacggaccccaagggccggccctaccgttc

SEQ ID NO: 1226 - DNA, 4246 bp, Unknown
  R81_24m  MAG No. k141_23784
agcagtctcgtttctgtgtcacgcaaggcagctcttgcaaattcaaagagatcgtctgcgcgagcgcccagctgtccagactcaaggttccaatatcgtttgagctccaaacgcgcctcatcgtcttccttttcttcgcttgtatccggatcgtatagatgtggcaacatgcacccaacaaagtccgacgcagaacgcaattctctaatctctttagaggcctttccgaacttgattaggcctttatcgcgaagtttgtctgctttgctcaacagttgatcccgatgcctccataaagtatttatcgtcgttcctcgatcatgaatcttgggattgggacgtttttgctcttcgggggaaagcgtttcccagtggtacacatccttcagctgttcgagaatataattgcccaatcttttgttgatggacaacaactcctcgcaagctttgacatagggcgtgtaaaagcttaagaaatcctccatgtgctgatttttcgcagtgtcggccgctcgttgttctgccgccgctgctcttttttcagcagcttccgctcgctcttcagctttttgcgccctgacctctgcttttctcgatagaaagcatgacagtactggacctcccaacgaagcggctgcggcgataattgcagcgatgacggtaggattcatgcagcaccttctctctcttgggttgtgcttcattctaccaacatcatcgaacatttgttctataaaactagagcatgctagagaacgactagccctaggggtttctatagcttccaaattgataaattaccctgacctcaccaagtaggtgaagtcagggcaatttatcattccatcttgttcttggcaagcttgccatcaaaagcctgattgacgagcgtgtacacagtctgagcaacacccactactcccgcgagcacgatgccccacgtgtaggtgccgtcgaatccacctgtggcggcgatggcgatggtgccgagcaggatggacgccgcgagggagacgagtccgacgtatccgctggggatgtatttcttgaacgcctgcacgaatgcgggcacgatcaacgccacgagcccggatgcgagcgtggttgcggtggaaatatccatagttttctccttggtttgatgatgaaggtggcctccggcacggtgccgaaggccacgatggttgtggtcagtagcggagccgctggccggggtaaatgaggttggggttggcgaggttgttcaactgggcgacgcgctgccagccggaagctccaaagatgccgctgagcgtttcgccgctcttgacgacatgcacacgtccacccgtggcaacagatccgctggaagcaacggtcgccgcgcctcggtaggtgacgatgttgccgggatagatcaggttgatgttgccggacggcacgctccacgcggacagcggccaaaggccggttctggtggcgatgccggacatggtgtcgccgctgcgcacggtcacgctcacgctccgggtggaagcggcgggcgtgtatgccgtggatccgttgagcctctggttgacgatgctcatgaccagcccgtagttcgctcccaacgcggccctgcgggcttcgccgttgccgtagtcgccacggatcgtcgcggtcgccaatgcctcgtagtccacgctcggcgcgggctgtggagccggcatcggagtcggcttgaaggatttgcccgggttggcgtacttgtcccactgttcgcgggtgccacggaagtagttcagatccaacgggccgttgtagccgttgatgcgcccgttgctggtgtactggcgcatgacctcgccgtacttgccgtagttccacggtcgggactgccagccggtgggattgttgttggtgtactgagccacccacagaccgcagttggcacgcacatcggccgagatctggggaatgaacgcggcggacacgtagaccagcggccatacgccggtgcgttcgtggacgttgactactccgacgaactggtgtcgcaggcaggcagattcctgcatttcgtcaccgccgacagccacagcgccgagaatctgggacgtatgttcgcaacccctttgttggagccatacaagcatctgttctacgtgctgtacggtggcggcggcaacggcaagggcatcctactggacacactgcatcgcagccttcccgaactgtctgcggcggtcacgtcgaagaccctgctgggagggcgcaacggcaacggcggcttcgccaccgatcaggagactctgaagctgatcggcgcgctgtgggcctacgacgaggatgccgacaccatcaccctggaacaggctaccctgctgaagaagatcggcaccggcgacacgatggtcgcccgtcgagtgcaggagaacgcggtcagcttcaagaacaaggccacgttcatcatcgcatcgaacaatccagtcatcatgagcatgaccgaggcgttggaacgccgccgcgtgttcgtgcgcatgagggacggccaagccgaggaggaattcgccgacctgctgaaattccgcgacgaacatggcatagcaccgttcctgatggcctcatgccgcctgtgggaggtgcgtggcgacaagccctggaacgatgtcgtcatcggatccgccgacgacctgaccgaagcgcagcagtggatcgtggactgcatcgtggcaaacgggtacgccgtcagccgcgacaacccgcaccacgagaccgacatggcgcaccgcaacaccgtcacgaagctcggtctgaaatcgaagcccaagcgcatcaacggcgaggtcgtgcgcgtgctggtggtcaggaacgaacgcgtgttcagcgtgtaccgcgacggcaccgccaaggacatgaccgaagccatgcaggaagaaggcgcagccaagacggtgccaccgttgccggatcccatcgagggaggcaccgtggtcacgccggacgattgcggctatccggtcacgttcggcatggtcaacgaggggaaacgctcctacgactgggccaaaaaccgcacgctgccggaaggcaagcaaccgccgacgggcgtggccgcgtatgcggtcgttcccgttgcgggcatggcggtcatcgatctggacgtggccaaggatccggccaccggcgaagtgctcaaagacgctccgaccggctgggacgtcttcaaccgcgaaatcggcgaatacggctccgaggacttcccgaagacgtacctcgtaggcacacccaccggccgcaggaacggcttgccctccgcacacgcctactacctgatcccgcccgaactgcaaggccggctgaagaacgccgtccacgagaagggcatgccggtagacatccgctgcgaaggcaagggctacgtggtcggagcgggcagtcatatatccggcggcgactacctgctgcttgacctaccagacggccagccgccgatgatgccgcccaggatggtgcgatggctgatcgaccacggctacgtgaccgaacccgatggccaagcttccacgcccaagctggagcatgcggcgcggatcccgtcattgagcgagctaatgcgccggtccgtcacggtcggatccatagcgaacgggaaacccgacatgacgccgataccggccggaagccggaacaacgaccttcacgcgtgggcctacggaagactgctgaaccaccccgacaatgccgaggccattcgccgtgatctgttcgagcgcggacagaccagcggactgaaggaatctgagttggagacgatctggcagtccatccgccgccagctgggaggcgaccgatgatgccgagacggaaaccaccgtggctcaaactcctgtgcccgtcgggcgcgaaccccgcgcacctgacagccagacgctgcggcacatgccgtgaatgggtggcggtggacaccggagggccgatcgaagagatttacgaccccggcgtactggacgcaacggatctggccgtggccatcatcctgggccgcaggttcacgcgcatccagcccatcgccggcaccacgctgattggactgcgcacaccatgcggcacgcggggcatcaaacctgacggcatgtacctcgcagcccacgagtgcttccgcacgccgatcagcgtgaagccattcaaaccacccaaacgcacggcagcgtccaaatggaacggaccgcaactcagcaaaggggagataagcgctttcgagacagcctagaggaataaacca

SEQ ID NO: 1227 - DNA, 47302 bp, Unknown
  R81_24m  MAG No. k141_23997
aagcgccggcgatctccggagcgcggtcgcccgcaccctcgatcggcttggtgacgatctcgatcagcggcacgccggcgcggttgtagtcgaccagcgaatgatcggcgccttcgatacggccgtcggcaccacccacgtgggtgttcttgccggcgtcgtcttcgatgtgggcgcgctcgatcggcacacggaacacggtgccgtcctccagttcgacgtccaggtagccattgccgttggtgggcttgtcgtactgcgagatctggtagtcacgcggcatgtccgggtagaagtagttcttgcgggcgaactggctccactcggcgatttcgcagtgcagggccaggcccagcttgatcgcgtaatcgacggcggtcttgttgatcaccggcagggagcccggcaggccaaggctcaccggggtcagctcggtgttcggctcgccgccgaactcgatgtgggccgggcagaacagcttggtgttcgtggacagctccacatgggtttccagaccgaagaccacatcgtacttcttggtggcatcggcgtacttcatcagtttttcagccatgatgttgtttctttccttccgatgctcacttgcccaggccgtcaagccacggggtcttgaggtcgttccagatcgggccgttccagctgtcttccagcgcggcttcgagggccgcagccggcttgtacatgacttcgtcgcgctgctgcggggcgatgaactggaagccgacgggcaggccgtcgtcggacaggccggccgggatggacatggcgggcacgccggcgaggttggccggaatggtggcgatgtcgttcatgtacatggccagcgggtcgtccatcttctcgccgaacttgaaggcggtggacgggctggtgggggccacgagtacgtcggccttctcgaaggcgttgtggaagtcccggatgatcagcgtgcggaccttctgggccgaaccgtaccaggcgtcgtagtagccggcggacagggcgtaggtaccgaggatgatacggcgcttgacctcgtcgccgaagccggcctcacgggtgtaggccatcatgttggcggcggtctgaggcacgccggtcggcggcatcacgcgcaggcggtagcgcatgccatcgtaccgggccaggttggtgctgaccacggacggcatgaggatggggtaggcgcccagcgagtagccgatgtgcggaaccgagacctcaacgacttcggcgcccatgtccttgagcttgtcgacggcctcgccgaaacgggcctcgacgccgggctggaagccctcgccgccgagttccttgatgaggccgaccttcatgcccttcagatcgcgcttggcgccttcgcgggcggcggcgaccatcgggcgcgggccttcggggatggaggtggagtcgcgcttgtcgtggccaccgatgatctcctgcagcagtgcggagtcgagcacggtgcgggagaccgggccgatctggtcgagcgaggaggccatggcgatggctccgaaacgggagacgccgccgtaggtgggtttgacgcccacggtgccggtcagggcgccgggctgacggatcgagccaccggtgtcggtgccgagggcgatcggtgcctcgaatgcggcgactgcggaggcggagccgccaccggaaccgccgggcacgcgctcggtatcccacgggttgtgggtggtctggtaggcggagtgctcggtggaggagccctgggcgaattcgtcgaggttggtcttgccgagaatcggcatgccggcggccttgagcttttcgatgacggtggcgtcgtacggcggcacccagccttcgaggatcttggaggcggcggtggtctcaatgcccttggtgacgatcatgtccttgatggcgatcggcacaccagccagctcaggcagggcggccttgtcttcggcggacttggcgtcgaaggcgtcggcctgctcgagagccacatcgccggaaaccttcaggaaggccttgatggacggctcggcggcttcgatcaccttgaggtgggcttcgacgagctcacgagaggtgacgtcgcccttcttgatggcagcggcctgctcggcagcagacagtttgacgagagttgcggtttcgttgctcatcgattactcctcgcttcccaggattcgcggtgccacgaacatgccggcctcggtcttcgggccaccggcgagcgcctcttcctgcgtgagcggggtttcggcgacgtccgggcgcaggtaggcttccagcggaaccgggttggcggtcggcggcacatcgtcggaggcgacttcctggaccttgttgatggagtctgcgatgacgttcagttcgccctgcagacgggtgatttcctcatcggtgagcgcgattcgggccagatcgcccaaatgcacgatttcttcacgtgaaaatgttggcatggccataactatatgagccgtatgtgacacgcagttgtcgggaagcctcattttcccgcctactggagcccttcagcgaatcagaagctcaagccggtcgagcatttgccccgctgctggcttcttcggcggggcaaaaccgttgccggaccgcaagttcaccttactgagacgactcgcagcagagcaaaaccgcgagctgaccgatgaaacgccccgctcagccatcccagcaaaacaaaaccgcggtccaaccaataaaacgccccgctgagacgccccgcagcgaggcaacgccacggcccaaccgcaaatgtgccccactgaagtatctgcatggccaccctaataagctcacaatgagcccaaacacacctacatcgaacatatgaacgacaatcgccctgcgcacctcgccagttatccacattttgcatacccacccaaaagaatccacataatcagtccaatacggtcagatgcctgataatcaggcaaaaacacacatctaggcaccgaagctagaaccacataaccccagacagatagacaccgtgttcaccattggcataccgtcgaatcatgaaacatcacaaagcagtggacatactcatcacgaaggctgaagcaacgcaacagtgcgcttatggaacaaccaaggcacaccgctcggcgctggctcggcgcgtgcaggcgcgcgaactcaaacgtgtattccccaacatgtacgccgcttcggaatactgggattcgctgcaacccgacgaacgtatcagacatattgcacgaactcttcataacagacatccggattgggtgttcgccggggtcacggcagcggccatccacgattttgaacaccaatggcatcttcatgctggcaccatcactctcgccacaacatcacgaggccccaacgccagcagtgcaaaggtcaaacgcatcttcacgtcaagcagcacgccagaatatgccaatggactcccggtgaccagcaaagccagaacggtggtggattgcgggctgtccgtcgacttccgatttgcactgcccattatcgattcggcgctgcgcaacggcgtcgccatcacggacattctgaatgtgtgcagcactatgcgacgtgattgcacgccgatattccgcctactgcattatgccaatccggcgagtgagaatggtggcgagtcacttggacgaggcaccatcatcgcaggcggcctattagccccagaactgcaacaaaacatcaccgacccgcaaaccggtgctctgtatcgcgtggatttcctctggcggctacctgagaatcggcttatcgtgggcgaattcgatggctatgaaaaatatgtgaacccggatatgaatgaccgcaagggtgttcgtggtgcagttcaggcggagaaagaacgggagacggcactgtaccgggccaaagtcgacaccattgtccgattcacctatgaggaggtgatgcaacaacatcctttactcaataagctgcgggcagccggcatacctcatgctggaacagtgatgggagctggttaagcgcagtgaaccacggtggtcaaatccatggggtcagagtcaccagaaccatggtcactgcagaaccgccaaagccatagccatgacaaactgccaggaccatggccgaaccggcagaaccgccaaagcagtaacccgcgttatttgatatctgatatccgcttttccggtgatgatgagaccgccgatccatgcggcggcagcccaggcgatgagaatcaggccggactgccaccattcgggaatccagtagtccggtttaacggcttcggccagtgtggactgcgcggagctgctgatgcctgcggcgagcaggatgccgacgatgccggcggcaaatgcgaattaatgccgcggcgatggatttggtggcgtagatcatgcctctaatgtggcccatattgggcagatgcggcaggattgtcggcgcatggctacacgcctgatacggcgtgttgggcaatccatgcgtgcatggccacggccgccgcagcgcctgcattaatggagcgcacggaaccgaattgagagatgtagaccacatcgtcggccaattcgagggccttctcgctcaatccggggccttccgcaccgaagagcagcaggcaccgcttggggaaggtataggtttccatcggcactgcgccgggaatgatatcgagggcgatgacgcgggcggcttgaagctccttgatgcgcgcatcacaagcatcgatttcggccagcagctcatgaaggtgcttgttgtctccatccacagccacatcatgcgcatggatggcggcggcaccggccttggctcgttcataggcgatttcaccggcgatgcgatgatgccagctttccaccagttcggcgatggaggggtggtgttcgacgtgctggtacagttcggtcatcaacgcgcccttgcgattccacttatgtggaccgacaatgtgtacgcgcttggcctggaaggcgttggcggtgcggaccatggaaccgatgttgaaatcgtgggtccagttttccaccgcaacttcgaagtcatgacgccctcgagcgtcaagatcggccttaatggcagcgacggtccagtagcggtaacgatccaatacgttgcggcggtcgccgtcattcaacagcaccgagtcgaaacgaccgtcataattcggagaagtcggatcgtcgggacgaggctcgccgggatgggtctcagaccacggcccaaggccgatttcacggaattccggttcacctgaagctttggcagccaaagaaatctggttgggtgcgtgcaatctttctcctcgataacgctattcaccggttccccttagtcaacttcgcggctcagcccggctgactttatgcgagggaagtcaaaggtggatttaccgcagttcggattcgtcgaagacctggatgaaggggagcgtttgctcgtcgccggtggaggggttgaccacattgatgtctttggcaccgccaccgaccagcgaggcgatggccacgaccttggcacccagctgctccactatgccaaagtcgaggctcagctcattgccgttgcgcagggtgaccagcgagctggtctgcacgtacgacttttcggacagccaagcatccaacagcaccacacggcggccttcgatggaggggcccttgatggacgggtagacgaagtccatcacgaatccgtctaggtcctcgccacgagaggcggcggcctggatcatggcggacaccatgggcacagatgctgcggtcaaggcaccaacagcatcgaagtcatcaaccgaatagcccgcatcttccaaagcgtcaatcagtacatggcccatgacggtggcggcacggtggtcaaaagtcaccgcggcaagttcggagaacggacggcccaccacatgctccctcagcaaggtggctagctgttcacgcggctccagcatggcaaagtcattgtggctcttcgcgacggcgaggtccggggtaccagtggggcggaatccagattcagtcatgactccagactatcgcctgaggcagtcagatgagtatcaccctcatcggccggcaccacttcaggggcggacagttcgctcacattgcctttatctgattcgatgatcggtacttcctcgatgatcttggtcggttcgattttttgcagcttgcgagcggtgggcaacacacggcgttccaagctggacgcgaacttgttgtaggcgctgaccgtcttagtaatctgggtgcccaatttgatggcataatcacccaacgtggagaaccgttcgtacagttctcgggacagatcgaacagctgcttggcgtcatcggtgagcgactgctgctgccaggcataggcgacggatttcagcacggcccacagcgtgaccggcgaggtgagcgccactttgcgagagaacgcatcatccatcagtgtgggatcggcttcgagcgcggcctgcaatagtgcctcattggggatgaaggccaccacaaaatcgggtgccacatcaaaggcattccaataggccttttcgccgagagcacgtacatgctcgcgcaacgccttggcatgggaccgcagcaaatcatcgcggcgggcaatatcctcggggctggcggtgtccgggatttcgcaggcacgctggtaatcggcataaggcactttggcatcaatcggaatggtcttgcctcccggcagatgcacgatcatatccgggcgcaacgtacgcccatcggcatccgtgaccaccacctgggtatcgaaatcgacatgttccagcaatccggcggattcgacaatgttcttgagctgggcctcgccccacgcgccacgcaccttgttgttgcgcaatgcggcggacagggagctggtctccttgtccaaacgggcctgctggtcgttgagccccttgagttgggctcccaatgcgcccatttccctcttgcggccctcttcgatctgcgtgaccttgttctgcaaggtatcaagatttttggccactggcgcaagcgcctcgagcaccttgctctgttctttcaaacgtgcttcctgttcagcacgcttggcctcggcgtcccgagcatccgcctgacgcttccgttccgcctccgcagccgcacgctcacgttcctgctgaatgcgaatctgctcagcctgctgcgcctgggcaagttgtgacttggcgaaagccaattgctggttcacgccttcaatctgagcctgtgcggcagcattgcgcgcgctaagctcagcattctcgaatcgcgcattctccagcgaggtcttggtctcctccagctcctcgcttttgacgcctcgagccatctcctgacccttatggcgccccagcacgaagccggcgaagaggccaagccctgcaccaaccactagcacgacgatgacgataatcacggttcctatttgctcaaacatggtacctagtatgtcatcgatggtgaatgacggtaaatttttaccgaattcgacggtttcaagccgttaaacggatgctcagcagcccacattggacatttggactcatcgcagtcgagcatcaaccgttattgcgctgtgtcacacccgaacgccggatgtccttccatgatttgccagcgcgcgtcatcatgcggcagaactcgtcacgatttgacgagacgtgcgatggccgcggaagcctccgcaagtttttcatcggccacctcgccgccctggaccgacgcctgccgcacgcaatggttgagatgatcgtccagcagcaataacgccacggatttcagcgccgagttcgacgccgaaatctgtgtcagaatatcgatgcagtatttgtcatcctccaccatctgtgtgatggcgcgcacctgcccttcgatacggcgtaatcgtgcgatgaccttggccttgtcttcgtcataaccatgcatcgcaaccccctgatacttatccgtcagctgaacacaccccatcatataccctctaggggtatagggtatacactgttgttcagtgcattaggaatgggaaggaacagttatggagttcagcatcttctcgaccgccacggcgctgatagtggcggccgcattgacatggctggtcctgcggttcttcttcggaacgcagaaggcaacggccggggccatggatgcttccggcgaacgccaatccgcgacgatcaccgtcaagggcgggtactcccccgccgtggtgagcatgcgtgcgggtacgccgatcacactgaccttcgaccggcaggagaccggcgaatgcacctcgcatgtggtgtttgctgatctgggacttgacgccatgctgccgggcaacgccaccaccgacgtgaaactgccggcgttgccggcgggcgagtatccgtttgcgtgcggcatgaatatggtgcatgggttgttgagggttgagggagaggacggctcggatgagaacacgccccttcctcatcctgatgcttcgtatacggcacctaccgccgtggatgcggcggagggggagcgccgggaggcggctgaacgcgccaatgagatcaaggcgctgacgaagctggtgattgtgggcgcggtactgacgttgccggtattcgccgtcaccatgctgcatatggccaatcccacgctggtgccgcattggatggtgaacccgtggttgcaggccatcctgatcacgccggtgatgttctactgcgggcgtccgatccacacggtcggcttccccgcgttggcgcatcgctcccccgacatgaactcgctggtctcactgggcacttcggccgcctacctgtattcgctggtgacctgcatcgccccgtgggtgttcccggaaggctcgcgcgaaccgtatttcgaatcggttggcgtggtcatcaccttggtgctggtcggccgccttctggaaaccaaggcccgcgaaggcaccggcaaggcggtgcagtcgctcatcaaactgcgcccgcgcaccgcgcacaaactcaacgccacttccgcagacaatgtggacggcatcgaatggcgcaatccggcgtatttcacggacaccgacatcgacgccatcgccaccggcgacctgctggtcatcaagaacggcgagcgcgtgcccacagacggcatcatcgtggccggcgaggcgcatatcgacgaatcgatgatcaccggcgaatccaagccggtttccaaaaccgtcggcgatccggtaaccggggccaccgtgctgctcaagggcgactgcgtgatgcgcgccacccaagtcggcgcggacacggtactctcgcagatcgcggcgatggtggcccgcgcccaggcgaccaaggcgccggtgcagcagctggccgataagatcgcccggtatttcgtgccggcggtgatgatcatcgccatctggacgttcgccatctgggtgtcactgggcccggtgccgcaactggcgcatgcgctggtcaccgcggtcagcgtgctgatcatcgcctgcccgtgcgcgctgggactggccacgccgctgtcggtgacggtctcgctgggcttgggcgccaccaacggcgtgctggtcaccagcgccaaggcgctggaacaggcgcgtcgcatcggcaccgtggtgttcgacaagaccggcaccatcacgcgcggcgtggtggacgcggccgccgactgggacaagccgagctacgagcaggacacagtcaaggaaggctcgcgcgaggccatcgcggcgttgcgcgcacgcggcatccgcacggtgatgctatcgggcgacaaggccgaggtagccgggcgcatcgcccgcgaagtcggcatcgacacggtgatctgcgaggtcaagccggacggcaaggcctactggatcgccaaactgcagcgcgaacgcgacgaggccgccgccaagtccgcggatggcgcctcccgcacggccgcgcaatcccgcactctgattgcgatggtgggcgacggcatcaacgacgcccccgcgctggcccaggcggatctcggcatcgccatcggcaccggcacggacgtggcgatgcagtcggcggacgtgaccttgatgagcggcgacttgcgcggcatcatcaagaccatcaacctgtccaacgccacgatgcgcaacatccgcgagaatctggggtgggcgttcggctacaacgtcatcggcattccggtggccgccggcgcactctacccgttcaccggctggctgttgagcccgatgatcgcgggtctggcgatggcgttgagctcggtgtgcttggtgctgaacgcgaacaggctgcatggggcgaatatcaacgtgggtgctgccgatagcaccgctggctcgggcaacagcacggcggatgtcgaatcagccggatcggccgaatcagccaacgccgccaacatcaccggctccaccacatccaacgcgcctcacgagccgaccatcatcatcgacgatcgcaccacgctgaatccaaccaatcacgtatccgaccaatccaataatccaaccaacaaggagaacactatggatatgggaatgcacatgcaccacaccgcccccgcggacggcgaaaccgccaccgacccggtgtgcggcatgaccgtggcggtgaatgccgacgcgatcacgcgcgagtatgagggcaagtcctattacttctgcggcgaacactgtgccacgaacttcatgaaggccccgcaggtgttcctggagcagtagtctctgcgtttacctgattcaacgacaatggcctccgcccaaaacgagcggaggccatttgcatatatgaatcaatcaacgaatcagctggcgaagaagaacacgaacagccaagcgccgatgatggcgccgatgatcggggccacgaccgggatccaggcctcgccccagcgggaggagcccttgtgcgggatcggcagaatggcgtgcagcagacgcggcatgaggtcgcgagccgggttcaggccagggccggtcgggccacccatggaggtcacgaggccccacacaatgaagccgacgacgatggaggcggcggcgtaatcctgcttgccccaagccagggacaggcagcacagggcgccgaagacgagcaccagggtgccgaacatctcgttgaggaagtagttgaccttctggttgtccgcgtcggtggtgcagaaggtgccgagaatggcgtcggcgtcctcggtctccttgtagtgcgggtagtaggtcaggtagacgatgaactggccgagcagggcgccgagcagctgggcgacgatgtacggcagcacgtcgctccacgggaacaggccgttgacggcctgggcgatggtcatggccgggttgatgtgcgcgccggagacgctaccgaacataagcaccgggaacatgacgccgaagccgtagcccatggcgatgttcaaccagccggcgtggtgacccttggtgttcttgagctcgacgttggccacggagccgttgccgaagatcatcagaatggcggtgccgaagaactcggcggccagcttggtaaagagagagtattccactgcttcttcttttctcttcgccgcgcaacaggcatggctgactgttcacggcattctgtgtgattggaaatccgttcgcggagccggcgacgcgatttacgctgggcgcgaaagcaaacgtggcgattgtacactttgccccacgacgaaatgctggcaggatgcgatgtcgaatgtccagccgaatgcaatgcccaaaaaagccatcggaatcagccgaagcgaccttgactctcagtggttgcgaatgacgttgcgcaggggtaggacgctggtgggcgagacggacagttcgtcgattcctaggcacaggaacgtatcggtcaggctcaggtctgcgccaagctcgccgcagatgccgcaccagatgccatgacgatgggcagcctcgatagtcatctggatcatgcgcagcacagctggtgaatgcgggtcggcaaagcgttcgagactcggggtctgacggtcacaggccagcgtgtactgggtcaggtcgttggtgccgatggagaagaaatcgacttcggcggccagctcgtcggccatgatgaccgacgcaggcgtctcgatcatgacgccgatctggatactctcgttgaagtcggtgtgctcgccgcgcagctcgcttttggcttcttcaagaatccgcttggcgtcgcgcacctcctgcaccgaggtgatcatgggcagcataatggcgatattgccgtatgctgaggcgcgcaacaatgcgcgtaactggactttgaaaatctccgggcgggtcaggcagatgcggattgcccggtaaccaagcgcggggttatcctcgtggtccagattgaagtagtcgacctgtttgtccgcgccgatgtcgagtgtgcggatgatgaccggacggtcgcccatctcctgtgcgacttgtctgtatgcatcgaactgaaattcctcggtcggccagtcctcgcgttccagatacaggaactcactgcggaacaagccgatgccctcagcatcgttggccagcacggcggctacgtcagagggccggctgatgttggcgtacaggtggacccgctgaccggacttggtttcggtgggcttgcctttgagcttccgtagtaggctcaggtgttcctcagcttcggccttcctgcgctggcactcggtcagcgtggcctcgtccgggtcgacgaacaccgcaccgctggcgccgtcgattacggcaacgtgaccgtcatcagtcgggtcgaaggcgtcgccgataccggtgatggcgggcaggcccatcgtgcgcgccagaatcgcggtgtgcgagttcgctgagcccttggcggtcacgaggcccaaaaccttagcgcggtcgagctgcgcggtctcgctgggagcaagatcttgggcgaagatgatgtggctttcgccgttctgcgcaatcccgttctgcacagtaccgttctgcacagcatcgccttgtatactgccatcctgcgccgtgctatcgcgtttgccttgcagcacgttcatcacgcggcgagaaacatcctcgacatcagcggctcgagcctgcatggtcgagctatccatcgcagcgaacatggcggcgaactgttcggcgacgctcttcaccgcaaattcggcgttcaccttgtcttgcgcaatcaaaccttcgacgcatcccgcatagtccgggtcctggagcataagccgatgggcgtcgaacagctcggccttgttttcgccgaactcagcggcgacgttgtcacgcagttgcttgagctgagcgacggccatgtcacgggccgcgcggaatcgatccatctcagcctgcggatcgtcgattacgcggcgttctacagcatgatcggcggcggcgagcacgcggaccgtgccgatagcaatgccagcggatacgccgacgccctgtatcgttctcattacaggtgctccttgaggaatcgctcgaactctgcggcagcgacagcttcatcgttgccctgcacccgaaccgtaacctcgtcaccttgttgaacatcaagtcccataacaccgaagatacgcttggcatccacggatttgccgccgtaggcaacggtgatgttcgactcatattcccgcgctttggcaaccaaccggccagctgggcgggcgtgcatgccttcggggtcggatacggtgaacgcgaatatctgagacatgacgccgctccttacacgtccggccgtcacgcgcgaagacggcctttccgcaccagctacggactgatgctggaaaaaacaaaaaaccggaatctttcgattccggttgtctgtgcccccgcagggattcgaaccctggacacgctgattaagagtcagctgctctaaccaactgagctacaggggcttggttagatgttgaagtgttccttgcaacaggtgataaatatactcagatttgaagcgaatgcaactctcggcgtgtcgcgtctatttccggcgtttttgctaatacaaaaatcccccatgcggcgcgaaccgcacgggggatgatgcttaagctcagactcttggtctgtgtgattccagcactaggccggaatgactcactcggccacgaccttcacgaagaaggaagcggtgatctccgggtggagggccaccttggcggggaaatcgccggtggtcttgatggtctcgacctcgatggccttcgggttcaccgcggccttgtcggacagagcgatggcgatggcctcgttggagataccaccgaacagcttgccggactcggacaccttggcggcgatctcgacggtggtgccctcgatggcggccttggcggcgacggcgtcctcgcgggtggcgacggccttggccagacgagcgcgcttcatagcggtgatctgagcctcagcacccttggtccacgcgaaagcgaggccctgcgggaacaggtagttgcgggcgtagccggccttcacgtcgacaacgtcaccggagtggcccaggttggacacggtcttggtgagaataaccttggtttcagccattgttcaaagcctccctaactcagcgacccgaagtggcgtacggcagcagggccatctcgcgggcgttcttgatcgccttggagagctcacgctgctcctgcacggtcacgccggtgatacgacgggaacggatcttgccgcgatcggaaatgaacttgcgcagcagcgcgacgtccttgtaatcgatctcggtgaccttggcggccttcagcgggttcggcttcttcttgaacggcttgaccggcggttgcggcctcttacgtgacatgatgttctccttataaatcttgatattgattgctgctggcagcggggaggtaagtactgatcagaactccgggtcggaatcgtcgccgccgccgaaatcggaggaagcgccgaacgtggagaagctaccggcatcagatgcaccggcattgctccacgggtcggccgcaggagcggacgggttggcgggagcggcaggctgctgggagtatccagcgccaccaccctgatagccaccgttgtaaccgccctggccaccggcataaccaccttggccaccctggttgccatagccctgattgggttgctgaccactctggaaaccaccggaacgaccttggaagccgccctgaccggacgactggcgggtcacctgtgcggtggcgtagcgcagggagggcccgatttcatcgagctgcatctccacgacggttcgctgggaaccatcctgtgcctgataggaacgctgctggaggcggccggtggcaatcacgcgcatgcccttcttcagggactgggcgcagtggtcggccaggtcacgccaagcggagcacctcatgaacagcgcctgaccatcctcgaactggttggtctgacgattccaggttcgcggggtggaagcaatcgtgaagctcgccacggtcgcgccgctgccaatagtgcgcagctcggggtccgcagtgaggttgcccacgatggtgatgacggtttcgcctgccataacggtccttcttacttaccttgaataccagctgttcagctgactaaacgcttgattcagcccttacgaaggatcttcgtacggatcacggattcgttgaggttcagaacacggtcgagctcatcgctggtagcgggctcggcggtgtacttcaccacgacgtagttgccttcggtcttaccggcaatctcataggcgagcttgcgacggccccagtaatcgggctcatcgaaagagccgccttccttggtgacgagttccagatactgctcggtcagcttcttcagaccgcgctcatccagctcaggatcggcgatgaacatcagttcgtacttgtgcgcagacatcacccacctccttcggactattcggccacggacgttccgtggcaggagtgtgtatgcgtgttaatcatagggcgatgcagatgcacttcgccctgtgagcaacttacctatcttatggtcagggcgggacagtgccgcatgttcatcaacgattgcagcactcttacaacacagccccacttcacggcacgcgctgcggtggggtgctagtacactggttaaggctaaaaacactgcaacacaaaaggatgcgaaagcatgtcggcgattcttgaaggcactccggataaacgactcgtattggtcacgggccgcgcctaccccgagctagctgagaaggtggccgaatgtttgggaaccgaaatcctcgaaaccacgtcctatgactttgccaatggcgagatgtacgtgcgtttcaccgaaccggtgcgtggtgcggacgtgttcgtgctgcagtgtcattcgggcgatatcaacaagtggatcatggaacagctcatcatgatcgacgctttgaagcgcgcctccgccaagtcgattaccgtggtggcgcccttcctcggctactcgcgccaggataagaagcaccgcggtcgtgagcccatcaccgcccgtctgattttcgatctgttccacgccgccggtgcagaccgcattatgacggtcgatctgcacgccgctcaggagcagggtttcttcgatggtccggtcgatcatctaaccgccatgccggtgctgctcgattacgtgcgttccacccttgatctgggcaacaccaccatcgtgtccccggatgccggccgtatcaaggtgtccgaacagtgggccgccaagctaggcaatctgccgctggcattcatccacaaacagcgtgatattactcgtccgaaccatgccgaggcacatggcattatcggcgatgtcgacggccgcgactgcgtggtcatcgacgacatggtcgataccgccggtactatctgcgaagccgtgcgcaccctgaacgaatccggcgccaagtcggtgacgctggtcgccacccatggcctgctctccggcccggccgtggagcgcctgtctcactgcggcgcgcatgaaatcgtgtttatggacaccgtgccgattcccgaagagaagcgcctgccgaatatgaccgtactgtcttgcgcaccgctgctggccgcgggtattcgctccgtgttcgaggaaggttccgtggcgattctgctcgacggcctgcccgaggacatgcgtccgcgcaatatctatgcgtgattgatacgccgaaaatccttacgaaaaaacgccgcttggctattgatcaagcggcgttttttcgtatagctccaatcagatgaaagcgcgctcgccgaagatggcggtgccgacgcgcacgatggtggagccttcttcgatggcgtaggtcatgtcgtgggtcatgcccatggacagttcggtgcagtcggccgtgccttcggcaccggaggcaataatctggtcgcgcgtgcggcgcagatgcgcgaagcccgcacgaatcgtgcgctcatcatccacatgggcgccaatggtcatcaatccctgcaagcgcagtccgcccatcgcaccgatgcgctgggccaagtcgatggcgtggctgggtgcacagccggacttcgattcctcgccggattcgttcacctccagcaacacgccgaccgtgatgccgcgcatggtggcacgacgggcgatcttctcggccaactcaatagaatccaccgattcgatggcgtccactaccggcagcactttactgattttgttagcctgcaattggccgatgagatggaaaggaatatgcgttgcagctgcggcattggccgtgtcagcctcagcggcatcaatcacgcctagcgaataaccacgctcccccagtcgttttgccagaccgtcagccttgacagtaatctcctgtggacgattctcaccaatcacgcgaataccagcatcaatagccgccagaatctcgccgacatcgcgcgtcttggtggcagccagcaattggaccgaaccggcagcacgcccggctgcggactccgctgaggcaatccggtcaagcacgcgatgcacaccatcagtaatctcttgtgcgcgcgcctgatcgataacttcgttggcgagatccttatggtccatgtatgccgtcattgctgcccctgttcgtagattccccaccatcgtagtctcatacgcgcacataatgcttgttattgaacaaaagtgaagcccccgctgttcatgcgcgggggcttggtgatgctaggccgagcgagtgggactagcaggtaccggacttgcggcgcttgaggatgattacacccgcaacagcaagtaccacggcgaggatgccaacaccaagcacggctgcaccggtgtcaggtatcttcttgtgcttgccggagtctgcatcacccttgttctggttggaatcgttgccttggttgggcttgtccgtgccggaaccgggcttatcgccaccctggccaggcttcgtggtgctcttctcaaccagacccgcgatggcatcgctgattgcctcagtcgcagcctgtacgtcagactgggcggcctgaccatcactcgtcagcgcattcgccgtagcgactgccgaatcaagcacggccagcgattcatcagtccactttgtgcgatccacggcagcagcggcatcgagctgagcgctcagcgcggcacgatcttgcaccgtagctacaagcaccagcttcttcgctgcctgcttcagctgggttgcggcatccaccaccgcagcttcggtggcatcctcagccttatacacctgctgcgccgaatccaataccgccgcgtactccgcccatgaagtctcggtgtacttggaggcatcgtcagccttaggcgagtcagcgagcgcctgcttgagctcggtcttgtcgattggtgtgggctcaggcggctcaggcgtactgtcgtcaatggcatgaacctgccattcggcaacagccggagaagccgagccggacgtgataaccatacgcaacttggtagtcttgaccggagtgttccacgtgccatcagaccaccccttggcatcgccggtggcccagccagcagacggtgaattggcggtcacagtgtaggtggcgtcgggaatatccacgaagttgccggcaccgttgttcgccaaggcgtcccagtactgcaattcccacgatgccggaatacccaatccgccatcatccgaggtgaattgcacgcggctagagtcgatagtcacttcacggtcccactcgtagtcgaggcgcatctcaccggtgttgggccaagtgccccagacatcctcgttggcaatggtgatatcgggaatgatcttgccgtcgttcaacgcagcggcacccttgacccagccggatgccttgccgtccacatcggtggcggtggcatcgccctcaatgtagccggtcagcggcacggaagtgtcggatggaatgtcggttttcgccgaagcggacacgttgccggccttatcggtggcgcggtagtacacggtggcgcgcgacgcgctcggtgcagcaatcggcttgctgtacgtggcccattgaccgtctgtgccaatgcggtattcaattgatgcgacaccggaaccggtgccgtcatcagcggtcaaggtcagcgtgcgctcctccttatcggcggcggcggtcacggttggcgcggcggagtccaccttgccgccggccttggccacgtcggaaacgttgccggcctgatcggtggcgcgagcccacacttcgacatcgccctgctgggaaagcgtggcaatggccgcgtttgcattcgcggcgatggtggtccagctcttgccttgatcagcggaaatctccagcttggcgataggtgcggtgtcgtccgtggcctgcacggtggcgaacggagcggtggtgagccactcgctattgcctgcgttagcagtaacggcaacggttacagtcggcttcgtggtatcagcggcaggctggtagccgtcctgcacggtgacatttaccgacacattgccctgctcgcttgcctcaccgggcacgccggcgaccacgccgtaggccgtaaacgaaccgaccttggcatacgaggaagcatcaactggacgccaaattactggggaggcaacggttgggttcccgtacttcacatccactgtggccggcagagtaggcgcagtaccggtggcggtggtcacgctcttcggcgcagtgattgccggcgattcgctggagtcggagccgacttcccattcagcaacggccacggaggcatagccgccatccacagcttgaccggtcatgtcgagctttaaggcagtagtggtcaccgcatcgaaggtgacggcgttggggttggccttgcctgtggtcgttgtataggcactcgggttggtgacatccttccatgtgccgtccgcgtccaagtactgaatcttccacgaggcgggcgcgcgcagagcgttggaatccacgtcgaaccaaaccttagacgagttgacgcgcacagtgccatcccattggtagaccagagaatcgccggactgcgattgcgggatagaacggtagttggtccagtgattcggcgggaccacagcggtttgcaacacacggccgtcgttcaccgaacccttccaagcaggcgtttcagtgaacgtggcgctcacctttgcgtacggagccacgttggtggagggctgcgttttctcggccttggttggatgggcggtggaaaccatctggccgtcggcggtccaatcgacttcatcaatgcacacggcacggcggaaatcggtgccgccttccttgtcgccggtgtgataggtcacataccatttgtcgccgaactggagcaccgaggggtgcatcgtggtggccgagccagaaggcacgattacgccttggtacttccatgggccgagcgggctgtcggaagtggagtactggatgcaagcttgatagttcgattccacgcaggtggccgtgcccgaaccgggcttaccgccgtcgtacacgttgtaataggtatcgcccttacggaacacccacgccgcctcgaagaatcccttcgggccgttcgcgttgctgtccgcgtccttcatggtgtggaggttcggcgtggtgccatcagccttggtttccacctcggtgtatgaggtgcggccggttgtggcgtccttcttcatcttgatggcgagctgagtgccgaacgtaccaaagtgcaaatatccggtgccatcctcgtccacaaagaatgccggatcgatggtttcaatctgggtttgcgatgtggtgagcagcggcttgccgatggcatccttccacgggccgagcggactcttcgacttggccacgccgatggcgaacgggtcctgtccagccgcctcagaagccttgtccttcaccggcacgtagtagtagaaccaatcatcggaagtgtcgctcggggtgccgttatcgtcggctacgacttggccggcgtacgcgccatcgccggtggcccagctgaacaggtctgccttggcgatggtcttgtaatgtgtccatttgccttgattcaggccgtcttcatcggtgacgtatacgccccagtccttcatgttgaaggagccgtagtcgggcgaggcctcatcgtgaccggtgaagacgaagagtttgccgtcatagctcagcgcggatgcatctgcagagtagtagttctgcgaaagatcgttcggggtgtcaataccctcgttctgcccgatggggttgcgcatgtagctgggcagtgcgctattgtcgatttgggtgacggtgacatcaggattgttatacggcagttcgttatacgcgtgaccggcaacgctgggcgcgttgtcagcggtggctgaatcggcggccattgcggtcggcgcaagggcaaggcctgacagcaatgtcgctgcggcgacgagtccaccggccaccgcgcgaaccgattgcgcggatacatggaaactcatagtgctcctcattgagtgagtgaaaagagtaatgatgggtagaaggaaaaggctagagccccctctgtgagggggctcactcggcagaatgactccgttgcgggtcaggccgagtggcgagccgaaccgtggtcgccggactggcgacgcttcaggatggtcacgcctgcggcggtgagcagcacggcagccgcagcaactacggaaaccgcggcaccagtcggaggcacacgatcacccttgttgtccttatcatccttatcagtgtcggtcacaccaggctgctgggagccgggcttctgctcaaccttggtggcccaaaatgccttgtcaagggcatcctgtgcggcatcgacatcggcctgcttggcatccttgtcgtcgtacaccttctgagcggcggcaatctggctctgcagagcctgccatgcctcctcggtgtacttcgacttgtcagccttcttggcctgctcgatggaagcctcgagggactccttcttcaccgtttcggcggcgggcttctcttccaaggccttgacggccttgttcagcgaagcggacgcttcctggacggcggcctgagtgacctcaccgacctcaccgaccttgagcacaccttccgcagcctcgatggccttgttcaaggcctcgacactcttatccgtgtacttgccggaagcggcctcggctttggccgcatcgatggccgcctgcaacgtggacttctccacgtcggtggcgagcgcaacgagtgccttctggccgtcctcgagcttggtcacctgctcggcgacctgttctgcggtggcgttggcatcgtcgtacacagcctgggcagcgtcaatgatttgctggaactcagcccatgaagcggcggtgtagcggcttgcatcgaggccgttggctgtgtcaagagccgactcgagcgcggtcttgtcgaccggggtaggttcaggctcggtgccgtcaataccatgcacgccccactcggccacggcggccccgaaggtgctgctgccggtgtgcggagtgagcacgagtcgcagcgacttggtggcgaccggcttgaaggtcacagtgctccaacctttggcatcggtatccgcacgagaagccggcgagttacgcacaatggtgtaatcctcggtgggctcgacatccttccaagaaccatcctcggcgaggtactgaatcttccaagcgtccgggacttccagaccacccttcgaatcgtcagtctcagcgaagttggcccagaactgggcgcggctctggtcaacggtcacggactgaccgaagtcgtactgggcgtacatgccgtcctttgccttgccccaagaaccccagaccttgtcgttgacgttctgatcatccgtggtcggccaagtatcatcgacgactacgccgtcgttgagcttgccttcggccggtgaccaggtcgcctcggaatcaggcgaaatggtggtcttggtcgccttgccttcaatccaaccgaccaacggctcaggctcaggctcaggagtggaggaaccgttcgggtcggcaaccacgtggacagtgagcttggcagctgcggaagacgaaccgtcgtcgacggtaccagccacctcgtagtcaccaaccttggtcaggtcgatggccttgatgtcggcatccttccacgtgaccttgcggtcgtcgttgtatccgttcgggaacttcaccggaaccgtggcgggcaggtcgatggacttggcgttctggtagacggtctgctcaaccggctgcgcattacccacggtctgcaatgcggtatcggaacgagctgcgatgtgtgcaaccgtaccgctcagcgcaccagcgacgatgcccttgacatcgaatacggcatcggcggccagctgagcgtcggtcaccttatcccacgtgacggcgaggtcacggcgagaaccgtcggtgtatacggcgctcacggtggagggcagcttcagatcatcggccttggaaccggtctgcaccagtcggttgacttcgtccacgctcaccggctcgatggcgtacgcctcgaactcggaagcacccacgatggcgcccttcgggaagaccacgcgcagcttgtcggtttcgacggtgtcggcgaacttcacttcgttgccttcgttctgattgaccgtgtaggactggccgtcagccagcttcacatcctgccagttaccgtcagcgtcagcgtactggagcttccaagatgaggccatcggcacgccaccgccatcggtccagaagaagaccttggccttcttcagtggcaccttgccggcccacttcagttgcagccacggctccacaccagtgttgtcgccccagttgttccaggtctcgttcggcgtgttggtgtataccacctgaccgtcgatgaccttcttggcgttgtccttcggctggtagccgttggtgtagctggcagaggcgctcgactgcggggctacgttcacggtaccgtcagaggggatgccgtgaacggtgatttccttggagccttccttctcgccatcggaagcggtgagcttcagaacgtagtcgccttccttgttgaaggtgacggtggtgctggcagcagtatcgtccacgaacttcgcggtaccgccctcggggccggaaaccagctcccacttggtggtgacgtcgccttctgcgggcagaccgtcatccttcaccgtaccgacgagcttggcaccggatgaggtgctggaagacacgtaagcatccacctgcggagcctggttctcggaagtgccgtcagccttgataccggtgttgtaggcttcgatctccttgacaccgacggccatgccggcctgcggcgtgaaggtgacgcggatagtcgtggtctccaccggagtgaactggatacggttgtagttcgcgcccgcgtagttcggggtgcgcacctgatccgcaatcggggcccatgtgccgtcatccttctggtactccaacttgtagttggcgggctcggcatagccggagatggtctggctggacgagctctggtagaagtacaagcggaggtcgtcgatcttctgcttgccgtccttgaacttgatattgagcgtgtcggtcttgttctcagaacccttggtaccccagaacgattccatcacggtcttgccgtccaccgcgttcttggccgggtagttggtgtccttctcggcgtaggtggtaccggtcacgtccgcgtccttggccacattcgtggtggacttggaagcggagtcgacgttggcaccggacttggcgaacaggtcggtcacacgctggtcggcggtgaaggcaacctggttggcggccttgatatcagaaccagcggcattggtgatggttacgccggccttgtcggcatcctcaacggtgcccgtggacggatcgtaaatgaggtgtgcgagcttgtcggaagtgaaggcgagcttgccccccacgtacaggctgtagccagcaggtccaccatagtggctgccgtccttatcccacacgatggaaacatcttgaccgtggtagctcaggttgttcaccgtgaagtagttccagccggggatctcaatcgggttcagctcaatcttgttatcctcgcgcggcaccataccggctacgtcctcgaccatcgtccagttcgtggtgccgagctgggtgtggtggatccaggagcggtaggtgatcttgccgccgttctgtgcggcgtcaaggttcttgtcgaggttgttgatcacgccgtcaccgtttacatcgccgacgttgttgttatcctcgttccagaactcgttttgatcaaggtagttgttatcgccgccctgatagtgcgcgaacgccacccagtacagcagtttcttgaactgctcattggtgatgtaaccgttcttggctgcatcgtaattgcggatgccggctgaatagacctgcagcagcggctgtgcgttgataatggagaagttgttggaaccggggaagttcagcgccgccttgtccgcctggttggcggtgaagaacgggaagatcgggaactcgttggaatcctcgaacaggcgcagagccttgttgtaatcttcgttgccggtaggcatcaggccttcggagtacgggtagtagttattgatctccttgtacttggcgaaagcaccgtcgttcagccacttgtgcttgagcaggttgtcggacttgtcccacagttcagtggtgacttctttctggatcttgtcggcgatggcctgcatcttctcggcgttggcggtatcgccagcggccttgtaggcctgagcagccgcattggcgttggcccacatattggcggaaccatcggcgcgatccatgcgctggccggagcgacccggctcagagaaggaaacggcgtcggcatcgttaccggtcatcgaccaccaggaccagtcaatcaagctgttgtcattgttgttctggttgtcgttgttgtccggctcgctcttggaagcgagtagaccttgcacgtcctcggcaccctggtcggccagctcctcggccacggtggacggaccgccgtgcaccttgttggagtcccagccggcgcgcgtgatgtactgcgtgtagctatggttccagttggccgggtcgcccggattgtcgtggtagtagtaatagcccgccttgctcttcttggcggtatcgccggcggaaagccaggtgccgtaggagtactcggggttgcggaaccacttggtgtccatcatgaacatgccggaggtgagcacgatttggttgttgtagccgagcacaccctcgatggaggtcgggtactggaaggtgttgccaggcatgttggcgtcgagcatgttgaaacggctcagccaccagcggtagaccacggtcttatcgatattgtcttccggagtgtccacgtagggagcgttatcgacccaccacttgttgtaggtggtcacggaatccttgtaggaggcggcagcatccttaaggtcgccggtgtaacgggcctcatattccttggtggagtcaggcagttcgttggcgatcaggccgagctgaatcttgacggtctgcggttcgttggccttgaggctcaacgtgctggtgagtttgccaccgctgacgatccagttggaaccgtcctggttgttggcggagaagcgcggatagatggtcgtcaggttgttcttgacgttcacgcggccagtaagttcggtggcaccatcagcaccctcggcggcgaacggcgaggccgtggtcagtgtgacatcgcggtcctgcgtgctttccacggtgaggttcgcaaccatcacgttgttgtaggtgatgtacttgacttccttgatcttgaggctcttgccaccggtctggaacagggaggtgaagtagctcggcgtctgcttgcgctgggaggcgtcttcgttaagggtctggtttgatccatcagcgtttacggtaacggtgaagccgctcctgctggtctggtcccagtaggcggtatcacccacaaaaccgagctgattaggcgtgtgcgtgtacatgtaggcggcgcgaccacgggtgaacaggtagttgttgccgtcggagccttcatacgagtaagcacccttgtcgttcgtgcctttaccagttggctgtgcaccagtacgggtgagaatcttatcgatccagaagtcatggtcggtgtcgatgccggccaggttcttcacgtcgttatcgaatgtctcctgcagatagctgacggcagggttatatgtggtgttgttcgccgccgtcttcatcggatcatcagatcccttgaacgacggatatgccacatccgcattcttgatgacgggcgcatcggctgcctgcgcggtgactgcaccgccggtggccagtgtggcgaccgctgcaaccgcgccgattgacgcaagccaccgctttcgtgttgattgatgcattcctgcttggacctctccgccccggtctttcgcgtcttcgctcaggctacgtcgcatctatgagaccaggacttcttctgtggatgctgggccgcagagcccgttctccgtcagtttcctttattggctattgggttcaccggaatgagtatcttcagtgaatctggtgtgatatccgccatggatatcacggttggagcaattcaccgaagctgattccacatcataactgagcgaatacggtttcgcaactttccctcagcgatatcaaccatcttatacaacaaaaacccggcaatttctcagttttcgcatttactttcgcattagagcattgctgcgtttcgccgtgtcgcagtacctacggcgcgccgattcagcctcgctgaatcaggaaccaacaggctcccgctggcgggagctggctcgcaaagcgagactgagggtggcttacacggtaccgcttatgaccaccctcagtcgactccgccgacagctctcacagcgggagcatataattaaaaatctcctgcacgggtattaccccacacaggagacctcattccccggatgtgttttcggctccaatcgatactgacatccggcctatgccgtcatcgacttattgcagacgatggcggcataagtattattttgccggccagttgcgcgcaggccggcatatcgccgatatttatcgacgctggaagacacgcatctcgcctatctcgcggttggcccacgagtagtacggcaccaagcgcagcgtcgcgggctcacccgcacgcggttcgtcggcatccacgtacagcggcgcgtcatcctcgtcggcgtgctcgcgcactgccggcaaatcaacggtatcgactccacccagcaagtcggcctggaaagccacagcggcatccgcaccggtgacgccatcggccagacgatagttccacaaatcaccgggattatcgacctgttcggcgcagtagaccagcggtccgcgcatcacggccacctgaccggcatcggagcgcacgcgggagttggcgcgcacgaacttcacggacatgtcgagctcgagcgcaatctccaacgtatcgccggcgttgaccacaaggtatacgaagccgtcttccagcgaacccactgcgggcttgccgttcacggtcagcgtgtaggagccccgcgaccagccggggatgcgcagtccgaaacggaccgagctgtcagtggcgctggcgggcaggctcaccgtgtattccacatggccatcccacgggaagttcgaacgctgctcgaccgtcaggccggaagcgaattcggctgtgttggcgatgaactggtggctcagcacggtcttgccgccgtcgcgctcggtgtagatgtagcggtccacggaggcgatgagtcgggcgatgttggccgggcagcaggcgcagccgaaccagtcgacgcggtgggagagcacgtggtgacggtccgggttatccagtccgtcaggcgtggtctccagtgcattgacgtagtagtactgcttgccgtcgagcgagatgccggcaatggaaccgttgaacagttccttctccagcacgtcggcgtattcgcccttgggctcgaggtcgagcatctgctgggcgaacatgctcatagccacggaagcacaggtctcaccgtacatcgtgtcgttcggcagatcatagtcgtaggtgaacgactcgcccacgtgggtggaaccaatcgcgccggtgacatacatacgacgggtgacgatgttcttccagaaacgcttggcggtgtcgatcagtccccgatcgccgagcagtcggcccacatgggccacaccagtgcacaggtagccgacgcgcacggcgtggccatccgcggtctgctggtcgcgcacaggttcggcggcctggaagtaggtgggcttgtagaagccgaggtcggggaagatgttgtcgccgttcagggccttcagctgcttggtgtagaactgagggtcttggccgcgcacgtcgatgaggtattgggagagcgtcaggtaacgcttttcgccggtttcctcgtacagtttggcgagggcgagttcgatttccgggtggccgtcggcgccatgaatcttgccttcttcgggcccgaagttggcatccaggcagtcggccatcttcttggcgacttcaagggcctgctcgttgccggtcacctgatggtaggcgacggcggcttcgatgtagtgacccatcacatacatctcgtggctttgctgaatcaggctgaagcgcgggcggtcggcccatacgccggacttgatctggtacggagtgtccaagtagccgtccggctgctgagcgcgggcgatgagatcgaccgtgcgatcgcacagcgccttgagttcgggatccggatggtaggccagcgcataagcggcttcctcaagccacttgtagacgtcggaatcctggaacaccatgccgtggaattcgtcgtccaattcgccggcggcaaccttcagattggcgaccgcgtggcttttgctgtcagccagctggttaccggccgggtcgtcgggcactgtggtgtcgatttcgtcgttcatcacgccccactggtaggggatgacggattcgacaatctggtcgcgacgccgcttccagaacggggaagtgattgtaacgttcatgatcagcccttcacggctccagccataaagcccttgacgtagtacttctggagtgcgaggaacaggatggcgcagggaatcagcaggatcacgacgccggcctcagtggcaccgtagtcgataacacccatggtctgctgacgcatgttcaccatcgccagcggcagggtggacttggacgaagagctcaagtacagcggaatcatgaagttgttccatgcttcaaggaaggcgagcaggccgaccgtaaccatcgaaggcttgaccacaggcaccagaatcttgaacaaggcctggaggctgttgcagccgtcgaccatggcggcctcttccatgtccttcgggatcgcgtcaaatgcgttacgcatgatgaacgtgctcataggcagctggaacagggtgatgactaggccgacgcccagcaggctgtcgttcagaccgatgtccttgtaccagaccatcagcgggatcagcagcgaggcgtacggcaccatcaggatggacaaggtgaccatgaagccgaggttacggcccgggtagtcgaagcgggagaacgagtagccggccagtgtgcagacgaccacggagaacacgaccgcgaccagggtcacgattatcgagttgaacaggtacttgggcagaccttcctgataaccgaacagggtcaggtagttggccacgccccagcccttggactgggccgaaccggcctgcgggctgaacgagcagatgatgacccagaccagcgggctgatgaagatgatggcgagcagagcctcaaggattcgagcgatgacgcgcttccacaatggggtagtcataatgtgttacctcccctttctcacttggtgttgtcgcgcatgccgcgcatctggatggagttgatgatgaccagggccaccagcacgatcagcgagagcgccgcggccatacccagatccttcttggaatcgaaggcgaagttgtagatgagctgcaccacggtcatggtggagttgttcggaccacccttggtcagaatgaagaactgatcgaaggcgaggatcgagccggtcacgcagtagaccaggcacatcacgatggtcggcttcatcagcggcagggtgatcgagcggaagatacgccaggaaccggcaccgtccatgcgggccgcctcgtacagatcgccggggatggcctgcagaccgatcatcatcagcagcatgtagtagcccgagaatcgccagacaatcacgataatcgtggcccacagggccgactggccggtggccagcaccgaaccgccctcctgcatcaggcccaacgagctcagaatcttggtgacagggcccacctgcggggaatacagtgcgtagaacagcagggacgcggacgccaggcccgtcgcggacggcagcaggaagcaggtacgcagcacgttgttccacttcgagctctcctgcacgatcatggccatgcccaggcccaggaccagcaggaagaccgtgacgatcacggtgtactccaacgtgaaccagatcgagggccagaacaatttgttctcgaacaccttgacgaagttgtccgggaagttcacgccgcggttgccgcccagcaggctccaacgcgagcaggccatcaccaccagcagcacgatcggcacgaagaacaggacgacgatcatcaaccagtccggcagcgagtacaacaggccgcgacgcgtctcggccgccttcgccttggacttatgcacgggcaccgccccggcgctcttggaaacactcgacatgtttctctctcctttggggaataactgtgaaatggtaatcacggaatccgaatgcaatccgatgtcagggcttcgaggaaggaggactccgaagccccgccaacacaccgcattcaagaggtatgtaatgatgaaggaagaaaaggaatgaagaagaagatagaagttcaattatgtggttgagccggcccctgccctcacaaggaagggaccggctcaatctgttcagttgttattcagttattgctgtgatttgatgagcgatggtgaggagcatcaccaccgaatcactgggcagacaggacgtcggtgacggccttgttgtcggccttgaggtcaccggaaccccacacggcgttctgcacgagcagctgccacggggagccagcggcgttgaaggcttcattgaaggccggggacttcggggtctggccgttgccgtcgatgatcacggagttgatggtctggatgcgcgggtcagcgtcgttgtaagcggtcttcagggtctggatgttggaggcggtgtcgccccggtcagcgaaaacttccttctgagtgtcagactgcatcagccagtagaggaagttccaggcctgagcaacgtgcttggagtccttggagatacccatggcatcgccaccgaggaacgtggaggtcttgccttccttggtgcccgggatcggagcgacgccgacctcgaagcctccgtccttctcagcatcgaacagagcagtggtggaggtgttcgggtaaggcatgacaccgatcttgccgttcgcgaacggagcggtccaagtggcaccggtctcttccttggagcctgcgcccaaaccgttggtggtgttggccagttccttgtaagcgtccagaacgcccttcatggagtcgttgtccagagtggcctcggagccatccttgttcataacggattcaccgtcagcccacacggacgggaagaggtcgaagaccagagcaccaccggactgaccggcgaggtaggaaccggcaacgccatccttgttgagggcggcgaccttcttggcctgctcggtgaactcagcgatggacttcgggccctgctccgggtccaggccagcttccttgtacagggccttgttccagaccatcacggaaacatcggtgatgaacggcagggtgtactcggtgccgtccacggtgccggcctcaatgtggccctgctgcaggtcggccttgttgtccagaccgtcgatctgcttggtgatgtcagtgaagatgccctcggaagcccagtacggaatacggaccacgtcgccggcgaggatgtcaggcagagagtcggtctgcgaagcaccgccgaccttgccttccatatcgtcgttcgggatgatctcgagcttgacctggttcttgtggctcttgttgtaagcctcgaccacgttcttggcctgacgctccagcggggaacgggtccacagggtgatctcggtgccatcgtcggtgcccttggccgggatgccttcggcggtggcggtaccgccattgccggagccaccacaggcggccagcggaacaatcaacgcggcggcagcgatgccagcaagagtacgggtcagtttattgaaagacaccatgttcgcttctttctctatttatccgctcaactatgagaggcggtggcggacggtccgcctccttggtcttcgccctgctcgctcctttgctcggaacaggtaacactgcgaaagccttttctcaatataaacgaacatcgccatttttgcaaaaacgctttcgcactttcgcatattttcgcatatcaaacaggtttgatatgcatcttgcgcgattgtttgactcaaacaaacacttatttttagcgctttcttacggcgtgtcgccaaaagccaacatattcgaacgtgaacacaacgctttctttcattctcttttcaatcgcacaaaaatgatcactgcgccacgccaaaaaatagacttgcgaaagttttcgcgtcatgtctacaatagaaaacaatacaaaggggtatcggtacaatcactactttcgcacgaaagagtgcagcaatatactgctgagaaagaaacgaggaatcgaggcattatggcccagacattgaccggacgcgcggcacggctcgaagacgttgccgctttggcgggagtctctttggccactgcgtccaaggcactgcacaacaagccccgcattagcgaagaaaccaagcagcgcgttctggacgccgcccgccagctcaactactcccccaacaaactcgcccaatccctggcccgcggcaccaccggcactatcggcctggtcacctccgatctgcagggccgtttctccacaccgattcttatcggcgcagagaacgagttgcgagcacaatcgacctcagtattgttggccaacgctcgtggcgacgccgcgctggaacgtcagcatgtcaagaaactgctgtccctcaaggtcgacggcctgctcatcgtgcagtgcgaaaccaacccccggcccacgcttggccatgactggggcgtgccactggtctacgtctacggcccctccaccgatatcgaagattgttcggtcacctgtgacaatgtggacgccgggcgcatggccatcaaccatctcatctcttgtggtcgccggcacattgccattatcggtggcgacgaaacctataccgccgccaccgaccgcaccaagggtgcggtcgaggcactggccgagctgggcatcgaaccggccgggccaatccggtacggcaagtgggacgaaggttggggccgcgccgccacccgtctgctgctcgatcagggcgtcacgttcgacgccgtggtctgtcaaaacgaccagctggccagaggctgcattgatgcgctcaagcagcagggcctgcgcattccggatgatgtcgctgttatcggccatgacaactggtctgtgctgacctccagctcgaggcccgcactgacgtcgatcgacaatgaaaccgagaccatcggccgccgcgcggcacgatacttggtcgatgccatcgaaggcaacccccatcacggtgtcaactacgtaccctgccgccttatccagcgcgaatccaccctcccgctggactgatatcaatcgataccctaccgcttcttggttttgcggccctttaagtagatgtcgatgacgatccatacgccaagggcgaaggccacgacgtagcccatgaagccgatgaccggaatgccgaagataatcggcttcatgccggcgtagtagacaatcgacgagccaacgaacaaaccgaccacaatcagggccatcgtcagacgattcgccatatccgaaagcagctggaacggctcttcggagccgaccagttccatgttgacgcgcaactgaccacgggtcagcatacgggccacggtcttgagttcggtcatggtgccgagcgtggcatgcaaagcctgatgcccctcaacgcccagcgacttgatctcgtctttggtggcgttcttcagcgatttcgacgtggcgatatggtcggaaatgatttcgatcatattcacatcaggaatgaactcgtccagcaagccttcgagcgtaaccaacgcgcggccgacggtggtcaccgtactgggcacctcgatgttgtggcggccggccatctgcgtcagcgcggtcaggaaggcggcgatgtccagttcggccagatccacggtgccgaattccttgacgatcacgtccagatcggccaatagcgcgggatagtcctccggatcggcctcggtgccggcaaatcgcagcagcccctcggccagagcgggcgaatcctgtttggcgacggcgaaaatcatttctttgaggactgcacgggtgcgctggtcgagccgaccggtcataccgaggtcgataagtacgatctggccgccccggatgaggatattgccgggatgtgggtcggcgtggaagaagccgtcgtcgagaatctgcgtggcgtaattgtcgacgagcttggtgccgatctccttcaagtcataaccggcgtcgatgagctggcccgggtgggagacggagatgccgtcgatgtactccatgaccaccacatgctcggtgcacagttcggcgtacaccgtcgggcagtccatgtatttgaatcgggcggcgaaacgcttgaattcggcgagattgcgggcctcgatcagaaagtcagtctccgattcgaaggtgtcccacagctcctcgaccacgcccttcaggtccacgatctgtgaggtgcgaatcaccttagtggcggccttggctatggagcgcatgatggagacgtcctgggccatgatttcgcgcacacccgggcgctgcactttaatggccacatcttcgccggttttcagcgtggcgcgatgcacttgcgccagtgaagcagagcccaacggcttgggatcgatatgcgcgaacacctcgtcggcgggacgcccgtattcggcggcaagcacatccaacaccgtggaatacggcatcgggtcggcgtcggcgcgcagtttggcgagttcgtcgcagaagctttgcggcagaatctcggagcgcatcgacagaatctggcccactttgacgaacgtggggccgagcgcctcgaacatgaggcgcatcttgaccggagtcaggccgtgcagcacgtcgaattgctcgacgattctggtgatctgccccagtcgtttgatcttgccacggcgcgtcagatggtagcgcgtggcgaaatcgttcctgcgtccgaacagtgccagcgtttcgtcggatacgctcggagtcgccttggtaacggtccgcttgagcgtgtccggcgtgtcgacggaccggttcgccgccgcctcacgttcggctttcgcaggcgtcagaatagggtcgaccctgctggaaagcggggtcgactctgattccggcgtagtgcgtgtgggcttggtcactcggccttgccctcgtcggcgggcttgtcggcggcactggtgtcggctgcggcagcagctttgtcgccggcttcggcggcggccttcttggcgtcatccaccgtctcgctcaccttgcgcttgagctcggtgttcagcgccttgccctgctcgaccgtaatctcacccttcttgacgagttcgtcgacgagctcgctgctcttctcatatccggtagcgagggctccgatgcccgccagcaggaccttgcgcaggccatcacccaaaagatcaaaatcagccatgatacccctccttcgaggtccgacatggcctggtgccatgtctcgtaccaccaagcctagcgcaaacaacagggcaatgtactagaccctcagactgatttcgactgatttttcgctgattggtacttaccgaggactcaccgagaattcaccgaggacgttcggcggcagccttgcgcgcgttggtggctacttgatcgatccgggcgagctccttggcttgttcgggggtctgatcggacgtatcgaacgtaccgtaacgacgagtcacggcggtttcgataaggaaatcgctgatggcggggtttttaggcagcaacgagccgtgcatgtaggtgccgatcacgttgtgcacgcgcgcgccctcggtatgatcttcgccattgttgcctcggctgtcctgatcgacggtgccgagtggctgaacgccttcgcgcaggaaggtctggccggagtggttctcgtagccaatcacatcgccgaactggtcggaatgctcaacaagattgccgatcatacgcacgttctggcccacggtataagcaccgataacgccgatgccgtccagtcgggtaccgtccacggtttcgaagtattcgccgaacagctggtacaagccgcaaatcataagcataggggtaccgtctgcggcaagcgaacgcaacaggtcggcgcgatggtagaagtcgtcgatgattttcttctggccggtgtcttggccgccgcctcccagaataaggtccacctggtcgggccagtcgtcgccttgattgtactggtggacgaccggttcgtaaccgtacagttccagccggcggcggatagtcagcacgttgccggaatcgccgtagatgttcatgtctttgggatacagggacaccacatcgattgttctggccatgtcacgttctccttgtcgatgtcttcccgctaaggggaagtcttattcctcaccatgtcctcccgcaggcgggaggtggcgcgcgggcgctagaggatagttacttgcccacgcccgcatcccgtacttcggtgatgcggcccagtacggcacgggttttgagcatagcggtgtaggtgcagtagatgtgcttgcgtgtgccgggattggcgttgacgaatgcggtgaccgcctgttcgaggtcggtgttcgtatcggcgactggcacttggtcataccccaagcgcaatgccatgtcccaggcacgcacgccggagaccatggcgacaccggacgcgcgcaaagaggtgaagtccacgtcccatagccagctcatgtcgcggccgtcggcatattcgtcgttgatggcgatcatggtgtccgcgttggccgggtcgaagctggcgagcgagaggcggaagcccatcgggttcttgaccagcagcagttcgaccggggaaccgttgacgtcgatgacctcgccacggccgaaagccggcgtgacgcgggaaacggcggcgatgagctcgtcggcggacacggcgcaggcgttggctgcggcagtggccttggatgcggcggcattgtcttgcatcaccgcacgtaccacggcgagcgcggcggccgcgttgtacaggttgtagacgccttcaagtttgacgtcggtggcgtagtcctggctgtccatctggaaggtggccttgtggtcgcccacggcggtaagtgtcacgtcggcggggagttctgccgtgcctgcggaagctcccctctccgaggggagctgtccgcgaagcggactgaggggagtactgactgaagggagcggcccggccataccttccaccgacacggtcgtggccatgtcgtcatcggacgggaaatagtggcgcaaatcgtcggcgaggccgaagtatcgcactgtggtgccagccggggccttcgcggcgagcgcggcgatacgcgggtcctcgcggttcagtaccacagtgccggtagtcgccgcagccacatggctgagcagtttggccgtggtgtcgatttcaccgaatcggtcaagctgatcgcgcatcacgttcagcagcaacgcataacggggcttgacctgcttgacgaagtggacggcgtacgcctcatcgagctcgagtacggcgatgtccgcgtccaatttgccgccgaaagtgacttcggtgagcagtgcggagaccacgccgcgcacgaagttcgagccggtcggattggtgaacaccttcaatcccagatcggagagcatcgaggcgaccatgcgggtggtggtggtcttgccgttcgtgccggacaccaataccacgccaagcggcaactgcccgagcgtacgggtcaggaagccggggtcaatcttttctacgactttgccgggcaaagccgaaccgccatgtttggtgacgcgggatgcaaaccgcacgaagcggcctgcggccacggtggcgaacgcataccacggtttgcgggtctgcaccacggacgattggtcttgcgaaacatcgcgtgaaacgttgcttgccatcatcacaccccctgattgctgttgtagtcctgcggcatgtccttgaatttggacgtggcaccgaggaaggcgaggtggaaggtttcggtcgggccgttacggtgcttggccatgatgatatcggcctcgccggggcggtcttccttgtcgtagaagtcagggcggtggaccaggaacaccacgtcggcgtcctgttcgattgagccggattcacgcaggtcggagagctgcggcttcttgtcgttacgcatttccgggccacggttcagctgggaaagggccacgaccggcacttcgagttccttggccaagagcttcagggcacgggagaattcggacacctcttgctgacgggattccacggccttgcccgaggtcatcagctgcaggtagtcgatgactacgagtttcagatcgttggtctgcttcagacgacggcatttcgcacggatctccatgaggctcatgttcgggctgtcgtcaatgaacagtggcgcattctgcatcttggtccagaactggttcagggtgttccagcgttcgggggtgatgtcgtcggcgcggcgcagggcggccatcggaatattggtttcggcggagataatacgctgagcgagctccaccttgctcatctccaagctgaagaccacggaagtcatgttgtggtgcaacgctgcggcgcgggcgaagtcgatgccgagcgtggacttacccatggccggacgtcctgcgacgacgaccatctgtccgggctgcaggccctgggtcacgtcgtcgatgtcgcggaatccggtcggcacgcccttgttgacgagaccctgctgcagtttgtccagctggtcgagcgcgtcgtggaccaccgggccgatggcggcatagtcctgacgcaccttgcccatcgacatctcgtagatctcggactgggcgaggttaaccacatcctcagcctgcgatccctcggcggaataaccgagctgggcgattttggtgccggcggcgatcacattgcgcaaaatggcccgctgatggacgatctccgcgtagtacatggcattggcggcggtcggtacggatgcgacgaggctgtgcagatagtccgcgccgccgaccttgtcgaggttgccatccgccaacagctggttggccacgagcaccacgtccaccggctgactggcggaaaacagatcgatgatcgcgttatagatcgtctgatgcttgggctggtagaaatcggtgacgtcaatggtctgcgaaacttcgccgatggcatccttactcatcagcatgccgccgagcacggccatttccgcgtcgtcatcgtgcgggggcactcggtcgaaaatcgggtcgccgaccgccgccgacgtctgcgcgccgccccggcccgcgcggtcgccacgatcgccacgatccgagccactgccgaacccattctgatacgagtgttcacttccttctgccatagccttcaagtataggaggtggcgtggcgagcggaagatatcgcacgactacgttcattaggtcgattcctcactcattaggtcactgtgcttggtaacaccacaaaccatgcgcttggaatggcggcattctgaggcgctcgatcaatatctctcaaagtccaccgacctaatgaatgcacaatcgacctaatgaacgcatgaaagtgcaagtcgtgccgaatcatcgcgcaccaatttcatcgttggttcaccttgcggtcagcgcggcgacacgctgaagcgtcaaatgtggatagaaaaaatagttatccacattttggggataagtctggggataatccactcatttatccacatattggggataacttggtggacaagctgaggataactttgtacggctgcactaggtgcttgcgcaacgtagctaagcatgatatgcgtgtgagcgtgcatagcaactccaccagcattcatcgccaaatcattgcgttggcgctaccgacttttgggcagctcatcgcagaaccgacttttatccttattgacaccgccatcgtcggtcacattggcgatgccgctttggccggactgtccatcggatcgaccatcatcctcacggcagtcggactatgcatattcctggcctactcgaccactgcgcaggtggcgcatctgctgggagcgggtcgtcgtcgcgagggactgcaggcaggcattgacggcctgtggctggccttgagcatcggcaccgtactgggattgggattgttcgcggctgccgagccattatgccgggcactgggcggtcagggcgaagtattggaacaagccgtgacctatacgcgcgcaatcgtgctgggtgcgccaggcatgctgatggtatatgcggcgaacggcattttccgaggattgcagaagattcgtatcacgctgatcgctgcggtgggcggcgcggtggtgaacacggcgcttgatgtgttgttcgttattgtgctgaattggggcattgccggctccggagtggcgacgctgatagctcagtggttcatggggctgttcctggtaatccccgccattctgtggtcccgggcggacggtgcgagtctgcggcctcgtttggccggtattgcggcagccgggggcgacggactgccattgttcattcgtacattggcgattcgtgcggccatggtggctacggtcgcctgtgccgcgcgcatgggtactgccgtgttggccgggtttcaggccgtgaactcctcttggaattttgcgatgaacatgctggattccgtgggcatcgccggccagacgctggtggccacaacgctgggcgctggcagcgtgcagcaggcgcggcggttgacgcgggcgaccgggcgtgcggggctggtcaccggcgcggtaatcggcacggcttttgcggtagtcggcctgttcgccgggcacttcttctcccctacgccaaatattcagacgttgattgccgttggcatggtgacgatgggcatcttcttcccactgcaaggctggatgatggcaatcgacggcattcttatcggcgcgcgcgactaccgctatctggcaggcacctgcacgctgaccgccgtggtgtatgtgacgctcatactcatactggccaatatggtgacgccggcgctgacgagcgacctgatgcgtaccgccgtgctctgggccgcgttcaacgtggtgctcatgggcgggcgcagcctgtccaacgggctgcgcgtgcgctcggacgcatggatgaagtaggtatcggccgcgcgaagtgctgggcgattccgtttacatcgcggcgcgagcggcggaatacatgccgcgcacgatttgttcgcgccacttggaccagccgtattgcttggtgatggtctcaccggcggtggcaccgagcgaggagccgtcggcccgggtcaggtcgaacagcatatccaacagcatcttgtcgtggtgcaagcggtcggccaactcctccgccacggccggatcataggggtccttacccgtggcaaattcggatagggtcaaatgctcacgcaccagcacggtggcccagtcgacgatgtccggcgcgtagcccatacgcttgagaatcaccggcacatggcgggcaccctcggcggcgtgatcggccacgaacgcgcgcttgccgatgtcatgggtaataccggccaacagcaacgccttgaaatgatcgtcatcataccgtcccccggacggtgtctcacgacccagacgcgacgtgacctccaccatatgccgatcgatggtgtaccggtgggcggccgaggcggacggacggttgcggacgccgagccattccggcatccatcgacccggaatgtccacgaagtcgatgctctcccacacttccataagattcggcccgcatgcaagcagacgaataaacagctcgcgcgattcgtcatcccactggttgtcgtgaatcgggcagtgcttcagattaaccaaggtagacggattgatgggcaaactgaattcgccggccgccacggccatacgcaacgccagcttggcatccttggcaggctcggcaccgggtgccaacaccaattcgccttcgtgcttggccacgccgggagccaccacgtcgaattgcggggcttcacgcttgccgccagagcgctgagagaacatctggaagaacgcgaatcgcggcttttcgtgggtcagcgaatgtccagcgcgggatgcggtggaatcaagcgagaaggagatgcgccggccgatacgggcaagcagcgtctgcaaatcgtcgatcgagtaggcggcacgctcgttttcgggccaagtcggatcggcaaggccaagcatggcagccactttggcctgatagggcgtcagcatcaggttggtatccttgccggccaccagatggatgcagtcgcgtacgtcgagcagacgttccacggcttcgtcgtagatgccgtgcgggcggtcggccagccatgagacggcgagcgcggagacgagcaccgaatcgcgcaaacccccacgggtctccttgatgtcgggctgattgacgtattggaggcggccgaattcgtcgagtcgggctttggcagagtcgagcagttcgggcaggcgcttgcgggcggccttgcgccagcgttcgaggatggatgtggcggtggtggtaatcagagcagtgtcgccggcgatgggcttcacgtccagccagcccatggcggcgggaaggtcatggtcggtgacttcctcgcattgggcgcgcgtgcggatggagtggtcgaggtccagaccgctgtcccatagcgggtaccagagtttgttggccaactcgttgagctgctggtcgttcaacgtgcgaggctcgtagatgatgaccaagtcgaggtcggagctggggcccagttgaccacgtgccagcgagcctaccgcggcgaagccgatgccggagtcgggcacagggaaagagacatccttgcaggccgcattccacagctccgtgaggcattgcatggccagttccgtgcgggctttacgcttggtcgcaccattccggtagacaccatcgtcatccggctggctcatatccatgaatcgttgtttcaagccatctactgctgaagtcattgcttcatctttcattgccaaaaaggtccccgcacggcgtcaattcgcggcgtgcggggacctttcccatgcagtccatccccttctaggcatggacgtctgtgttatcagatcgcggcggaaccggtctcaccggtacgcacgcgggccacggagtccagcggagcgacccacaccttgccgtcaccgatggtgccggtgccggcggacttgatgatcacaccgaccagcgtctcggcatccgcgtcatcggacagcacttcaacgcgaatcttcggaatcaggtccacggtgtactcagcgccacggtagacctcggtgtggccgcgctgacggccgtagccgttggcctcggacacggtcagaccgtgcactccggcggccgcgagggcctccttgacgtcgtcgagcttatggggctggatgatagcggtgatgagcttcatctcacctcacctccttgagaacagagctggcagtaccagcaaaatcgtaagcacgttcgccctggtcggcaagatcgatgccgccgacttcctgagcttcggtgacgcgccaaccgatggtcttctccagggcgaaggcgatgatcgcggtgatcaccgcggagtagaggatggcgacgagagcgatgaccagctgaacgacgagctgcttccagtcgccaccagccagcagaccagtgccttcaccgaagaagccgatgaggacagtgccggtgaaaccaccaacgccatgcacgccgacgacgtcgagggagtcatcgtaaccgaacttgaacttgagaccgcaagccaggcaggtcagaacacccgcgatggcacccatcacgatggcccacagcggggaaaccacatcggcggccggggtgatggcgaccaggccggcgaccatacccgaagcggcacccattgcggtgtagtggccggagcgaatcttctcggtgaagccccacgaaagcattgcggcggcggtagcggcggaagtggaaacccaagcataaccagcggtaccgttggcggcgaaggcggaaccagcgttgaagccgaaccagccgaaccacagcaggaaggcgccgagcatcacgaacggcacgttgtgcgggcggaacggctgagtgccgaagcccttacgcttgccgatgatgagcacgataatcagggcggcgactgcggcgttgatgtgcaccacggtaccacctgcgaaatcgtgggcggccgcgccgatggccttggagatggcgccgtcagcagacagcagaccaccgttccagaccatgtgggccataggagcgtagtcgaaggtaacccacagcgccacgaagatcatccaggtgctgtacttcacacgctcggcgatggcgccgcagatcaggccgacggtaatcatcgcgaaagcgacctggaaggcaacgtccacggaaaccgggtagttgttgtcgttcagaccggtggcggtgaacacgccgtcctgcgcgaccatggaatccttgagcaggaagccgctggccgggtcgccgaaaataccgccgatgtcggaaccggcgtatgcgatggaccaaccccacaaagtccaaataatcatggtgaccgacagcgcggccgcctcaagcatcagcatgttcagaacggccttggcacgaaccataccgccgtagaagaacgccacaccaggcgtcatgaggaaaaccaaggacgcggatgtcaggatccatgcggtgttaccggaatcaatcgctcccatgtctacctccctctctttcgttcagggcaccgggggctttgcgcagccggcgtcgactttgtctctacaatgccgtcccccttgtgggggctaacagttcgtcagttaaagccggtcgcgttttggtttcgttacgacaagttacgcgattgttaagcgtggctggaagcgtacgtgcgaccgctcggggaaattatggcgcgattccaacggatatgacgaagccccgaccatgtttcgagcatgattcggggcttggtttataggtaagtcgcgcgttttgcgctctcacaacgtggacgttggcttacgcgagaatgccgtccacgaaaccttcaggatcgaaaggtgccaaatcgtccggaccttcgcccagaccgacgagcttgaccggcacgccgagctccttctgcacgctgatcacgaggccgcccttggcggaaccgtcaagcttggagagcaccacaccggtaatgccgatggcttcg

SEQ ID NO: 1228 - DNA, 14894 bp, Unknown
  R81_24m  MAG No. k141_24068
agggcaccgacctatccgtctacccggaggactacctcgacgcggtcgccgaggaactcaacgaccggccacgcaagaccctcgggttcatgaagcccagcgagaagatcatcgaactactcaacaccgcaagctaacctaacaaccaacaaaaccaatcaggcgttgcaaccaccactagaatccacccatatcagtggctccacaccgcggcatcaggatcgtcgtcgggattgtaatcatcatcgtcgatgggcttgtcgtaattcgcctcatcgtcgaccacgccggaatccgcttcagcgttgagctcgttcacggctttgtcatccagcctgtagttcggcagcacggattggatgtagctttccacagcctcgcccatcggcacgtcgtggccggccttctcggcaaggaaccagcggtgatccagcacctcatggaagaactgtgccggctcgatctgcgaacgatattcacgtggaatcatacgcacggtcggctcatacacctcacgcatccaatcggtggcgacgatctccaactcctcgccttcacgccacgtggaggcacggtatgcatccagatcgttgagcaggcgccgcgcctgattctcctgcacatctaaaccggtcagtcgcagaagcttgcgcgacgcatagccggcatcgaccacgcgcgggcggaccagcacacgtttgccgtcctccgcggtcttcatctccagctcgtccacgtcgaagcccaggtcgttgagcttgttgacgcgctgctcgatcttccacatctcatccgggccgaacttgtcggtgtcggtcagcgtgctccacaacgagtggtagcggtcgaccagacggttgcccacctcgatctcgtccacgtcgctcggcagcagacggccagaagccaaatccatcaattcaccgatgatgttggtgcgagccaagtcgatatcgtattcacgctggccatcggtaagctgcacctgcaaatcaccggtttcggcgtccaccaggaaggcggaaaacgcgtcggcatcacgcaggaacaggacgttcgacagcgacacatcgccccagtagaagccggccaagtgcaggcgaaccagcagcacggcaagggcgtcgatcaaacgctcggcagtatccggctggagattgcgggcgaacagcgcgcggtacggcagtgagaacttcaggtgacgggtgaccagaatcgcttccagcggttcgccgttgcggtcatgacgaccggtgaccacggcaatcgggatgacggtcggcaactcgagcttctgcagtcggcgcagaatctcatactcgcgctcggccacctgacgggtgatctctttcatggcgtagacctcgtcgcccacgtgcacaaaacgcaccacgtggcgggagatgcctcgcggcaggttggccagcaggtcctcgggccaggtggccaggggcttatgccagggcagcgtgaacatcttcgggttcgagctggcggcggtgatcttcaatgcttgcggctcagctgaactggcatgttcgtcttcggctttgacggacgtggccttcagcgcgcgcggatccatctgaggcaaatcgttcaactccatgtgttcgattctacgtggtgcttgggaagtgcagcgagtagcggcgacttcggcgcattattctcgcatacgaataaatcatctgtatgggatttgccggccgaattgacgtcccgtatgcggcgcctcatgcgcaatctgaacaaaatgaacgcaacaagtaacatgagccccgctgccgcagcaatgctgcctacggcagcacccgtacgaccgataaggccaggattgcccggctcctcgctcgggttattttcgggcgggacaacaggagttccagtgctaaatttcggctctactgtgatgttgagatcagcggatgtgcctccactgccaggaatcgagatgaggaacggatcacagtcgtatgccttgttggctttcgccgagctcgtgcgggagaccagatataggccgagcggcagattctggaaagtgagctgaccagctacgttagtggtgccggaatgctggtacagcttgtttttcgccgcgtgcgcagcgagcttcttggcagcatcgtgatagtcacttgatgtcagtcgttcccaatcggcagtgaggccggaaaaatcgccgacggttttatatgaggagacgctaccatcattgttcgttgtgacggtggcgacgcgcacgatggaataggtatcgccggcaagcaatttgggcgaagccgtgtctcggccccatacggcattgatggtgagagcgccgaaagaatcagcttgcgcatacggcaccatagagccgaaggctgcaagaacagtgaggacgatagtaacggcggcggcaatcatggcagcaatgcgcgccgcaccatactcgcttccgctatgcaggtctaacatgtctgcccggtcctttccgccatgatgaatgtgattggttatttgtactgtctggctgaggaggcaagtcaccgtccggctcgatatccgcagagtcagaatcaccagatgcgaccttggcgctcccactctgccggcgtcgccgctcatgacgctgccaaaaatgccatgcgatgagcaaggcaatcagtgcaagagacggcaacaagtactgcagcggaatgtccacgtggaacgtggatttggcgtcatcctgctgctgcggcgtgtatgggatgcgatggccacgcaccagcagccgatgcgtattgaccgcatacggcgtacaagtgatgagcgtgaccaaatccttgccgggctcaattgccagttgtttggtatcggtcggcagaacggtagtgatcttatcgacctgatacgcatacgtgtctttaagtattgtgatgtagaacttgtcgccttttttcataaggttcaagtccgtgaacagttttgccgtgggcaagccccggtggccagacagcgccgcatgagtggacgcgccaccaactggcagtgaggtctgttcgagatgtccgatgccggattgcaacactttctcggaagtgccgtgataaatcggcaaggtctcctcgagcttaggcacagtgatgtatcccatcatgccgtcaccgtcaatattgagcagactgttgtattcctcgtccgtggatgcggaattgacggcactggcaagagcgtcggtctctcctgcatcgttctgggcgagcttttcgttataggcgtgcgcagcatccagcaccttctggtactgttcctggctcaatgcttcaacgctggcgtcgtagttatttacggcgcggctggcgttgcgcataatgaggaagttgctgatcgtcggatagaacagaatgagcattccaccgagaatgaccagtacgggcaggatgttgcgcagtcgtttcatcaagcgttcttttcgcgaggaaaccgtgttgtgggcgtagcgggtgtgtgcccttcacgcccaaaacacggccatgctcgtcaggcgttcttgcgcttgagagtccaggcaacgccgagcgcgatgaccagcacaccagtcaccgtgaaggcgatggtacccatgccaccagtgccaggcaggacaacaccggacttgttccggaccgggatgacaccgttcgatgcgggctggtcgtagttgctgctgccattgtcgttgtcgtaggtgatgtggacggtggcattcgtgttgtcagtgccgtcgttctggccttcaaccttcacgccgatggcgctggcgagcttgttgtagccggccggcgcttcggtctcggtgagcgtgtactcgccgttcttcagtccctggaagtcaaccttaccgcttgcaggagtgatgatagtcgtcgtagtagtacttgccttctcatcatccgtagctacacggtatacagcgttctcggtcgcgttaccgtccttgactttcacgaagctcatagggtcgccgttcttaggtgcgagtgtgaacttagcaccagcaagtcgagtagcggcatcagtataattgtcaccagtgtacttatcgacggtgaagccataagtgaagacgcgaaccttgctgggttcggactcaccggtgccaccggtgctcgggttgttggagtactgaatcgttgcggagttggtgttaccatgaccgcccacaacagcatccttgttcagcgtggccgtgtaggtgacggtgatcgtcttgccggcattggtctgctgattcttgaagttcagcatgtcgacagtaagcgtattgtcggtgaccgtaggacgggtgacggtgtagtcagtgttctcggtcagtgtcgtatctccgaccttaacggattcgacttgtttaaaggagaggcccttagacaacgtatccttgaatttgaaggtgtatttgttataggcggacatgtccggaatggtggaagtcagggtgaaggtcagggtatcaccgatctgcgcgtgggtggcgccctcaccatttaccttcttgacgacggtaggcagggcgcccttaatgtcgacacccaccgtggtgctatgaacgcgaactagcgcggcgtattgaccgttggtgttggccacggtagcacccggcacagcgaccacgtagtagccgtagtcgagaccagtgaacgtcgcagtgtacttaccgtccgtggcagcattctgagataccgtagcggtcgcgtcagccgtgatgttgttggccttggtctgcgcccagttcgatgccttggcagcgaaagcaatcaaggcatcatctttcagcttggatacgtagtcgtttgctttatcgttgacgttcgcgtcggtaacatcggttagtccgacggagttcttgaagaacggcttccacgcgtcagtcaacgtgtgggagacagccttgccgtcactgctcacggtggcggagaacatcttgtaggcgttcacggtcttaccggcgaacttcgcgtcagtagtgctgaccgtcagcgtggcattaccacccgctgcgttggccgtggcgactgtcgtcgcagccaatccaaatacggtggcaatcgccgcggcggcagcgaaaacctttttcatcagtgatttcattactgttcctttctctagatggaaatcttttctgtttggcaggtacggtttgtctatgtggtcgtcacgaggcatgggcacctcgctttcgtatacggctggagcccgagcggactgtgccggattgaacgcgttgattacgcacgtaccagaccacgccagctcccataagcagcaagccgaacatcaggaaccacatcgtgcccgcgcctcccgtatccggaagcaacgccgcattggtaacaatggccacgcgttccttggtgttgtaggagaccgatacttggtatccggcctccgcgggcttgatggtcttggtggtatcgccgtccttataggtcacggcggtttcttccacggtgtacgtgtagtaacgcacgatgtccttgccgttggcatcctgtccatccacgaatgcgactggcagtccttgaatcaccttgcgccaggtgttgctccaggaagaggcatcggaggagtccaacgtcaccgtccatggattcttctgcgtcacagttgtgcaatccgcgccgaagcattgaatcgtctgcggcgtcaccgtattgccactgccatcggtatagtgcgcggcgatcttcagttcgaccgactgcggccgttcgaggttgccgtccttccataccttctggacggtcaggtcaatggttcggcaaccgtccttgccgcacgggtcctggccgtcgtccggttcgggggtgagtccaccgttgttgtcggtcacggtcgcgtcgagcatgagcactgccttggccggggactggtaggcatcgagcttcgtcttggtgctgccgtccgtggagtcgaccacggcgtccttaatgccgacccaagtggtgccggcgtcgccggatgcggagctgcgcacagcgctgctgtcgtatgtgttgaccacgtcgaacagcttcacttcccaacgatcgagtccggtgttcagtgcatcgtccgccgtgttcttctgcgagaagatcttgttgccgtcctgtgcggaggtacgggcctcactagcgttcgcggccgccttgcggtaaatgcgataggtgttgtatgccttggcgccgtggccgtcatcgaccggtccgaggatgtcgctcatggtgttgaagtcccatacggacttgagtttggtgttcgagaacgggtcgaccagtccgctggcaccgcggatcgtgtcggcgtagaccatgtggtcgtctgccagcacgccctcgtcgttcagtccggcgaagccgcccgtgtagcctgtggaaagatccttcacaccgtcggtatcctgagttgcccctccgccgaacacgtcatagccactggcgatgcccgttacggtggactgttccacgcgagtacggttgcccttgatgagctggacggtcaggttgctgcccgacccattcatatcaatgccgtctttgttgcaaggcagtttgatgacactatcgccgatggagacaatcgccacgtcggtctgctgctggttttcatcatcagccttggacagagcaacgctcaccttcagtccgaacaggttcacgtacagcacgtcgccttccgaaagcaccttgagattgaataccttgccgaagatggccgggaaccacttgcctaaatcgatgacgccgacctgttccgccttgtcgaggtacaggagcttgaccagcgcgttcaccacttgcagcagcagttccacaagtacggagttgaccttcgcgtcaaccaaataggcacggctggtttcaccgacgaatccgccggcaatctcaccgctagtgaccttcttgagattgtcagacgtacagcccttcaccctggccaaatccacgtatccaacaaaaccgcctgcgacctcgcgtccggtagccttgtcagtggctttgccgtagttgtcgccatggtgtgtggcggtgacggtataaccgtccgggatgccggtgacacgcgaatcgccaacgtgcgagccccagatgtcaagtacgccggccgtggcaccaagcagattgagcgcatccgtgccgagctgtgcattgtcggcggcgaccgtgccggatttgccaagatgcccgatgaagccgcccacgtagttcacgccggtcacactgttgaggttggtgaccgcagactgcttcacagagccattgatcagcccaccgccgaagccaccggccgcaccggtgtaacgcttcgagtcaagcatgccctttgtggtggaatcatgggcgacaatctggatgccgtcgctcacaccgttgacctgaccgtcatagatgaaggtgcggaatgcttcgagcacgcccacgttgccgaccttgagcagtttaagcaacaggttggtattctgcttatcgccggcctcgccgccgccgacggaagcgacgctggatatatcagcaaggccaaagaagccaccggcgtattgcccgccttcaacagcgcgcagcccgttaacagtaagagaagccgggtcattgttcggatccgcttcactgccggtgcctttggcggaatccttgtcaccgaggatcgcggcctgcaacgaaccagcgaaaccgccggcgttcagggcatacttggttgtggtattacccttatcgtccctgctctcatatgcgccattgaccgtgtatccccatgccgggtcatccgagttcacatgtgcaccgcgaatcgtcgtaaccgtggcctgcaatacgctgaccagacttgccgggttcgataccagcgagtcgaggattccttgcaggaatccctcggacgcattggtgtccacatccgcaaccgcaccggcagtggccacgccgataaatccgccgacattgttgcgcccttccaccttgcgcaggttggaaacgttggcaccggcagcggtgacacccttgacaagcttctggccgttctggtcgagatcgccccagatctggccaccgaccgcgagaccggcatagcctccggcattaccggtaccgtgcgtgatgtcttcaccggtggccacgaccttcatacccttgcggtagccggccacgctcgaagatttgatgacgggcacaaatacctgtgccacgtcgagcatctgtcccaaatcaagtttgatgcctttgtcgccgaatagttggatagagccgaacgaggatgccgagccggattccatcgtgcccgcataaccgcctgccgcacgcatggcagagacggtcttgacatccatcgactggccatcggtgatcgtgccggtgcgcatcagaccgacgtgtccgccggcgacgccggaatcatgcaagttcgcgccagtcttatactccgcacgaccagcgacgacgttgaatccgaagatgtaggattcgaggaacttgtccagggaatcctgatcagtaacagagcccgcaccatcgcccgtagctacctcggtaaattccttgccatacgcaccgtacttgccgatgttgtcgacccacgtcttccactggtcgtagctcatattgcgcagcggaccggtgaccttcgtgtgctcctcggtcgggtagaccacggacagcacgccggcgagattgccggccttgatgagaccgccgagcaaggagagcgaaccgccttcagcggtatcggccgcttccatgaagccggtgtagccgccggcgatttcggcaccgtatacgctgcggatgcgcgcggcgtaggctacgcgctgcggcccgttgtatttgccgccggtattctcctgcttccacgctgttgtgttgttaccccagatatgaccgccacgattacgacctgcatagccgccggccatgccgcggcgtgtggtcgtatccgatgccgtctgggcacgcaccgcgccgccgcacactgcggcatcggtcgagctgttgcgaatcgtcggcgtgaagtcctgcacgagcgagagcaggtcgtcgaggctggcaagcttcttgagcacgctgccgtcaccaagcacgttcgccacggctcccggctgcatggtacccacgtaaccgccggccgaaacctggccgatgatgtatacgaactcatgagagctcgagtcctgaatgtggccgccttcgatgtctccggcgaaaccaccagccatgcccagtggatcgggctcattgttggcattcctatgatctgcggcgctggccagaacggagtatccgccgatgccgccagtcacatcggagtgttcaatcgtcgagacgacgacatccagcacactgagtacatcgttgagattgactttctggccgagcaggctcaggccaccgcccacagctgccgccgagccgatgtccattttgccgatgtaaccgccggcgtatcgcgcagcggtgactgcatatgtgctgtctttgctcagataggtgtcattgattgatccggcggtttccagattcttcggtgccttgacatcagtatggcgcagttgggtcacgctggaatgggacacctgcacaccggaaccgtatccgatgtagccgccggcggaaccggattgcgtatcggactggtcaagtcgggtggcggagacggtgaagccgggatcgtccgggtcggaaatcttgttgccgctggtggtctccacggtggtggcatcggaatgcacacccgcgtaggagatgaatggcacatagccctgcaccacctgcaacaggttggcgagatccaccgtaccgaatttgccgagcaaactcaggccgccgttgccagccgaagcgagcgcaccggagacaaccttgccgccgaaaccacctgcgtatgcgccgccggtcacatggtcaaggttgacaacggccacggggttggtttgcacgcgggactgtacaccggccagcgttgagtcgttcttgagatcggtttcggagaactggttgaccttgccgctttggaagtttcccgcatagccgcccgcgatatcgccttcgacataaccgccgttgacgtatgtcacggtggtatccgtataacttggaatcagatacggtacggcaccgagcaggtcgttcacggacagcaggccgcctttgatcaggccatccaatacgctggaatcttctgcgttgctgagcgcgtcggcgaggccgccggtggtggagaagcccacgaaaccgcctgccacaccatcggacatgctggtatcggctgtgaccgatttgaggtttgtcacatggctttcccgggtcttggtgctgttggcctgaccatagaaaccgcctgcagcgtaatcggttgtttcgttgttcttgttcttgccggttgccgcaaccgtgaatccgccagagatgccgttcacgttcgatgcagtgactgcaaccgaagaatattgggcaaccgatagcagaccggaaagcttgataagcccgagcacattgagaccgccagcgccgatggcgtcgcctggtccagagaagccaataaaaccgccggcttctcccttggccgagaccgtggccagattggtaaggttcgtgtgggtcacgtcgccgccggtggcgcatccgatggcaccgcctgcataatatgaaccagccttcaccgtcaaaccggatgccggagcggtgacagacatgttctccacggtgaacgcggcaaactggtcgaacttcttgagcgtggcaatatcgccaattttcaccacactgttgagcaacccagctaccgttgtcggttgcagattgccggcgatgccacccgcgtaggagcccgtggccgtgaccgattcaaggccttctatggtggtggaacgctgctgtgggaagtcacgatgattgttgtacttccagaatgtgagtttttgaaggcggttctgcgaggaatcaccgatcaccgtacccgaaccttcacccacaaggccgcccgcgtaatcactgccggcagcaactgtgagggaacccttcatttgtgtaccgagaatcgcagaaggattcacaccgacgatggacagcagttctcctgcaccgttattgctgccgctcagcaatttagtcacagccttggtgagctgtttcaacagcgatgcattcgtggcatcgtccgtaccgagttccaggccccatcccacggaggcgaatccggtgaatcctccggcgtgggatttgtcggcagtcacggcgaccgaagccgtaatcgaattattgacagcataggcattggccatggcaccgttgaagccgccggcgtagtcttcggcctgcacggtgatcttatcgtcaccgtttaccgtcaggcgactgttttcgatgaggctctgcggacgcagcgcagacagcaagtcgacgccaagcgagttaatcagaccgcccacgttgccgttgcgacttactccggcaaaaccaccggcatattgcgttgcccgcacggtgaaaccattcgtgctcgtcaccgaagagttctcaatgattgcaccaatctgcgcaccgacaaagccgccggcctgcgggttgtccttgttgccgatcaccacgttatttttgaacccgttcaccgaactattcgagataaccgggttgtagtagccaaccggaatcaaggcattcagcccgagcgtgccggacagcaaccagtccaccaaatcgcccagcccgaggaacgggatgatgttcagaatccccgagagtaacttggtgagcgctcctacgatgccggagactgcatcgtatcgggttgcgccctcaacatatcccacgaaaccaccggtcatacggcttacgctagataccgaaacatctgctacctcgcagtccgtaaccttggtgtccccgtagatacggccggcaaatgcacccgtggcgaggttggaaggattgtctttgtgcagggtgagcagaccttgaagattgaggtcaagatctacttgtccgaatgtcaatagttttaacgccttcaacagtgtgtcgagcagtaatcccactgccgaagtgagcataccgagcaaggtcggcggaatatacgattcactcgtatgattcgtcaccgacacatcctgcagcttgaggttcgacaccacggccgtaccggcgctgcccagactgttgctgttcatcacggtcttgttcgtgatcgaggcgaagaagccgatgccctgctgcttgctgacatccagctggtcgcctttgacattagagaccatatctttctgattgacgaccacatggctgatgaccggccgagctgcggtagcgtgaaccacgcttgcgccatcggcaccaacagccttccacaggctggctgcggtgtcgccgtcattggagaccgcaccgagcatagtgccggagaacatgagcggagtccactcggtgttgttggtatctgccgcgttcttggacaggtcgatgttacggaagatcaggtagttggcgtctgaggaataggtcaggccggtgttggcagcggagtagtccgtttgcgtgccatcagcacccacgccgtaatacttggtgcgggtctttccgacgtctaaccgcgtgctgcacagcagtggactgtcgtggtcggaggcatcagcatcgcgcaaagtatctgaattggagagatcggcgtcaccggcgtattcggaagacggcgtgccgtccacccactgataattgaggggtccttgtcgcgtgcaagtctgcttgaccttgttgatgcggccaataaccttcttgccggaaccaatcgcacgcagctgctgctcgttaccaatcaggatgtaggtcttgccgttgatcttcttggtgacctgaccctcaaagtcacggccgccaagcgccgtcgcggcgacctgcacattggccttcgccggcgattgatccgtcgcatttgaggaatcgttcttggcatcttgagaagaagcatcgtttggagcctgcgtttgggctccatcattagcggagttgccagcggtagcttctgctgagtcgtccgccttattgtctgtcgcgccatttgagggttcggaaggtgttggcgcaccgtttgatgtattggcctcttctgacgtcttatcgtcaacgttgacattgcgagcagaaggagcagctacgacagtattatccccccccccagaaattacggcgttaggagagctactcacatcgtctatattctgagcatatgctgcaggcaccatgcacacgatggacaaggaaacagcaataaccgaagcaaggcaacgcttcaaggcatggcgctgccttccagattcctgttctgttcctccgttaaacccgcaacggacgaacttcgatttcgagcccattgtttcccctcatagattcgcaatccctttttcgggaggtcactgcatacaattatacaagaagttggcccgttgtctaattgaaagtgcaacacccgttattggagattgtccagataaccagtccgaagggatgttgcacctatggggaaagtatattcgcacctgtcggaagaggaacgccaggtcatccagatcgaggtcggcaacggcacgagcgtcaggaagatagcccgtttgctgggacgcagcccgtccggcatcagcagggagatcaggcgcaacacgtggttcccgtccaacgagagcgagtcctaccggccgtaccggccgaagcgtctgaagacgggcccgtggacgggccgctactacatcgccggccccgcgcagcgcaaggccgaccggcgcagggcgaagccgcgcaagccataccgcctgtcatgcggccgcctgtggtcgcgggtggccgaatggccgggtagaggctggtcgccgctgccggtcagcggcatcatccgccgttgcctgcccaaacgcacgatcatcgaacccggtatggcaagagggctccaggagatcgtcgacgagaccgacaaccggcccatgcgcgtgctcggccaccgcacgcccgccgaggcattcgccgacgagctgctaaacttgcaagacaaacaaggatgttgcacttccaaatagacaacggggacaaaagaacaaaaaacgctcatttgcgggggccggttagcgtatgtctttctgggcaaaaagaaaagccccgcaactacgcggggcttttccaacgaggccataagagaggaagagaatcgcctcgtttaatggttggcatgaccgaagtcataccaagtatctgctagttcctctactagttcagacgcaactcggtcgacggagcgaacaggtgcatcttggaggggtcgatcttgatcttgacggtctggccgatcttcggcagcgcacgcgggttcacacgaatcgtggtgagcttgttctggtcggacatcatcgtggacgcctcggcagcggagccatcggtgatgatagtgccgtagatgtagccgtcggagcccagatcctcgatgttctgaaccttcagcgagaaggcgttcggatcgtccggggtggccagggtggcatcctcgggacggaagccgacgacaatcttgccgccatcctcagcggtcagcttgttgacggcctcggcgggcaggtcgacggtgtcctcaccgatcttcgccttgccgttgacgaccgggtgagtgttgatgttcatcgacggggagccgatgaagccggcgacgaagacgttggccgggcgatcgtacagctcagtcggagcgccgacctgctgcaggacgccgagcttgatgacggcgatgcggtcgcccatcgtcagagcctcggtctgatcgtgggtcacgtacagggtggtgacacccagctggcgctgcagggcagcgatctgggtacgggtctggacacggagcttggcgtcgaggttggacagcggctcatccatgaggaagaccttcggctcacg

SEQ ID NO: 1229 - DNA, 9497 bp, Unknown
  R81_24m  MAG No. k141_24170
atcaatgttcgtaaagccagcgatatagcgcaggaggaagaagcgaagaaggtagctgaggagaagaaagcagctgaagaggcagccgccaagaaggcagctgaagaagaggctgcaagaaaggccgctgaagaacaggctgccgcgcaggccgaggcccagcggcaagctgaggaggccgctcgacaggcacaacagcaacagcaagcgcagcaaaatgtgcattatgcgaattgctctgaagtccgtgcggctggtgctgctccgttgtatcaagggcagcctggatacaacggcaagttggaccgcgatcacgatggcgtggcctgcgagtaacggattcgatatttcggcgactcagcgcttgttcgggccgccgtccgggaacatcaagtaggtgatgatgccggcggcggttccactggccaatgcgccggtgatgacggcaagagcctgcatcgccgtgctgagcgtgggcttgcccgttgcggcagtctttgcatccttcaatgtggcggcactgggcttgcgtttctcggcaatggcattgtcggcagcgttgccaccgtccgtattgactggggcattgtcggcaacggcctcgccgtcctgctcttgggcgcgccgttcgcgaatgcgttgctcaatgggatcgtcgaccaaagtcttgatgatgcgcgccagatcgcggtcttcacgacgtgcgatctcggcgctgaacaccgtacgtaaagcgagatactgcagcttggtcatcgggcttttgccggtctccaagttagacaccgtctgtcgcgcgactcccagctcgtcggccagttgctgagtcgtccatccggctaccttgcgaatcggacccaggttctcctgaaacttatcaatccaccattgttcgatttcagacgccgccattacgcacctccttccacgctgtcaccagtgtacgttacctgtaccgaaatcaatccaaaaaacagtgttcatgtgaaattcactgcgtatttgcgctttcgccggcttaccgagattagccttagacaaggaataacagagtagaagcagaaggtatgcgcgtattcgatttcgacggaaccatctatgatggcgaaagcctgttcgacttgtacctgtattccgcccgccacgacccgaaagtgttccgctatatcgcccccgtgctgcggtacgcggtcaaatacaagcttggccgggccacgcttgaacaaatggaatacggcgtgggcaagatgaccgaaggctatctcacggaactgagccgatccaaacgggtggcgagcgtcgaacagctcgtggacgatttctgggaccgatattacgcacgtatcaagccttggtaccagcctgagtcggacgatgtgatcctcaccgcatccttcggtctgacggtgggggaggcctgccgcagactcggcgtgaggaatctcgtggccagcgaggtggatgtggagacgatgaaggtcacgtacctcaacttcaacaccaacaagaccaaacggttccgcgaactgtacggtccggacgccgtcatcgacgagttctacaccgactccaagttcgatcagccgatgatcgacatggcccggcatgcgttcatggtcaaggggaacaccattacgcaggtcaagtaggaaacagcagaaaacaacacaacgtaaccaataacgaaagaggaatccatatgagcatgccgctcgatctatacgtaatccggcatggcgaatccgaagcgaacgtcatcgtccaggcgggcgaacagggcgacaactccctgtatacgcaggacaacgtcaccgtacccgaccgctcctggagactcaccgccaccggacgcaagcaggccgactgcatcggtcgttggctggtcagccagcagcagctgttcgaccgttacatggtctcgccatacgtgcgcacccgcgaaaccgcagccaccatggccctgcccaaggccaaatgggaggagaaccgtgtgctgcgcgaacgttcttggggtgaaatcaacaccatcaccaaggacgaattcaaaaacaactacgcacgcaactggaacttcaagaataccgatccgctgtactggcgtccgccggcaggcgagtcgattgccgatgtggccgaggaccgtgtgcacaacatcctgacctcgctgagccgcaaatccgattcggaatccgtggtcatggtcacccacggcgacttcatgctcgccctgatgctcaccatcgaggatctggccgacgaggaattcctgcatcgcgccgactcggacgactggaagatcaccaactgcacctgcctgcactacacgcgccgcgacccggaaaccggccgcacctccaagcgtgtgcgctgggagcagaccgcccggcccgtgctcgacgagacgaccggccgctgggaggtcaaggtggagccgtggcgcgaattcaagcgcccgtacctgtccaatggcgatttggtggatgtggtgcaggccgtcgatccgcacctgctggagtattacggcaaatagcctttcccggaagagagacttcacaaaatcttcgtgagctagaatggcgcgtagtgcggctggttgtgaatgccgtgccccaagcgagagcgaggagagtagtaatgtccaatatcttccaatggcaattgcatggcgacggcaagacgctggcgcccggcgaggtcgtcgagcccgatgaacgtctgacttgggtgcgcaccgccggtatcggcgcacagcacgtcatcgccatgttcggtgccaccttcctggtgccgattctgacgggcttcgacccgtccaccaccctgttcttcacggctatgtccaccgcactgttcctgcttatcaacaggaacgtgctgccgagctatttgggctcgtccttcggcttcatcgcaccgatcaccgcggtcaccaccgccaacaagggcattgcggtcgccagcttcggcatcatggtcaccggtattctgctggctctgattggcgtgctcgtgcattacgccggctccaaatggatcgacatcatcatgccgcccgtggtcaacggcgcgatcgtggccatcatcggcttcaatctggcaccttccgtgtggaccaacttccaagccgcgccggacaccgcactggttaccctgctggccgtgctgctcgtggccgtgctgttcaagggcttgctgggtcgcctcaacattttggtcggcgtaatcatcggctatgtatatgcctgcatccgcggccaggtcgacttctccgccatcggtgacgccgcatggatcggcttcccgaagttccacctgccgcagaccgatttttccatccttcccatgttcatccctgttgtgctcgtgcttgtggctgagaacgtcggccatgtcaagtccgtggcccagatgaccggccgcgactacgacaaccagatcggcaccgccctcatggccgacggcctgggcaccacgctcgccggcttcggcggcggctccggcaccaccacctacggcgagaacatcggcgtgatggccgccaccaaggtgtactccaccgccgcctactggtgcgcagccgccttcgccctgatcctgagcctatgcccgaagttcggcgccgtgatcaacacgatccccgccggcgtgctcggcggcgtgaccacgctgctgtacggcatgatcggcatgatcggcatccgcatctgggttgagaacaaggtcaacttcgacaagccgctgaacatcatggtggcagccatcaccatgattattgccatcggccaattcgcgttcactgttggtggcatttccttcaacggcattgccattggcacgatcgtgattcttgtggcctaccacggcctgaaggccattggcaaggcaaccggcactatcgccaaagacgatccggatattttgtagtgtgttttagggctactgggccgtattgtggctcagcccttttgcacaatggcttctaccttcacgggtaggggccatttgcgtgttccatggggcggtgctcgccttacgtggtggtagaacccatggggcggtaattggcccatggggcggcaaacatcccatggggcggtaaaaccctcatggggcggtaggtgaaaatggctttattctgcggtttcacaatttcttcaaaccgcctcatgggcaagttaccgccccatggggtcataagtaaagagtgggatgacagcgtggcgagcatcaagcaaagtagggggcttacgctaagctcggaaagcttgcgtaatttgcgtaacctttgacatgaaaggccactgtgccccgtaataatttcgatgatcgtgacgattccgctgatttccagatgaacgacagcgcggaatcccgcccccttacctttggcgaacttggcgtacccggaccgctggtgcgcgtacttgcggcagatgacaagaagaccgcattccccattcaggccgacaccctgcccgattcactggccggccgcgacattctcggccgagggcgcaccggctccggcaaaaccctcgccttctccattccgctggtcacccggcttggctcctatgattcgcttggcgaaatcgcgatggaggagttccgcaaggaaatcaagcgtcgcaagaaggccagcttggaagagcgccgcgctgacgatttcctgccgcacccgcgcggcctggtgctggcccccacccgcgagctcgcgaaccagatcaacgacgtgctgatgccgctggcccacacgttcggcatgaacaccaccacggtgtacggcggcgtcaagtacatccaccagatccgcgatctgaaggccggcgccgatatcgtggtcgcctgcccgggccgccttgaggacctgctgcgccagcaggcgctcacgctctcgtccgtcgaagtcgtggtcatcgatgaggccgatgaaatggccgatatgggcttcctgccgccggtcaagcgactgcttgagcagatttcgcccgatgcccagcacatgctgttctccgccacgctcgatcacggcgtggatgaagtggtgaacaccttcctgcatgatcccaaggtgcacgaggtcgattcggccaccaccgaacctgacctgatgacccaccacgtgttcgagaccacgcgcggcgacaagcacgaactcgtgcgcgtgctcgcctcgggcgaaggccgtcgcatcctgttcacccgcaccaagttccaggccaagaagctcgccaagaacctgacgcagaacggcattccggccgccgagctgcacggcaacctgaaccagaaccagcgcgatcgcaacctcgccgcatttgattccggcgatgtgcgcgacatggtggccactgacgaggccgcccgtggtatcgacgtcggaggcgtggagcttgtggtgcaggtcgagccgccggccgacccgaagtcgttcgtgcaccgctccggtcgtaccgcccgcgccggcaaggcgggcgacgtggtcaccctcgtgctgcccgagcagcgccgcgagacgcgccgcttgctgaaccaggccggcatcaaaaccaagatgatcgaagtgacccacgattcgcccgaagtgcttgagcttgtgggcgaccgcgccgagcgcgtggatggttggagcctcgacaagtcgcagcccgtgggcaacccgcgcaagggcaagaacaggggcgccaagaacgcggcgggcgatgagtccggccgcagcggcaggcgcaagcacaatcgcaatcgcgaccgcgccgagcagaacgttgccgagaccggattccagcacgagaacgcaggcggcgagtttgttgccgaaggcgagccgcagcgcaagcacggcgacaaggccagcaagaaggccgtgaagaagaaccgcaaccgtgcggaacgccgcgccggcatgagcaaccccgaggccgagcgccgcgactatctgttcgagcatggcgatgaccgccgtaagggcggccgtcgcggcggatacggcaaaaaccgttacgacgagcgccaggacgatggccgcaacgagtacggcaagaaccgtcgcaatgatcggtacggcaagggcggaaaattcgacaagcgcatccatcgcaagaacgagaaccgcatcgtacgcgacgagcgttcagaaggtgccaagcgtcacgaacgccgcatgatcgccaaatacggcaatacggaaggcccgaaccgccgccattccaagaagaatcgcaataatgcgccattccgtatgaagtctggacgccgttagtccgacagcgcgtatgaatcaggcccgacgacctttgatggtcgccgggcctgattgtgttgtaggtcggtgttttcgatgcggatgcctgttcccgacatgatgtgtatcattgtttcataaatatgttatattaatacacaacttgatgggagccacgctgccatccatcatcgggttgttcgacggatcgcctatgcgtgggctggccgtcggactgcgggtcggcacatccggggtgggcatagtgctcggcccggtcatcggcggcatcctgctgcaacggttcgcatgggatagcgtgttctgggtgtgcgccgtcatcggcatgttggccatttgcgccgccttcctgtgcctgttcggtttcatcttcctcacaacccaatggttccaggcgctgcgtgggtgttcggcgctcgagacggcgattgccacactgccgttcgcggtcgtcatggcagtgatggccgcaggcatcgccctcgtccagggtcccgccaccgacgcgctgatgacggccgtgccggtcggcgaggagggtatgggcagtgccgtcaacgacacgatccgcgaactcggtggaacgctcggcgtcggcatcatggggtcgctgcaggctggtacgtacaccaccggcctgacggacgcgctgcgaggatcccacctgccccagggcatccttggcgcatccaaggaatccgtgatggctgccgaatccatttccggctccctgccgggcaccctgcgcagattgcggatgactcggtcgcatccgcgttcatgggcgggctgcacagcgtctgcctggcggccatgacgattgcacttatcgccgcggtcgttgcgatcgtggccatgccaaaacggcggtaatggcctgtacgcaccctagaataacggatatgacgcaatcgcagccccgatccagacgcacgccaacccttgaaatccgcggaagaattcttgacgcggcgaggcggatcgtggaacaggacggcgtggacggtctgaccatccgtacgctgtccgcgcaggccgacgtgtcgcccaccagcatctaccagcacatcggcggcaagcaggcggtgtccgatgcgctcatcgacgcatacttcaccgatctgcgcgaacagctcatcgccattgacgaatccgatcctgtgctgcgcctgcgcagggcgggcataatctaccgcgaacacgcgctggacgcccccgatatttacacgctggtctggatggggcaggcgtcggactcggcccagcattgcctggaagccatcacgcagatcattcgatacggccaggcggcgaccgtgttccgtgacgatgacccccacctgattgcatcctccatctgggtgtccatacacgggttcatccaattcgaactgcgttccgcccaaccccgcacacgtggccgcgaacgggtcgaccggtcgtacggttacctgctcgacctgctgatccgaggcattcggcggtaaatggtgagctccctctgatgagggagctcagtattgatacgctgcactgccgtcggcgtggcggatggtgaaagtgggggattgctcgatgttgaggtccacggtcagggaatgctgggcgtcggcgctcgtcgaacgatagacgaagtgcttgttttccagcttcacggtctcggtacgcgcatccatcagccatgggttgcgacggcgcagcgcgatcagcgcctgatgcagccggtatgtcggctctcccagcgtggacagttcggcaggggagtcggggaacttcggacgtacgtcgtcatcgccgccgaaacgctcctgcttgacgcccacatagccctgctcgtcgccgtaatagatgcttggcacgccgccgaccgtcatgagcaccgccaatgccaacgccgccttggccgggccaatctgcgatgcgatacgcgtcacgtcatggttgccgatgaacgtctgcggcatgaaggaattcaggaacgcgttgtgccgcttgagattccaatccagctcgaagaagttctccgtctccagcgcatgctggatcgacttccatagctcgtattgcgtgatcgaatccatcgtggattcctcgatgatgcgcgggtaatcgccatggatcacctcaccgaaaatccacgaatacgggtgtgcggctttgacctgcggcaacacgcgcgcccagaacgggctcggcacggcatacgcggcgtcgaggcgccagccggcggctccgcgatccagccaatggctcatcacatgggccacatagtcaacggtctcgtcagccgaatggtccagcgccaccagatccccgtgcccctcgaacacatccaaagcgggttcgtcattatcaccgacatgcgcgcggaccagaccatgccacgggttgtcggccggattcaagcgtccggcggtctcgtcaagcgccgcccggacggccggatgatcgcggctcacatgattgaacacgccatccagcaccacctgcaatcccatgtcccggcaggccgcaatcagctggtcgaacgcggcatccccgcccaatcgcacatcgatgcgcatatggtcgagcgtgtcgtatccatgcgtcgccgactcgaacaccggacccagcagcaggccggacgcgcctagatcgcgcacgtactccagccaagggatcatcgcgtcaaggccgcggccatggaactggcgcgggccggcgggcctgatatcggcaccgcagaagcccagcggatacacgtgccagaacaccccgtacttcacccaatcgggcattgtgcggctcgaatccgtgcttacaaccactgtgcacctcctgattgacaccgtgtccattttcgcacaagcatgaccgaatcctcggtagatggcgggaaatgtcgacgagcatatcgaagcaaagtatgagcctgcccccggtccgttggttggtgtgcaaggccgtgaccctgatctgcgccggcatggaccgccgccgcaccaacgggttcttcacctacgcgcagatcgtgggcgcggcggccatgagctttatgcatggcgcgcaggacggccagaagttcatcggcgtgctgttcctcggcatggcgttctgcaatggccaacccagcgtgaccggtgtgatgattctggtctggctcatgattctgtgcagcgccatcatgggcgtgggcgcggtacgccgcctctccgccatcaacttcggcgtggtgcgcgacatgatgctcacc

SEQ ID NO: 1230 - DNA, 18277 bp, Unknown
  R81_24m  MAG No. k141_25073
aggggagctgtcggcgaagtcgactgaggggaggacgtcgccggaaccgagcctacacgccggaagccatcggacgaatcgtccttatcagcggcagccccacaccccacgccaggcaagttgacgacgtgcgcagtttgcggtgctgcctgcatcaatgcggtcaaactgtgctcggccttggcctgcgcgtattcctcaatggcctcgccggacgtaatcatcagcatgaccgcccagcttgcccagtactcgcggacggcaacggtggaaagaatcgccactacggccagcaaatcgacgccgacttgtccgtggcgcaaatcgtcaatcatgccacgcactgtgtcaatcacaatgattgccaccagcgcgattatcagccattggcctacaccaggattacccagcaccggcatcgcaattgcgttgccccatgggcgccaatcgcccagcaatgccagcgggattgcggcgataacaacaacgggaagcatcggcacaagtcggcagatgtcgaggattttggtgaagaatctgatgagtccgctcatcattgctccttacgctcgtatacggagtcgattgcggcaagcgtggcccgcgcaatcggcgctgcggtcacgccttgttaacccaccggcggctttgcttagggcctttcggctccgcgcgaccatccgatacacggcgtaaagaaatcgtttttagttatgtgttgaattattgtgcgcatcgttcgagacattgcccgaatcagcgcttggcctaccctatcagcggcctgaacgcgacatgccgggcggcgaaactacgttggcagctcagtcggcaggcatcaatcgcccccctcctacgattccgccaagaattcccgtgcatatgaggggctcgcagcccttatgcgcctgcagctgacgtcctgccagaacgattcccgtgcatgcaaaagcccacggaacaagatatctgccgccgctccggccgacccagccaaacgcttcccgcgtatacgaaaggcccgcagcaggagttgctcactgctgcggacctttgcctatctgacacggcgttcaacggttaccgctcaacgccgtgtgacgcgctgaaccagctttaccacaggccgaacgggtcggagaagccgccgccatcaccggtgccgccatcgttgttgccgttgccattgccgtaaccattccggccgttgccgttctggttattttggttgttctggttattttggttgttgccgttcgagttcgagctggacgagccgttcaccgacgactcctcctgatcgagcgtgacgtcgacgtccatggtcttaccgtcgcgcacgatggtcagcgtcaccttgtctcccaaagccgcggcacgaacgtaaccaagcagcgagtagttgttgttcaccgcgttgccgttgaaggccacgatggtgtcgccctccttgaggccggccttgtcggccgggccgccggagacgaccgcgctgccggtggcgctggacttggtgatggtcgcgccgccgcgagtcacgccgtcggcttcaaccgtgtcggacttgatgaccacgccgagggcaacgtgcttgaccttgccgtccttgatgatttcgtcggccacacgcttgacgaggttggacgggatggcgaagccgatgccgatcgaacccgcggagtcggatgaggtggcggtcgaggcgatggacgagttgatgccgatcacctggccggccgcgttgaaggtcgggccgccggagttgccggggttgatggccgcgtcgatctggacggcgttggtgacgatctcgttgttgttatcgtcggtcacggtcaccgggcggttcagggcggagacgatgccggtggtggcggtgtcgtcgtagccgagcgggttgccgatggccatcacgttctcgccgacggcgagcttgtcggaatcggcgaatttcacggccttgaggtcgctcggcgggttgtcgagcttgatgaccgcaagatcggtggtggtgtcggtgccgacgagcgtggcggaatacatgttgccgttggcaagcgtcacctgaatctgctgggcaccggagatcacgtggttgttggtgatgatgtggccttcggtgtcgatgatggcgccggagcccttggcggtgccgttgctcaacgcggtctggatggagaccacggagccggagacatcgctggcgacagtctgccagtcgggggcttcgccgctcttggcggtggcggacccggagccggacttattcgagctgacgttggacagcgaattgctggtcggcaaggtgatcaggccgctggtgagggcgccgtaaccgaggcccaggcagaggcccgcagccagaacggcggcgaccacggcgatgaggatgttgctcgccgtcttggacatgccctgcttggcggggccgggctgaccgggctgtcccggctgggccgggccttgaccgttcggcgtaccggtaccgggagtgccgaaaccgaacagaccgccctgctggggctgctggccattccggccattctgaccggactggctggcaaacgggttgccgttgttctgctgcggctgcgtgggcggattgaacggattgccgttgccctgcggctgcgggttattggtgtagtagggattgcggttgccctgctggccctgtggggtttgctgtgcaggctgaccgaacgggaattgctgcgtgggctgggcattgctgccggcctggccgccctgctggccctgtgcctgagtcggggtcggaccataagcgccatattccggggccggacgatacagcggagttgtggccgaggtctggcctgcggccggtgctgccggagaagccggcgaggaggagaccaccgtgctctcgcccttggcggaggcgtagtccgggatgggctcggtggcggcagtgtcggtagcggcttgcgtaggctgctgatcggcagcgagggcggccgaggaaaccggggcttgctgctcgctggaatcgctggcgttgccggcatcaaccgagtcgccacccacaaacgggttcttcggctcggcgttgccggtatcggcagtgctattggggttttcgttattccgcggggtctggtcgacgccctgcgggttaaattcgtcagccattgctgctccttttcctaaattcctatcacgtctgttcggcggctattcgggcacttgcccattgccacttctcgtgtgctacctcagtagtaaaggcagtcaatctggaggttttctgaacgttgattgaaagtctatgcgtaatcatcgcagagtcttatgggcatctcggcttcgaggggctgatttcctgtttcgggaacatctacttgcacttcaaggggctgttcgcgcggtcaattccgagtatcaagggccctcatttaacgccattccgccatttttgcagccggcctacttgaccgggagccccttgaagcggaagtagacgttcgggagcggcgaaatccgcccctcgaaaccgagttcttcacaatttccggcccttttctggcccttctgcctaaagtgaacatatgacgatcagccttcttgaacatccgttgggcgcacagcccggacaacccggcgaccgcagcgccttccatttcgaaacgatcacccgcctgccatccacggccagcgggcttgggcgagacggtgcccgatacggccgcaccggcatcattcacacgccccacggcgatattcgcacgcctgccttcgtgccggtgggcacgcaagccgcgatgaaggccgtgctgcccgagcagatgaaggatctaggcgcacagtgcctgctggccaacgccttccacctgttcgagcgcccgggcgaggacgtgctggacgcggccggcggcttggcgcgtttcatgaactgggatgggcccacgttcaccgattctggcggtttccaagtgatgtcgctgggcgtcggcttcaagaagacgctggcaatggacgtgaccggcatgaagtcggacgacatcatcgccaagggcaaggagcgcatggcctgggtggatgaggacggcgtgacgttcaagtcgcctttgaatggtgacgcacatcgtttctccgctgagatttcgatgggcatccagcacaaaatcggcgcagacatcatgttcgcgttcgacgaactcaccacgctgatgaacacccgctcctaccaggaggactcggtggagcgcaccttccgctgggcccgccgatgcgtggacgagcaccagcggctgacggctgagcggctgggcaagccctatcaggcgctgtatggcgtggtgcagggcgcgaattacgaggatctacgccggcgcgcggcctcgcagatcgcctcgctggacttcgacggcgtgggaatcggcggcgcaatcgagaagcgcatcattggagacacctgcgcgtggatctgcgacgcgatgccggagaaccgcccgcgccatgtgctgggcatcgcctccgtggacgatatcttcgcgtgcgtggagaacggcggcgacaccttcgactgcgtggcccccgcgcgctgcgcccgcaacggcgcgatctacacgcgcgccggccggtacaacatcaagcgcgcccagcataagttcgatttcgggccgctggaggagggatgcgactgctacacatgccagcattattcgcgcgcgtacgtcgaccacctgctgcgcgcccgcgagttcaacgggtttacgttggccacgatccacaacgagcatttcttcgtgaagctgctagacgacatccgcgcctcgatcgacggcggatactttgatgagttccgcgacgaagcgttggcccacttctacggcaacggcgagcgccggccagggttgtgagtttttctccttcgttgcggcttgtgctgaacttctctctgctcccctcgctgaggctgagacgttaagcaaacagcccagtgggctgtttgtagtcgaaggtgagacgatagtcgaaccagcaggttgcaggcaaggcccgtccttaattgcggacgagctgtcacgaagtgactgaggggagtgccgccaccctcaaagatcacggcgcccgcaggagacccacaagcgatatatccctgcctcccatgcgacacgccgaagattgcatgattacccagccgggtgtaagttagtcgattgtctgcgagtgtggcggaatggtagacgcgctgtcttcaggtggcagtgagtgtatgctcgtgggggttcaactccccccactcgcaccagcaactaaagggctggaatcggaaggttccagcccttttgctttgtccgggcacgcgccgtttttcaggggggctttaggacttgagacttatggcccaactttcgtggcggaaaatgtcccggtacctgcatcaatcgtttgacgttcaagccaggccagaatccgctgtcccggttcgcgatttcgggcgatctttgcaaaccgggacaatttttgttgccccggtataaatgtcaatcgatttatgcgaaaaccgggacaacgtgccaattccagaatcggccttattccgccgattccgtctgccagacgatatgagttgaggaaaccggagtgtcccggttcacgaaaacaagccgaaatcgccgaccgggacagcggattctgccccggtcgacaggtcaaacgattgacatatgaaccgggacaaatacagatcagagagaagcccatgaagcagatttaactttcctcaactttccatccgccataaactagcattacataacatcatgaaccgagacgaaaccaacaaagtatctggagtcaccgacgaccagctcggccgaacggccgagccgtacgaatccggcaactggcggggcggcgttgggagcatcattcgcagcaatccgaaatcaggaaccgacacaagtcggacccagcagacacgcataatacgagttcacagactcggcgatgtattccgcaaccgcaccaccgaataccgcaccacggaagaactgtaagcattacgaaatcaaccttgattattgcgcgggcctatactaggttacggtagcgtaggttagtggtcgggagagcgtcgccggccatagcgaggtgatcagtatgagcgtttccatcagcacgccatctggacgaaccatggcttccgccgcaacagttgcgccttccgcaaccgcgagtcaaaaatccagcgcaaacgccaaccccaccgcactggaccgtgcatcggcccgatacagggccgcgcaatcgcgctaccgccaagccaaggccgcactgaaggcgatcaagcgccagatcgtccccgtggatgcattcggcaatcgcaagccgcgactgcgcggatggcttcacctcgccaccctgccgctgtgcatcgcggcgtccatcgtactcatctgcatcgcgccggccggctcggtcaaagcggcctgcgcggtgtacggcgcctcggccatgctgctgttcggcaacagcgcgctgctgcacgtcgtgccatggcgcagcgcgaaggtgactcgcgtgctgtgcggcatcgattattcgaacatcttcctcatcatcgccggcaccaacacacccgtgctgttcgcgctcagcccggcgattcgccggccatatctcacggtaatctggacgaccgcggcgattggcacgatactgcatatcgtctggctgcggacgccgaactgggtgttcaccaccgtatacgtcgtgttgggactggccccggtaacgcttattccgcagctctggacggctcccgcagtaggcccggcgccgaccgtgctcatcgcgtgcggaggcgccgcgtacatcgccggcgctgtatgcttcgcgctgcgcaagccgaaccccgtccccggctggttcgagtttcacgaggtgttccacttgggcacggtcatcgggtatgcctgccacgtcgtggcgatttatctgattgtctgcgcgctgtagtcgtccagcaattcatacaggatgcttcgaactcgctgtattgcagcgatttgaacacggcgcgggacagacagcggcccttaattctcggagccaagaatcaagtccttgatcagccagccgtgacggccgccttcatagacttcatcggtgagtcgatagccgcactgctcatagaacttgtagtggtcgttttccgagtgcacggcggccatggttccgccggcttgcgcgatgcggcgttcggcgtcggccagcagccgcgagccgatatgccggccttgtgcctcgggcagtaccgccaggcgcgcgatgatgtatcgcccgggctggtcgggatgatcggggtccgcgtagaaccgacaggtcgctacggggtgattctggctgggctgaatgggctggctgcgtgaggccaattgcgcggacgagccggggcgattgggcgcatcattatccgaatcgaacaccagcagatgtacggacgcggcatcccattcatcgaactccggccgccagtcgcgttcgcggatgaacacctgctcgcggatggcgcgggccgcgtcgggcagccggtcgtatgcttcgattcgtatggtcatgagcgtcagtgcaatgcgtcacgataaccgacaaagcccggctcgatggacgagtccgggcccaggctgtgctcgatggactcaggccgtacgcgcgatctgcacggcggtgccggacgcggtaaccatcagcatgccgttgtcggcgccgagcacctcgtagtcgatgtccacgccgaccacggcgtgcgcccccatcgcctccgcacgctgctgcatctcggcgatggcctcgttgcgggcacgcatcagctcttcctcatagccctggctgcggccgccgaacatgttacgcaggcccgcgccaagatccttgaacatgttcacaccggacaccacttcgccgaagacgatgccctggtagttggtgatggtgtatccgtcgacagacggggtggtggtgacgaggatcatggcgaggctcctttggcttgtctgcgtagataaatcactgccgagagtcggaccgttcccgaatctcacctcggaaacggatcgcttctcttggctaccacaatagtcggcagcgtccacaccgacattttcgacccgtccgatcgcataatcaaaagcatcaggatcgatatgcaaaaccaccgaggatcgtggatcgcttgtggatcttgaagcgttgtatcctggttgttcatggagcgggaacgcaaaatcattaacgtcgtgggagctgcaatcgtcaccaacggcaccgtactatgcgcccagcgtggcccgggaaagtcgttggccggatactgggagttccccggcggcaaaattgagcctcatgaaacagcgcggcaagccttgcaccgcgaaatcgaagaagagctgttatgcgaagttgaggtcgcggaagaggtatgtaccagcgaatacgcctacgactttggaaccgtgcggctcaccacattcatctgtcacctcatcgccggtacgccgcatctcaccgagcacaccgatatccgatggctgaatcctgctgatatgccgacattgaactgggctccggtagatcgcgaagcagtcgcgattatcgcgaacaaacaactgacgctccaatgaacgcgccacagcgcagtcaggcagtcatcaaacgatccgaatcgcaagggaacagggcaacatgtctataaatctggtcagcacctcagactctccagccaacacgcaacatcacgattctgatccaaccccctcgatcctcgaagatgtcatctcaggtctgatcgagccgcgctcagatgctcccagcgaatataagccgaccctcatcgcaaatcgccccggtggattgaccatgcgcgaggaaatcggcaattccttggctactagcgattccttcgacatttctgtcgcattcgtctcggctgaggccgtgctcagcttatttgaagacttcagaagtcaccatgaaacagcgacccgagcgggcacactgattacctcaacgaaaaatcatttcaacgatcccagggcattctgggagctgctgcatcttcaggacaccactggtgttgacgttcgcgtgtgggaaggttcccgtaatacctcagtttccgcaatggctcaaggacaaccattccatcccaagggatatatcttttctcgccgcatgaaagacggtacaccctattacgacctgtacgttggcagttccaatctcactggagccgcattgaccacgcaacgcgaatggaatctcaaagtctcatcgctggcggatggagagctggtcgggcagttccaggatgaaatcgactcacaggtggctgattccgttccgctgaccgaagagtggatcaaacagtatgaggaagatttcaagaaatacgccccaccgcgtcatgagattctgcagtcgcttgaggggcatgacattcagccaaacgccatgcaacaggaggcgttggcgaatctcaagaagattcgtgaacaaggcgagcaccgcgcaattatcgtgtcggccaccggcaccggaaagacgtacctttccgcattcgacgtacgcgaatgccagccgaagcgcatgctgtacatcgcccagcagcagatgattcttcaaactgcaatgaagtcttaccaaaaggtgctcggctgcgatgaatccgaattgggattgtattcaggcaccagcaagcaacaggaccgccgctacgtattcgccacggtacagacgatgcggcagccggaggttttggcgcaattcaaatccgatgaattcgactacgttctggttgacgaagttcatcacgctggagccgaaggatatcagcgcgtcatcaatcatttcaaagatgccgacttcatgctcggcatgaccgccacgccagagcgcaccgacggcatcaacatcttcgagctattcgggcataacatcgcgtacgaaattcgcttgcaaaaggcgttggacgagaacatgctctgtccattccactactacggtgttgcggaataccttggctccaacgacgatccgaatggaatcgcccatcgtctcgatgtctccaagggccttgatgcgaaggactcgaaacagctcaagtacgagatcgagcagcttgccaccgaaaagcgagtccgctacatcattgacaagttgcaggaatatgggcagttcaacattccggtcaccggactcgtgttctgcagccgacaggaggaagcccataagctatcccagctgtttaaccaacagtggaatcaacaagccgaacgcccctatcgcaccgctgccgttaccagcacggacgatgacggcaggcccatgtcccagacgcagcgagacgaatacgtccgcaagctcactgaaggcgaactcgactatctcttcactgtcgatatgttcaatgagggagttgatattcccgccgtcaaccaaatcgtcatgttgcgcagcaccgaatccagcattatcttcacgcagcagctcgggcgcggactgcgcaaattcccgcacaaagaaagcgttgtggttatcgatttcattggcaattacaacaacaactatctgattccggtggcgttatacggcaacaccggcgaccgcgacagagctcgcaagaacctgcagagaaagtcaatcggcctgtcgtccatcagtttcgacccgatcgccaaggagcgcatccttaagtctttggacaccgccgactggtccgacatgaaaaagctgtccgaacagtatcgccaagtccgttacgagctgggccgcatccccatgcttacggacatctataactacgacccctcactgccgtataccatcgcatcgaagcgcagcaactatcttgatttcgtgcgttcccgtgaaaaaagcctgggcaaaggcaaacatcatgaagcgacatttgaggatcagttggagccggtgaccgacgttgaagacgcgatactcaagatggcagcggagctgctgctgcccggattgcgaccgcacgaattggtcattcttgctcagctatgccatttcgtcagcgaacggctcgacgacgacgtaccgcagcattggagtgcgggctcgccaatcggccgcagcgaattgctcgatgcgattcgtactgaattcccgcagtccgatggttcagacacgcaattcgactctgcgatcagcgtgctcgattactcatatttcaccggcccaaactgcaatcgtttcggcaatcagccattagtcgaagccgtgaacagcaccggcacagaaaacggtaccgcatatcggttgaacagcagattcgccgatatgcttgccacgaacagaacgttccgtatcttctttgcggacactctgcgcaccggtatggccaattgccgagatatattccgtgaggccgccgccaggcaacaggtctttgatcacatgttcttgtacgaacgcaaatattccatggcagacgtcatgcgactgtgcggatggaagaaggagaatactccgcaaaacgtgggtggttaccttctcgacaaggaaaccaataccatgcccatcttcgtgaaatacgcggcaagtcaatacgaagatgaattcctgagcacacaggaaatgaaatacttcagcaagaatggacgaactccgcagtctcccgaattccgatgggcgcttaacggcattggcccgaattggggccagacgcatttcgtcccgttattcgttatgcgcaaggcggaagaggccgagggtaagtactactacgttggccacgttgccgcgtttgacaaccctcagctcaccaccaaacctgacgcaagcggacaaggcagcgtgaaggtcacactgtcgatcctgcggttggcccggccaatcgatccggagctctatcggcatttggtcagctgatgcctctcaactccgcaagcgtacggcggcggccattccaccgtcgccataggtggggtgggtcatgaaggcttggctggcggaggtgtcaccgcacatcaacgattcccacatggttaagcggctcatggagatggcttcaacgccgaggatggcgtcggcgatgtgcgcggcgtagagatcgcggtgcttggcgatcaggaagcgcatgagatcgaggcgcttggtcatgctggtcacgtttgaggaggccggggccgtgcggtactcgatcagcggctcgggggcgatgccgatatgggccgcgtcttttgcgggattctctgtatcccaggcactcccaaaacctccgacatgctcagtaccgccagtaaccccagcaccgcagatatcgttttccaccgtcaatccgcactccaacaacgacaggaagaagtcccagtcctcgaagccgccgcgcatcgactcgtcgtagccgccgcagcactcccacgcgacacggcgaatcatgcacgtggccgggcagcaattatgcgacacgaacgcggcggcattgccaccagtcggctggaccactgattccaggacaccgaaagtctgcagccagccggatgcggcgaccatcgttttgtcggcggacaacatcgacaacgtgcgctcaatgaaggccggccgcaaacggtcatcgccatccaacaccactacgaacggcgtttcggcggcggcgatgccacggttgcgcgcggcggaaggaccggcgtttgtctggccgatgaggtcgatggccacaccattcgcatccatcgccccgtgccggcaatcgtcgagagtggcgttcagcatctcgacggatgcgtggtcatcggacccatcgttcacgatgatgatccgttccggacgaaccgtctgggaccaatgacgactcgactgcctcgtgaatcaacgggccctgattgtagctggtaattaccactgtcactgctgccatggcggcaagtctatcgggtccggacgtgggccatccaccggcgctgcgcgctgcctcccgccattggggaggtggcgcgctatccccggctaacgctgatgcatgtgtgcgggcacgggtttggtgcggactttggtggtgaagtagtcggactcaatcttccacaccgtgacgctgcgcacctgcgcgtcggtgaattcgacgtgcggcatgtgcgcctgctgcgccatcagcgcctgcaagccgtggcggcattcatccagatcctcgaccagtgacgccgtgccattgccgacgatcgacttgaacgcctcaccccaattgcacgtggtgcggcccgccaccacctcgcagtcggtctgcatggtgaaagccacgggcagtcggccaccggcggcggcgcgaatcgcgtcgagcttgcggccgtgcggcgcggaatggaaccagagcgtcagtttgccggggcaccccacctcatcggctgccacgactcccgtgctgccgaccgtctcagcaccgttcaccaaggctgttgcggcaacaccatcggcctcgtcatactcgtaatcaaagccgaaattcagcggcacgatagtcaggccctcggcatccgcataggccacttcaacgatgtcgcaggcggcgatgatcgcggcgatccgctcgggatcggtcacctcgcggtccgcacggcgcatcatgcgatgctcgccggcgaccgtgtgctcatcctcacgcttggcgggcttgcgagcgcccgcgatattctccatgctcatgcctgatcgtccccatccacaaccgcaatccagtcgccgtagccttcctcggccatgcgcgagcgcggcacgaagcgcagggcggcggaattcatgcagtagcgcaggccgccgcggtcggccgggccgtcggtgaacacgtggcccaagtgaatctgtgtgtccgacgtgcgcacttcgatgcggtcgcggcccggaatgcggtggtcctcatgctcggtcagcaagtcaccggcaatcgggcgggagaacgcgggccagccgcagccggaatcgaacttgtcttgcgacgagaacagcggttcgccgctgacgatgtccacgtagatgccgggctcaaactcctcgtcatactcgttgacgaacgggcgctcggtagcggcgttctgcgtgaccgcgaactgctcaagcgtcagatcccagatgcgttccacgtacttctgacggcgttttacgttcgcgattgcggcgatcggtacatggcagtagccgccggggttgttcaccagatagtcctgatggtgtgcctcggccgggtagaagttgcgcagcggttcgaccagtacggccgggcgctgcggctggcggtcgaccagctgctccagagccgccacatacacggcgcgctgcgtctcgtccgtgtagaacatgccggtgcggtactgccggccgcggtcctcgccctgctggtccacggagaacgggtcgatgacctccaggaacagcaatgtcagcgtccgcaggctgacctgtgccgggtcaaactcgactttcacggtttcggccgcatcggtgccgcccgcgcatacctgctcgtaggtcggcgattcgacggtggattgcgcgtagccgaccgtggtgtccgtgacgccgtcgacgttctggaagtagcgctccagaccccagaagcagccgccggcgaagtatgcggtttgcgtatttccgtcattgtgttcgttacgttcgctcatacgccccacgttactacgtcgaggcggctcgcgatgcagtcaacgacacctctgcaccggcaaaaccgctttcgaggggctgatttgacccccgccggaggtctactcccgtttcaaggggctggtcggccgctagaccgcatgtaaaaacccatccgcgccaacgccattccgccgattttggagcgtgaatacttcggcatcagcccctcgaaacgggagtagacctccgggagagaccaaatcagcccctcgaaacggagatagcgcttgccgcgccctccttgtcaggctttctccgttcaaagaggtacattcgggcttctgcagaatgctatcttcgttcaaagaggcaccgaatacgggaaaccccgagtacaaacgttgtcattgcaacgctcatactcgagatttcagagttcaggcacctctttgaaggcagttagttgtccgcaaggggccaaatgtacctctctgaaagcagataccccgtctcaggctcgaatcggctaacctgcgtacccgtgtgcacaccttcacgaccgcagcgtgctgagcatgccggccacttcagcggccgtcacgctgggcacgtaggcgcgcaccaccgcgagcccgatctgcggcaacgccgccgggtccgggtagcacacgtagaccggcgcttcggtgggctggaacttgcgcttgaagttgaacagcgagtggaagccgtaggcgggttccatccagtcggccacgatctgcagcgcgtgttggagcacctgcgtgccttcgctggccggtgccccgtcctccccggcgttgtcccgatcgggattcatgccggccaggggcgccgcggacaggctcatgaactccacggcgtgcgtgggatcggcttcgccctcgtcacgcagccgctcggccatgcgcgcgatcaggaactccatgatgccgttggggctgtcggtgcgatggcgcatgaaatccaacgtccagccgacgatgcgcccgtcgcgccaggtgggcaaccagctggtgacgcccagcacgcgcccgtccgcgtcgatggcgtaaagcagccgcacgcgcgggtcgcgcagttcctcgacgccgccgagcgtgaacttcatttccggcagcgccttgagctgcgcccactcctcggagatgtcctcgatctgttcgcgcacatcaagcgacgcttccaggaatgtggactgcacgtcggtcacgccgtcgcgcttggccttgttgatggcggtgcgcacgtcctgccatttcttgccggtcgtcttccagccgcgcgggtcgaccaccatttcgctgccgacctcgatggagttccagccggcttccagcaacgcgtcgcgctgttcccgatgcacgccgtagaacaccggcgacagcgaacgttccgcacagtgctgggagaaaccgttcagatcgtccatccattccgccggatcgccgaacggtccggtgcaggtcagggcgatgccgttgagcacgcgatacgccacggccgatctgcccgtgggggacagccagtagctgttgccttcccacgtggtcatgaagctcatcgattcgccgccggtttcgaccagacgttcggcgcgcgcccgggcccgctcgttcgattcgctcacgtcgcccatccagtggatcaccacggccagcaccacgatccagaacaccaggccgacgccttggtacatgatcgaggccatcggagtgcgcggcacgaacgacagcttcatatggctcaggaagccgatgggcaggaagcgtcccggcagctcggccagcagcgacgaggccgtagcgcgtggcgagaaggtggcgggttgggcgatgccgtatatcaggtatatggcggcgcacgccagccaggccagcacgatggcgccgatgccgccgaccagcctgcaccagccgatgcggatcgggaagtgtttcatcgccgccagcagggcgatggcgaacagcagcgggggcaggacgttcgccacgcaggccacgatcgcgccgtgctgcagcagggaggccatgccgtccggcgcgaagctcagcggcacgaccagatagtaggcgacggcgatggccaccgtgaacaggttgatggccacggtgcagatggccgcgaaccgacgtccgcgatacaggccccacgccagcaccagggtcacggcggtgggcagcaacgagcgcaacaccgcgccgggcatcgaggcccgcagcagatcgaactgcaggaagcagccgccgtgcgtgtcaccggccaggcatttggccagcatgccatcgtcgacggaaaccgggctcatgagcaggccgatcgtgctgagcgggcccgcatggttatgggaggtgatggcgatgaccggccccagggccagtaccacggcgatggccgcgaatatgcgccgcgcctcgaaggaggtgctgcgcagccagtgccattcggcttcgacgtgcgcgggcggcccggccatcacacggcctgcggcatggccgatcagcgcggcggcgaggatgcagtagccgctggggttgccgctgtagagcaacgtgaccaggatagccacatagccgacgagtcggatgcgcctgcgccataggtggctgcagaacgcgctggccgccatgagcgcgccgaccggcaacaccagcgggctcaatgcgaaccgcatgcgggagacgaacagggagtcctggaacatccatccggccgccgcgcacagggtcaggcccgccagcacgccgccggccgcgcaggcgagcgcggtgacgacggtgcgcacacggccgagccatggttcggctatcgacagcatgacgagccacaggacggcgtcgaccatgagttggatgacgccgcgcgccaggaacagcgagcagatgagtttgccggcgttgaatgcggccatgctggtgctgagccgcagcggaaacgcgaatccggccatcgcggccaccagccacgccaccagattcagcgccaccagcgccgccgtggcggtgacggccaaccggtggtcgtccgcccactgccgcacgtcaccggccagttcacgccagctttccgccgcatggctggaccttgccgtatgcggtttggtggcgcgggaggtcgtggcgggcttcgtccgcgagggttccgcgtcccgcaggggccgccgcgtctgcggcatggccgccggccgcgcgttcccatgctgttgttcttcgctcattgcaacacctccacttgtgggtattcctccaacgatttcgtcatttcgcccagcccggttcgcgcgccgaaccagtcgagaccggggttccagaccgcctgcaccgcatgccagtcatggtcggcgccaggcacgaccagttcggtggtctccatgccggccgcgcgggcggccgcggcgatggtgcgcatgttggctaccgacttccgatcccctttgccggcgccggcgaacagcgcctggccggccgtgccggtggcggcgatggcgttgaccggcacctgcccgtcgtaggccttgcggtcgccggcgaaatatcgccggaccatcgtctcgacgctgccgtcggtcggctcgagctcaccatccaccggcagcatcgcaccgtagatgccgggg

SEQ ID NO: 1231 - DNA, 19991 bp, Unknown
  R81_24m  MAG No. k141_25209
agattgtcatggacgtgcccgccccgcacggcgaccccgaggcccctgcccgcgcgctgatcttcgactccgtctacgatccctaccgcggcatcgtcacctacatccgtatggaggacggcgaactgcacgaccgcgaaaaggtccacatgatgggcattggcatgacccacgatcccatcgagatcggtgtgatcagccccgatatgacccgtaccaaggcactcggtgccggtgaggtcggctacatcatcaccggtgcgaaagatgtgagtcagtccaaggtgggcgacaccctgacctcggccgtccgcccggccaccgagccgctgcccggctaccgcgaccccaagccgatggtctacgccggtttgttcccgatcgacaacgcgcaattccccgaactgcgtgatgcactcgacaagctcaagctcaacgacgccgccctgatctacacgccggaaacctccgtggccttgggcttcggcttccgctgtggcttcctgggtctgctgcacatggagatcgtcaacgagcgactctcccgcgagttcggcctcgacctgatccagaccgccccgaacgtcacctacgacgtgaccgccgaggatggcagtcagcatcatgtgaccaacccgagcgaattcccggacggcaagatcaagaagatcgtcgagccgatggttgccgccgacatcatcacacccaaggaatttatcggtgcggtgatggatctgtgccaggaccaccgcggcattatgggcacgatggagtacatctccaccgatcgtgtcgagatgcactaccgcattccactggccgaaatcgtgttcgacttcttcgaccagctcaagtcccgcaccaagggctacgcttccctcgattaccatgaggatggcgagcagtccgccgatttggtcaaggtggacatccttattcagggcgagaaggtcgatgcgttcagtgccatcgttcaccgcgataaggcgtattcgtacggtgtgatgatgaccaagaaattgcgtagtctgattcctcgccaacagttcgagattccgattcaggccgcaatcggttcgcgtatcatcgcgcgtgagaacattcgtgcgttgcgcaaggacgtgctcgccaagtgctatggcggcgacatcacccgtaagcgtaagctgctcgaaaagcagaaggccggcaagaagcgtatgaagatgctcggccatgtggaggtcccgcaggaggcgttcatcgccgccctgtccaccggcgaggactccaacgaccgcgacaccaaagacaagatccgcgccgctcagaagaccgagggctagtgttcgaggtctacatccacgtcccgttctgcttgcggcgctgcggttactgcgacttcaacacctacacggctacggatcttggtgcgggggcctcgcgcggcaactatgccaatatggtcattcgtgaaatggccctgaccaagcagtggcagctcgaccacggcatcgaggagccaccggtctccaccgtgttcttcgggggtggtacacccacgattctcgccgcctgcgatctggtcgccatgctcgatgccatccgcaagatctggagcatcgcgcccgacgccgaaatcaccaccgaagccaacccggacacggtcaacgaatattacatcaatgagctcgctgccggcggcttcacccgcgtttccttcggcatgcaatctgccgtgccgcacgtgctcaaaaccctcgaccgcacgcatacgccggccaacgtggccgcaggcgttaatgccgccaataaggccggcctgcgctccagcgtggatctgatttacggcgcaccgggggagagccttgacgattggcgcacctcggtcacgaccgccatcgacctcggcgtgaaccacatctccgcctacgcactgaccgtggaacccaccacgaaaatgggtcgtcaaatcgcggccggcactctgcccaaacccaatgacgatgacgaagcagccaaatacgaaatcgccgacgacctgttcgccgccgccggcctcgaatggtatgaggtctccaactgggcccgccccggatacgagagccagcacaacctcggctattggcgcaacgtcgattgggccggtctagggccaggtgcccactcccactacaacgcggtgaccgaggctgaccacccccagtcggcttcgctgacagcccccgccagcgggggcaagtccgaagccattgcctctgcctcagctgatggacaggccaacgccgaactaggtatgatcaacgcgcatgggaacaactcccaagaaattcatgcccccgctggcgggggctgtccggcggatgccggactgggggtggtttctgtctcacacggtctgcgcagctgggacatcgcgcacccgcgtttgtggggcacggccatcaacgagaaccgtgtgccgtgggccgatagcgagacgatcactcccgaggaaaacctcgaagagctcatcatgctcgggctgcgcctgcacgagggccttggcctcgaccgcatcaaccgcgccatcaacgatgcaggtatgagcagcacgccccagactctccgaaccgtttcggttgaccaactcgcccccatgatcagcgaaggcctgattaccgtatccgataatcatcgagtggtgcccactcgtcgtggccggttgctcaatgactcggtaatcgaacagttcttcgattacgtcggtgtatgagtcggtggtatggtgcgcggcagtcgccattacctgttcgctagttgtggttacaccgtcagagggagcttttttgttttaccggcgggggagggaaccgcgtaggactacgtccggggcgctttgcacgtagatcaggcggttggcagtgccgccggtggcctccgcgtcatcgcggttggacaggatgctgtccacggcggcctggcccatttcggccagcggcagatgcacggtggtcagtggtgggaacacgtcggcggagtaggggatgtcgccgaaaccggtgacgccgatttcctgacccggctcgatgccgttggtgcgcaacgcggtcatcgcaccgatggccatcacgtcgttgagcgcgatgattgaatcgatgcctttgccgtcgtacagtgcgccttcgcccggcttcagcagtccggatcgggccatttgcatgacggccgcatagccgtcggtgcggctgaacttaccgtttgccacggctttcgggtccacggtgatgcctgcctcgtccaacacttccatcacaccggccagtcgttctttggaggagcggtgtgcgtcatcgcccttgagaatcgcagggcgcgtatacccggaatcgacgataagctttgcgatggcacgcgcgccgacgtcgttcgccacgtccacggccgggaagggcaggttgcggttgagtacgaacacggcatgtccgccggacgattcgtactggatgagttccgtctgcaacgcctggcgttccggcgcgtcggtgtattcgctttcggagatgatgatgccgcgcggcctggtggatacggacttacgcaccgcctccaactcctcgtgcggggtggctgccacgccgatggtcacggagatgccgcgttcggccgccgccttgaccacgccttgcgacacggatgcgaagtagggatcggagatatcggagaccagcagcacgatgttcggtgcagtgcctttggccactgcctgagcataggcgttgggacgatagttgagcttggtggctgcttccatcaccttgacatacgattggttgcgtaccttgcgggtgctgccgttgagcacacgggatgcggtggcgatggagacctgggcttctttggcgacgtccatcaatgtcgctggcgattgcgccttatcgttctgtacagccacgatcgaatcggtccttttcttccctgaaacggaaaacatgtctaaacgcttaccgcaatgatatcgcagttttgcttgcaatagtagcattgtggattggaaagcctgaattttgaacaaaaataatcacgcgaattatggaaagcgcttaccgttccgcgtgtcgtgcggtatgctcgaagcatgacgcgatacttatgtgcccctgactccttcaaagagagcctgaccgccatggaggcggcccgggcgatggctcaggggattgagaatgccgaccacgatgccgaggtccgttgcctccccatggccgacggcggtgaaggcaccgcacgtgcgcttgtcgacgccactggcggatcgatgcacgccgtgccggtccacgacccgctcggccgacctgtcgaaggccacttcggcctgctcgccgatggcacgaccgccgtggtcgagacagccgaagccagcggcctcgcactgcttgaagccaaaaaacgcaacccgttgattgcctcctcctacggcaccggcgaactcatactcgccgccgtccgttccggagccaagcgcatcatcgtcgggctcggcggcagcgccaccaacgacgccggtgccggacttctgcaggccctcggcgttcgtcttctggacgggaacggcaacgaccttaagcacgggggagcggccctcgctgatctggccaccatcgacatcagcacgatggacccggctctcaagaacgtctccagcaccgccgcctgcgacgtgaccaacccgctgaccggtcccaccggcgccagcgccgtgttcggaccgcagaaaggtgcctcccaggccgacgtcgccacactggacgccgcgttggcgcacttcgcgcaggtcatcgaaagccggctcggcgtcgctgtgaacgacgtgccgggcgcgggcgccgccggcggtatcggcgccgcgctgaaaggcttccttgacgccgaattccgtccgggcaccgccatcgtcatcgaacaatccggacttgatgcggccgcgcaatgggctgacgtggtgttcatcggcgaaggctccatcgacttccagaccaagttcggcaaaaccccggccggcgtggccgaaaccgccaagcgccacggcaagcccgtgatcgccgtcgccggacacatcggcacgggcatcgacgaactgcatgaggtcggcatcgacgcggtattcggcatcgcccccggtgccgccagcctcagcgaactgctggccgacgcggccgccaacgtgacccgcaccaccgaacaagtcgtacgaaccctacaactgaagcagcttcacaagctccctctgatgggccgagccgtgaaggaaacgccggaggcgtttccaggcgagggcttgacgacagtcaacccagccgaaggctccataattgcgggacgagctgccgcggcaaagccgtgactgagggggagacttgtggcgcagccgcaaaaaatggcatcggctttcagccgatacagtcattcgtctgcttctctccctcagtcagctgcgctgacagctccctcgtcagagggagccacacaattcggaaaggaagatatgcgcaccatgctgtacaccaaggtgaccagcatgctgagcaccacgggcatcgccagcgagaaatacgccttcggaatcggcgccttttcgaagggttcgttatccatttccgtcccttggtgttttcgttcttcagtcactgcgcgggatgccgttcggcgtgcatcacaggcattgcagaggcaacagtgtggacaacgggcggggggagtatctcatgatgcggtgagggcgttgatgatgacgcatcgtgtattggtggccgtgtgcatcgtatgtaaacctgtgctggcacggcgtacacacgatgggaaaagaaagaatatatggaccccgttgtcccggttattgttcagttattactgtgttgaattattgcgttattcaattattgtggtgtgccggccgattgcggcctgcgggggattgccttcgtatgtgtcgtgcaatctcatgaatgggatcgttcgctagattcagcgagcgtccttgttggcggcgttgatgatgtcggcgaacatcttggagtcggcgtagccggcgcgggcgatggcgtccataccggagagggtgaaaccgcgaatcatggaatccatgaatgacataatgtgttccttgtcttgacttgcaaagccgtgggctttgcgatgtgttgttgtttacgttatgagacgggccgtgtgtgagcggcgagtcagggaagaggctcagcgagcgttcttatcggtgtcgttgatgatgtcgagaatcatctgggagttggcgtgaccggactgggccagggaagtggcaccgtacatagccagaccgcgaatcatggaatccttgagagacatcatgtttcctttcgttggtcaaaaccttgtggctttgagttttgtttatcggtttctttctgaaaccggtttcagaataacgcagtccgatgacaaacgcaaggggactattccgctctcggcgtttctggcggaatatcgccgttctatagataccgttcggtagttaagaggctgtctagtcgactttctgacggtcttgttctgggcgcatggttttcacgaaatggcctcatgtcgcggaaatcgtacactgagtcgttctgggcgtacggttttcacgaaatggggcctatcttcaccggattttgggcacaccggccttgagcagcttggtctcaagattgatggggcgtagcagatcctcatagaacacatggacgatttcggtgacgccctgttcccggagatgccgatcacgtctgcggtcgtactccattttcgcctggaggcttgcgcgattcttgttgctggtgtcggcgtatttggccatgccgtcgtattctgccacgatgatgcggccgtctgcgagcttccaacagaaatcgacgcgatatggcattgcaggattgtcgggattcatgaagtgcacctgcagcaggggaatgccgaaagacaattcggtgatctggccacgcatcaatgattcgccgccgttttcgctcaggggatccgcgtacttcagcagcttggtcacggagacctcgtcgcagacgctttgaatcatcagcgactgcacctcttcgatggtcgtcagggactttctcagagccgaatcgtatatgggcagcgcctgtgggaatgggaatgccgcgcagtcgagcagcgttcgcgccggagtcgtcaagagaatgccattatgcttccgcgtcggaatccgattgatatagatgcggttgagacgcgcctcgtctccgccgccgatgccggacttcgaggcgatgtgcactgtgccgtcgtgcagggaatagttgtgctgcagtccgtatacgcacgccgcactcaaccccgcaaatacccactgagggtggattgcggatagcgcacgtatgacctgcaatgactgttgctctctggtcatggtgttccaaagtattcggtcggcgtacaggttcttatacggtgacaccagctccccggcatgcaggcgacgtttcagggcgcgccgttgcgcatcactggtgccatagcagcagcgacgctcctgcttcgcctgctgcagcagtgcagaaacttccttgtgttctttcatatctcgacgctaagggtgattttgattgttgcacaagctcaaccggcaaatgtgaatactatgtcacgcgaattgttggtgtggataacttgaatcgacgtcgacggctttgccgacggtcttgtcggaggcgatattaacctaggacaccttgctgcgccgccttccataccgagaacagtcatcagtgacaccgagggcatcttcagcgtatgttcttcacgaaatcagctgccatttcgtgaaaaccgtacgctcagaatgactcagtgtacgttcttcacgagatgaggccccatttcgtgaaaaccgtacgttgacgacgattcagtgtacgttcttcacgaaattagggatgatttcgcggaaaccgtacactcaccgcaactcagcgtacggttttcgcgaagttattgatttggatataggttccccgtcatgaactacaatgaatcgcggcgaaaaacggggaaccgaagtcggagcgcggctgaacggatatgggtgtgactggatgactgccatggtgatgccggttctccttgacgtacgcaataacaacaactgacaacaacaggggagacaaggatggcgagaagtgcgggccgcacccgaccggtgatcaaggacgtggccagactggccggagtctcggcaccgaccgtctcccggtatctcaacggcaccgtcaatgtcaccgaagacaagcgtgaacgcatcgccaaggccatcaaggagctgggctatgagccgagcattgtggcgcgcgccctgtcgaaccgggagatggactccgtggtggtgttcgcggccaatccttccgccttctccacgtccgaaacgaaccatggggtcgaggccgccgcccgtaaacgtcggttcctgctcaatatcgtttctttggatgagtccgacatggactccgtcaaggctcgtgtgcgcatgggtttgtcgatcaggccggcgggcgtgatcgtctacgagtacgaccgggccggcatcgccgcactggaatacattcccaaagatatgccgatggtcgtggtgggtggcagcttcggcgacggcgaataccagatcatcaacgccgaaagggatggtggccgttggatgaccatgcatctgctggatctcggccatcgcaccgtgttccatgtggggcgcccggaaggaccgaccgataacacccgcaccaatgggtggcgtgacgcgctcaaggagcgcggcgtcacggtacctgacccaatcatcgtgcccgacgatgatttggaggagtcggtcaaggctgggcgcaccttgggccgtcgtggtgatgtgactgcgattttcgccggcaacgacgagaccgccatcgctgtgatccgaggtctaagggaggttggtcgccgcgtgcctgctgacgtgagcgtcgtaggctttgacgaccgcaacttcggtgccatgtggaatccggcgctgaccagttacacccagaacttcctggacatgggggagcggtccttccggatgctgttcgaacagattcaggccaagcgtgccggcgatgacgcgccgccctcgcaggtcgaagtggtgcaaggcaagccgtgtctgcgtgcctccgaacgcgcgtacggcgacggcgaaatcgcgtagtcgatggggcgtgcgtatcaatcgatagtgactgtagcgcattcatatcgtgacgaggagtctcccatgccgaactgtaagcgcttaccttaaatagttcataatgtgatttacgtcatactaatagatgttctgaatcatagtgttctgcaaggattccttgcggaaaatggctatttatcaacagttttcgaaaagtccgcatgatgggcgactgtgagcgcgctttatggtaatcgctttccgtagtgttattgttacagtgtgacttttgaacaatcggtaactctgaagactcagccccagacctcgggcactatctcagcggcagacgccgcgatgcaatcggcccgcgacgaacgcatccccggcaaactcatctgcgcgatcgtggccgtcggctcactcgcattcttcggcatcctgaccgaaaccgtgatgaatgtgctgttcccgcagctgatgggcgtgctccacatcagcgaggccaccatccaatggctcaccaccggctatctgctggtcgtgtcgattactgtgccgctcagcgcatggctgcgccgtcgcttccgccagcgcagcatcttcctggcggcaacgcgatgttctccacgctgcagcagttcacgggtgcggccggcaccactgtggtgggctaccgtgatctccgtgttccagtccggctcgggcaaggtgggttccgccggctatgccgccgccaccgtgaccggcgcatagattgactacgcgatcatggctgtggtcatcgttatcgtgttcgtcgccatgctccacgccctgcgtaaccggaagtagatggtaagtcgagtggcaccatgctaccgcgcaatggctgggcatggagttttggctaggaatcgttcgacaggcgttggcgcggccgctgagagcattcgcgtcgaaaggtttgccggagctcgttcggcgtggaatgggccgattcaccggtgattgttggtcaaacagccaatgctgacccttctgccaatggttagcgaggttcctatcataagcatttcggagagcgatctcgaaaaaggcgacatccttcacgaggatttgaccaaggtcaacattccactcgtataaagtaaggctgtaagcgcatcttggtggcaagcgtcaaggtatgtacggaatcgcggggcggaaagccactcctcaatccactgcggattggtaataacggatgattgtaacgcatgaatcacgaggccccccttacctcgtattgcaatgccccggtgacatgaaaaacggcggtcaacacggggcttgtacattaaggatacaggaagggtagttataagttgctgatatgccgtgttttttacgatagtcatcggcctctcccatacggcggaacaggaactgacggatgccgagatgccgtgattcggcgggaggacctgtactggcccagtccttctgctcggtagcggtaccgctacgccgactcttcccgacgctccagtgccgccgatatcagtgaatgcccagcctgatgtcggtagagttaaggctattggcttggtctcgacggtgagacttctccaatggccaatatgcactgttgcaaaggagtatgcggtatgcaaccaatcaaagccattcaatacggctgcggcaaaatggcgaagtacacgattcgctatatgcacgagaaaggcattcaaatcgtcggtgccatcgacgtgaatccggaagtcgtgggcatggatgccggtgtgtttgcaggcatcggccccatcaatgtgccgattcgcgccgatgccgaggctgtactcaacgagtgcgacgcggatatcgcggtagtcacgctattcagcttcgagaacgaaatcgccaccatgtgcgagcagtgcttggcccgcggcatcagcgtgatcaccacctgcgaggaatgcatctacccgtggaccaccgatccggccaccacgaaccgtctcgacatcatcgccaaggaagccggtgccaccatggtcggctccggcatgcaggacatctactgggtgaacatggtctccaccgtcgccgccggatgccacagcatcaagaagatcaccggtgcggtgagctacaacgtcgaggattacggcctggctttggccaaagcgcacggctgcggtctgaccgccgaggagttcgaggccgagcttgcgcatcccgaaaccgtggtgccctcgtatgtatggaattccaatgaagcgctggtccagaagcttgggcttaccatcgcatcgcagacccaggccagtgtgccgtatttcagcgatgtcgacgtgtattccgagacgatggacgagacgattccggtcggcaaatgcatcggcatgtccgccgtggtaaccaccgaaacgaatcagggcatcacgttggaaactgcctgtatcggcaaggtgtacgggccggatgatggcgatatgtgcgattggaagatcgagggtgaaccggacgtggagttccacgtggtcaagccggcgaccgtcgaacatacgtgcgccacaatcgtcaaccgcattccggacgtgctcaacgcgccagccggatatgtgacggtcgatcagctcgatgaaatttcatatctcacgtatcccgccgcgctgtacgtggcatagacccatattttcagggatgaaggccggcactcataagggtgccggccggtatcaggcggccagagtcgacgtgcgtggcaccacctggaactggatatggtcatgggtgatgtcatcgggccgttcatgccgtaggttcgactcgatcagcgtcaccatgcgatcgataaccgtacgagccattgcggggacgtctatcgccacagtgctaatgggtgggttggcgcagtcggagaaggggatgccgtcgaatcccatgagccgtacgtcgtcgggcacgcggatgccatgttcggtgagttcgcggagcgcgccgatcgctatggtgtcagacatgcacaggatgccacaatcgcccgggacaggcgtcaggaccgcaagcagcatcctgctcggcatcggcggcgacatcgccaacttcaaaagcgcggcccacctggccgcccacgccggcatcgctccggtcaccggccagtccggcaccagcatcaagaggcgagaaaccctccagacggggcaacaaacgcttatagactattgcgccttgtataaatgcgaactgccagtcaaccttaccgttgactggcagttcgcatttatcgctcccgctggcgggagctgtcatgcgaagcatgactgagggtggtccacagccgccaatccgtaacatcacccaacgcagcatttcacgatacggacgtttccgtatcgtattttcgtgtggtcaaatagacatttcgggcgaaaaagttcgaaatacccccataactggccataaaaacaattgcttgagaatcactattgacttttatggcgactcggtatatggacacgcgaaacgaaaatgacatggagcaacggtactgtgtcaacagcaatgaacgaagaggcacgattcccttacgtgcccacaagcaattgaggtgattccggtgacattcaaagccccgctcgatctcacggtccacgctccggacggtatgtatgatcccgccaacgagcatgacgcctgtggtgtgggtatggtcaccactttgaacaagcgtcctgaacgcaaaatcgtcactgacgccattgaggtactggtcaatctcgaccaccgcggtgccgtgggtgccgaggagaacacaggtgacggcgccggcattctgatgagcatgccggatgagttcatgcgtgccaccgtgcccgccgaactgcccgaagccggccactacgccgcaggcatcgccttcctcgaccgcgacatcgaaacctccggtcagcaggaacaggccattgccaagatcgtgcgcgaggagggccttgaagttctcgcatggcgcgtggtgcccaccaacccggacggccttggcctgcaggcccttgccgccatgccgggattcaagactctcgtggtcgcctctccggacggtgctctggccggcgtggacttggatcgcaagaccttccgcatccgcaagcgcgtcgagcatgaggtaggcgtctacttcgcttccctgtccgcccgtaccatcacgtacaagggcatgctcaccaccatgcagctcacccacttcttcgaggatctgaacgacgagcgcatgaaggccaccatcgccatcgtccactcccgcttctccaccaacaccttcccgagctggccgctggcccagccgttccgtctgctggcccacaatggcgagatcaacaccattcagggcaaccgcaactggctctccgcccgtgaaggtcgtctgagcagcgaactgctcggcgagttcgagccgctgctgcccatcaccactccgggctactccgattctggcaccttcgacgagtgcctcgaactgctgcacctcgccggccgttccctgccgcacgccatctgcatgatgctgccgccggcttgggagaagaacccggatctcgatccggacgtgcgcgccttctacgagtacaacaacacgcttatcgagccgtgggatggcccggccgacatcgtcttcaccgacggcacccaggtcggcgccctgctcgaccgcaacggcttccgccccggccgctggcagctcaccgacgacggctacatcgtgctggcctccgaggccggcgttctgccggagatcgcgcaggagcacatcgtgtccaagggccgtcttgagcccggtaagatgttcctagtcgacaccgccgaaggccgcatcattcccgatgaggagatcaagaagaccctcgcctcccagcacccgtaccgcaagtgggtggaaggcaactcggtcgagatgagcgatctgccccgccgcgagcacgtgagccactccggacagtccgtccagcgccgtcagcgtgccttcggctacaccgaagaggatctgaagctgttgctcactccgatggccaacaccggtaaggaaccgctgggatccatgggtaacgatgcgcctatgcccgcactctccagccgcagccgcatgctgttcgactacttcacccagaagttcgcgcaggtcaccaacccgccgctggactgggagcgtgaggagatcgtcacctcgctcgaatccgccatcggccccgagcctaacctactggccgattccgagctgcacgccaagaagatcctcatcccgctgcccgtggtcaactctgatgagatggcccagctcaagcgccttgataaggcccgcatcctcggcggctactatcgcccgtacgtggtcaagggcctctaccaggtcgccggcggcggcaaggccctcgaagagcgacttgacgagatctttgccgaaatcgacgaggccatcgccgacggcaagaacttcatcgtgctctccgaccgtgaatccaaccacacgtggggcccgattccgtccctgctgctgacctccgccgtgcagcaccacctgctgcgccgccacacccgtacgcagatctccatggccgtcgaggccggcgacgtgcgcgagattcaccacgtcgcactgctgatcgcttatggtgccgcctgcgtgaacccgtacctggccttcgaatccgttgaggatttggcccgtaacggctacctcaaggtcgacgcggacaccgccgtgaagaacctcaccaaggcgctttccaccggtgtgctcaagatcatgtccaagatgggcgtctccaccatcatgagctaccgtggcgcacagctgttcgaagccgtgggcctgagcaaggaagtcatcgacgaatacttcaccggcaccacctcccgtgtgggtggcgtgggccttgacgagatcgccgaagaagtggccatccgtcaccgcgtggcctacccgaaccagtggagcgcatccccgcaccgcaacctgcgcacgggcggcgactacaagtggcgtcgtaccggcgaggaccacctcaacgatcccgaggccatcttcctgctccagcagtcgacccaccgtggcgactaccagatgttcaagaagtattcgcaccacatcaacgacacgtcgaaccgactcatgaccctgcgtggcctgatgaagttcaacaacaaccgcaagccaatcgacatctccgaagtcgagccggcctccgagatcgtcaagcgcttctccaccggtgccatgagctacggttccatctcacaggaagcgcacgagacgcttgccatcgccatgaattcgattggcgcacgctccaactccggtgagggcggcgaatccgacgatcgtatcaacgacccgcagcgctacagccgcatcaagcagatcgcgtccgctcgcttcggcgtgacctccgattacctcgtgcacgccaccgatttgcagatcaagctcgcccagggcgccaagcccggtgagggtggccacctgcccggtgccaaggtcccgccgtggatcgccaaggtccgtcacgccaccccgggcgtggagcttatctccccgccgcctcaccacgacatctactccatcgaggatctgaagcagctgatcaacgatgcgaagatggccaacccgaaggcacgtatccacgtcaagctcgtttccgagttcggcgtcggcaccatcgcggccggtgtggccaagtgccatgccgacgtggtgcttatctccggctatgacggcggtacgggtgcagccccgctcaacgccatcaagcacgccggcaccccgtgggagatcggcctgtccgaaacccagcagacgctgatcctgaacggcctgcgctcccgcatcgtcgtacagtgcgacggcgagctcaagaccggtcgtgacgtggtcatcgccgccctgcttggtgccgaggaattcggcttcgctaccgcagccctgatcgtggaaggctgcgtcatgatgcgcgcctgccagaagaacacctgcccgcagggcattgccacccaggatcctgagctgcgcgcccgctttaagggcaagcccgagtacgtggtcaacttcttcatgttcatcgctgaggaggtgcgcgagatcctcgcccagctcggcttcaggactcttgaggaggccatcggccacgttgagtgtttggatcaggacgaggccatcaagcgctggaagtccggcggcatcgacctgaccaacgtgctcaagcaggccggcccggtacccggcacgatcctgcaccagaccatcgagcagaaccacgagctggagaaggcactggacaacaagctcatcgaacttgcccagccggccctcgaacacaaggaacccgtgcgcatcgaaatgccgattcgcaacgtcaaccgtacggtcggcaccatggtcggctacgagatcacccgccgttacggcgaggaaggtctgccggacgacaccatcgacatgaccctgcacggttccggaggccagtccatcggtgcgttcatcccgcgcggcgagaccatgcgcatctacggtgaagtcaacgactacgccggcaagggcctgtccggcggtcgcatgattgtgcgcccggaagacaccgtcaccttcgacaagcacagcaacgtcatcgccggcaatgtcaccggtttcggcgccacttccggccagatgttcgtagccggtcgcgccggcgaacgtttcggcgttcgtaacggcggtgccacgttcgtggtcgaaggcgtgggtgaccacggctgcgagtacatgaccggcggcactgttgtggtgctcggccccaccggacgcaacttcggtgcaggcttctccggcggtaacacttatgtgcttgacctcgatatgaagaaggtcaacccgggtgccatcaagtccggtgcactgctcttcgagtccctgaactccgaaactgcaaaggtggtgtacgacctggtcaagcagcacgccgaggagacctgctcgcagttcgccgctgctctgcttgaggactggaacgagactgtgaagcgattcacgcacgtggtgccgaagcagttcgtggccatgaccaaggccatggaagaagccaaggccaacaatgtagatttcaatgcgcccggcgcctgggaaaaggtgtacgagcaggttatggaaggagcgcgctgacatgggcgacccgagaggattcctgaaggtccgtacccgccgagagctggctgaacgccccgttgaggagcgtatcaaggactggttcgacgttcacgccgaaaccggcctgcaaccgtggacccaaacgcaggcggcccgctgcatggattgtggcaccccgttctgcatgaccggatgcccgctgggtaacctgattcccgagtggaacgacttggtccgtcagggcaagtgggaagacgcctacaaccgtctgtccatgaccaacaacttccccgaagtcaccggccgcatctgcccggccctgtgcgagcaggcctgcgtgctcggcatccaccagccgccgaccatgatcaagcttgacgagcagaccatcattgaccaggcatgggatttggactacgtcaagccgctgccgccgcagcgtctgaccgaccagacggtcgccgtcgtcggctctggccctgccggccttgccgccgcacagcagctcacccgcgccggccacaccgtcgtcgtctacgagaaggacgacgccatcggtggtctgatgcgttacggcatcccgaacttcaagcttgagaagggtctgcttgaccgccgtgtcaagcagatggaggccgaaggcacccgcttccgcaccaacgtggaaatcggcaaggacatcacgtgggatgacctgcgtgaccgttacgacgccgtcgtggtggccatcggctcccgcgtgccgcgcgatatgaagattccgggccgcgagctcgacggcatccacttcgccctcgacttcctgcccgacgccacgcgccgtatcttcggcgtcaagccggtgcacgacatcaccgccaaggacaagcacgtcatcgtcatcggcggtggcgacaccggttccgactgcctcggcacctcgatccgtcagggtgcgaaggacgtcaccgtgctacagatcatgccgaaagagccgtcaagccgtccggacaacagcccgtggccgaccttcgcccgcacctaccagaagacctcctccatggaagagggcggcgagtacatctactccaccgactccgtgaacttcgagggcaccgaagaggagaaggccaaggtcaccattgataactcgaccaccgccgaaggcttcgtggccgatgagcgtggtcatgtcaccggcttgaaggtcgtctccgtggctcccggcgaaaatggtccgttcactcgccagcctggcactgagtgcgtgctgcccgccgatctggtcctcatctccgtgggcttcctgcacccggacaccgagaccatcctcgaccagctgcccgtcgaactcgacaagcgtggcaacatcgctcgcaatgacaagttcgccacctcccaggatggcgtgttcgtgtgcggcgatgccggccgtggccagagcctcgtggtctgggccatcgccgaaggccgctcctgcgccgcagccgtggacgagtacctctccaaggaaaagagcgagctgccggccccgatcaaggccagccagcgtccgatgatgctgcctcgctgaatactttccaaacagaaacatgaaaatcccttcttcatgaggggatttttgcgtttctgggattaattactgccttgagtcttcagtaatgtttatatttcgagaatattgcatacatggttaacatgaagctcctatggtgtctttcgtcgccaaaaagatgacgccaaaatatttgggagagattcatgaacacacgtcatgtcacttcactggtcgcggccggtgcggcaatcgtcatgctgctcagcggctgcggatcgaccggtacctccaattccagcaatgcttcagattccaatatcatttccgtgtacggcagtgagccggcacacccactattccccggcaacaccacagaggccggtggcggcaaggttgtagaccaactgttcgcaggtctggtgacctacgatgcgaagggcggcatccacaacgaggtagcagacagcatcacctccagcgacaacgccacgcattacgtcatcaagctcaagagcggatggaagttcaccgacggcactccggtgaccgcgcactccttcgtaaacgcatggaattacaccgccaacagtgccaacaagcaggccagcgccagcttcttcagcacaatcgaaggctatgatgatctgcaaaagccggacgtggaccccaaggccacgctgagcggcctgaccgtcgttgacgacaacaccatcgatgtcaagctcagccagcccgactcggcattcccggtcaaggccggcagccacgcctacatgccgttgcccgaatccgcgtttaaggacccgaagaagttcggtcagcacccagtgagcaacggcccatacaagttcgtgtcctggcagcacaaccacagcatcgaaatggtgaagaaccctgactacaagggcaatcgtgtcgccaagaacgatggcctgaacttcaagatctatacctcgcctgattcggcatacgccgacctacgcggtggcaacctggacttcacgaacacgattcctgacaccgcacttacctccttccaatccgacaagtcgctgaaggcatacaacgagcccggtggcaatacgctcaccttcacc

SEQ ID NO: 1232 - DNA, 16823 bp, Unknown
  R81_24m  MAG No. k141_25371
aatgtagggtttctgaatcgtgaagggctcgtagcgggcgaacccgtgacggtccatgactgtcctcgtttgaatggcgatcggcgcgcatcgtggtactgccgaccggtattttctcacgtgaatgaagcagcttcagggaatgagtaacagaaaagccaccggcgacacgccggtggcttcaggtgagctcctgcggctgggcttgaaccagcgaccgtccgattaacagtcggatgctctgccaactgagctacgcaggaatatctgctgtgtttgagatttctctcgcgcacaagtcacatatcttacatgcttgccacgaaaaagcaaattacatgcgtgtagggcatgtcgcgccgaattccgcagaatcggactcatcgaatacccactcatacaacatgatgacgatgcggcgatactgtcacgcgaaatttcattgtggataacttcggaagctggaaccacataggtcgttctggctggacatcctgtttcggacccctcaaggtgggtatcaccggcaaagaagccggaatcgcatcacactcacactatggggaggaatctcatgaatgcaccactgttgtttgattggcgtcgcgacgaagcccgacgtgccagcaggcggcgtcagcaggcgcgtcagcgggctcaggaacggcaacggcgtatggatgccataatcgcgttggccgccgttatcggcctgctgcttgccttgggagtgggactggcatccacgcctcagcatgttgcgcatgcggatactgcggtgaccggagatgcggcatacacggtggaggatttcaccgatatgtctgatctggcgtggcgcaatggcaatcagtgcgaatcccggttcgactggccggtcgacgatccacgggtcgagcaacagttcgagcggccgatcaacccgtgggcaccaggtcatcgtggcgtggatcttgctgcggagcaaggtaccgtgattctgtcaccacaggcagggaccgtgagttttgctggcaaagtagctggcaaagatgcggtgagtgtacggcatcgtggaggtgtcacgtcgacattcgaaccggctgttaccgagctctcggtgggggatacgatctcccgcagacagcccgtaggcatcgttgagggcaactcggaccattgcgaagaccgttgcctgcattggggcctcaagcgaggaacggccgactatcttgacccacagcaatatgcggggagtcgaaaaatcgtactgaagccgtcatgattcagcaatgtttgtcggccggaacagggccgtacggaagaggcatcgcaggcggctagcggcgtgacgagtatgaatcacagaccggcatcggccaaggagatatatccgggggcgatcagcgcggacttgagattgctggcgctgacagccagcaacggttcgttgatggtcgggatcttcttcacgccgcctacctcggagttcctgattgaaggcatggaattcagcgcttcgttcttgttgagcctggcgcaggcctgagcgatatccgtggcgatggtctgtctgtcttccatgccggtcatccattgcttgccattgacgatggatgggatgttcgagacgtacgcgccgtatccggtcaccagaggccattgcgagtcacggtccttgtcggaagcggaggtgtccttatccgcatcgtcatcggaactggatgagtcgtttgcgttgtcgttttcaggggatttgatcgggtccggcactgcgtcgcggctgagatccctcttgccggtgatattgccgacaatgcccgagatggtgatctgcggattgatatcggcggcagagccggtgtatcccagatcgtccaattccttgacgacctcggaggcgatatagtcgttcatcgtgatgatgccgtcaatacgggtgagtgtggactgcccgtcggtttttgccagacgcttgtcaagcactttcgcagtggagccttccttggcggcatcgtaggccacggcttgccaatcgttttccgtggatttgccgtccaaggtgcctgaagggctttccacaacgcccttctgatagtaggagcccagtacctgccagataccacggaacgcctcttgggcgaacgtggaatcgttggcgttgcctttttcgtccacggcggtgtatggcagcagcacctcaatgtatttggggttgtctttactggccttatccaacttgagtttggacaccatcttttccgcctgtagcttgccgatggtctgggcgtccgagaacttgacgaaggcgtccggcctatacccctcgatgctgttgccgagcaataccacatgcatgccggattccttggccagcttgagcgatgagaccagccggtccacggcctgcgcctgctcgtccgatgcagtgccgtcgctctcagtgttggacgagtcatctttggaagagctgtcttcggaagaatcaccgtcagaagtagctccctcatccgtggcatcgttggtgctcaggttctggctgacgtaatcgccgtattggcgagtggaagcgtcggcctcgactactggagccacgagcaatgtcatgttgtcgggcgcgatggcaatgccggaatcgtccgtggtgttattcgaaagatgatcgaccacaaagtcttggatggcgcggctttgcttgtccaacgagtcggacgtcgtatgatcgatatcgcctttcttgaaaccggcgtcgaccagggccttggttaggtcgggcaccagcttcgcccatttgttcagtggcgtctgctgattcagcgtaatgccgtccgaaggcgtgaacacggccacgccgccggcagaattggacgtcaccgtggtttgaccatctacaacggtcttattgtctgaggtgcacgcggtcagtgacagcaccatcgcgcaggatgcgacaatggcggcgagcagggtggttgagcggcgtgcgaacaccataagcggcgaaacctcctcaagcgggcgtgaaaacaaactgaatcacgattctagtaggccgtatacgaaaaagtcccggaccagtggacaaatcgccacatatccgggaacaattaggggtatttcgcgcgtgtatcgaacaactgtcatgattgtcgtgctgaggaacattccagatgaagcacgacaatcatgacagttggcgacatgacatgacccatgtaggtccgcacgatgtgttcgatgatttactcggccagagccttggccaggttctcgtccagcgcgttcatgaagccgtcggtgtcgagccacggttcgtccgggccgatgagcatggccagatccttggtcatctgaccaccttcaacggtgtcgacgatgaccttttccagcgtctcggcgaagtgacggacttcgggcgtgccgtccagatcggcgcggtgcttgaggccgccggtccacgcgaagatggaggcgatcgggttggtggaggtcttctcgcccttcttccagcggcggtagtgacgggtcacggtgccgtgcgccgcttcggcctcgacggtctggccgtccggggtcatgagcacggaggtcatgaggcccagcgaaccgaagccctgggccacggagtcggactgcacatcgccatcgtagttcttgcaggcccagatgtaaccgccgtgccacttcagggagctggccaccatgtcgtcgatcaggcggtgctcgtaagtcaggccggcctcggcgtacttgtccttgtattcggtctcgaacacctcagcgaagatgtccttgaattggccgtcgtaggccttcaaaatcgtgttcttggtggacaggtacaccgggtaatgacgcatcaggccgtagttgaagcaggcacgagcgaaaccgcggatcgaatcgttgacgttgtactgcacctgggccacgccgccgtcttcgccgtagttgtagaccacgtgctgaatcggctcggagccatcgtccggagtgaaggtgacggtcagctggccggcgcccggaaccttgaaatcggtggccttgtactggtcgccgaatgcgtgacgggccacgacgatcggcttggtccagccgggcaccagacgaggcacgttgctcatcacgataggctcgcggaagatcgtgccgcccaggatgttgcgaatggtgccgttgggggacttccacatcttcttgagaccgaattccttgactcgggcctcatcgggggtgatggtggcgcacttgacgccgacatggtgcttctggatggcgtgggcggcgtcgatggtcacctggtcatcggtctcgtcgcggtgctcgatgcccagatcgtagtagtcgaggttcacgtcgaggtacggcaggattaggcgatccttgatgtccttccagatcacgcgggtcatctcgtcgccgtcgagttcgacgacagtgccttcgaccttgattttggccatgcttcctcctgatagatggtgtgaagatgatttagtcatagcgcatgtttgtaacgacttgaagcaatcgtccggtccgtgggaaacgaccttgttggcgtcccacccgggcaataggcttacaaccatgtctcaggaaattgaaatcggtttgggcaaaaagggccgtctcggctacgcactcgacgatgtggcgatcgtcccctcccgtcgcacccgcgaccccgaggacgtctccacctcttggcagatcgacgcctatgagttcgatgtgccggtgatcggcgcccctatggattcggtgaccagcccggccaccgccatcgccatgggtaagatgggcgcgctcggcgtgctcgatttggaaggtctgtggacccgttacgaggacccgaccccgctgctggacgaaatcgccgggctgccggccgatcaggccaccgagcgtatccagcagatctatgccgagccggtcaagccggagctcatcacgcaacgtctgcacgagattcgcgccgccggtgtcaccgtggccggcgcgctctccccgcagcgcacccagcagttctactccaccgtggtggacgcgggcgtggacctgttcgtgatccgcggcactgtggtctccgccgagcacgtctcctccggtcaggaaccgctgaacctcaagaagttcatctacgaccttgacgtgcccgtcatcgtcggcggcgcatccaactacaccgctgccctgcacctgatgcgcaccggcgcggctggcgtgctcgtcggcttcggcggcggcgcggtctccgccacccgccagaccatcggcgtgcaggccccgatggccaccgccatcgccgacgtggccgaggcccgccgcgactacatggatgaatccggcggccgctacgtgcaggtcatcgccgacggcggcatgggcgactccggcagcttcgtcaaggccctggccctcggcgccgacgcggtcatgctcggcgcgccgctggcccgcgccaccgaggcccccggcaagggcacccactggggttccgaagcccgccaccagacgctgccgcgcggctaccgcaccacggtcggcacggtcggcccgctcgaacaggtgctgttcggaccgagccaccaggcggacggcaagaccaacttcatcggcgccctcaagcgcgctatggcctccaccggctacgtcgacgtgaagaacttccagcgttgcggcatggtggtcaacccgtattccgcacgataatcccgattaccccctgaagattgggggtttgccctccatgcaggaggcttaacttgcccgaaggcgcgctcaagtcgtttgacttggcgcgcctttcgtgatgttgtagtacagacgctcgccgatgatggtgagttgcaagggggcttgaaggggtcatcatggagtattcgggatttttccacggcacatatcagtacgggccgttgccgagttatgacggattcatcgttgtggagctgtcggatcgcccggtgcggtatcatatccaacccacattcataggcgggctgaatgcgaaggaatgtcattccatggccatggctgcatgccgcatcgcctgcacatcggcggacgcgatacgtggcaaactcagcgtcgcacatctcaacagagccatgacaaaaccatgcctggaacggctgcaaaccatgcaatacctgctcggcacccacatggtcactcatccggagctcaaagcgaaattctgctatctgcccactgtccccacattgatcgacggcatgatcaccggcaaggacacgctggaaatggcggtattcatgaccatcggccaggaaaatctgcgagtcaacctcaaactgaagttcatcggttctcgatggatgtgcatctatgccgatctgggctgaccagacggccccgccctcacaccgattcctacgctggcagcggaagacggttctgccgtgtcataggctggttcgcctatagtagtgaccatgcgtgaacatgtagaagaacccagatatgtcaccaccgatgacgacaccgtctactcgctgctggccaaacgagcagctcgcacgccggatgacatcatcgcggaatggcaggatgacaacacccaccaatggcgcggcgccacagctactgaaatgctgtcccgcgtacgcgaggtggccaagggcctgttgggacttggcgtcaaagccggcaccatggtgctgatttactcgcctacctgctatgagtggggtgtggctgatttcgcttgcgcggcaatcggcgctgtggttgtgcccgtctatgagaccgattccgcccgtcagaccgcgggcatcgtcgaggaagtcgatcccgccatcgcctttgccggcgacttccagcgcgcacagacgcttgagcagatccgtgtcaatcatccgggcatgaaatacgtgttcaatttcaaggccgatggccttgacgctgtcgctgacttcgggcatggcgtatccgatgagacgttggatgcggctatcgctcgtatcaaagccgatgatctgcttaccgtggtctacacctccggttccaccggcaagcccaagggcgcgatgctctccaaccgcaattacacgcacatcgtgcttaacggctacgagattctgcgtggcatgctgtacgacgacaaccgtctgctgctgttcctgccactggcgcactgcttcgcccgctacatccagtacgtgtgcatcggtggctgcggcgtggtcggatacattcccgacgccaagcgactgctcgccgatatccgcagcttcaagcccacctacctgctgggcgtgccacgtgtgttcgagaaggtgtataacgcggcctcgcagaaggctggtgccggcatccaggggcatatcttcgcccagtcggtcaagcacttcgtcaagtggagcaaggatgagcaggccggccgcggccattcgttcatcgagcgcatgcgccattcgttctacatggccacggtgggcaaatccattcgttccgctctcggaccgaacctcaaatggctggcctgcggtggtgcgccgctcaacgtggatttggcccacttcttcaacggcatggatgacatcaccttcatccagggttatggcatgaccgaaaccgccgctccgatgctcgtcaattgggaggacgacaacgaggtcggttcggtcggcaagcctgggcctggcatgggcgtgcgtcttggcgaagacgatgaaattgagctgaccggcccgaacgtgttccttggctactacaagcagcccgaactcaccgcacagacgatgactgccgacggctggatcaaaaccggcgatctgggtcgtatcgacgaccgcggcttcaccttcattaccggacgcaagaaggacatcatcatcaccgccggcggcaagaacatcagccccgccccgatggaggatgtcatcgacacctgcccgatcgtggctcatgcagtagtagtcggcgacggcaagccgttcgtgtccgcacttatcgagctcgaccccgaaatgctgcattcctggctggaaggtcagggcctcaatgccgacatgacactcgccgaggccagcgacaacgacgcggtgcgtgcctttatccagcagtacatcgaccaggccaacgccaatgtctcccgcgctgagtccgtgcgcaaattcgcggtgctggatgaggaattcagtcaggagcacggcacgctcaccccgagcatgaaagtggtgcgtcccaaggtattgcagcgctacgccaccgtcatcgaagaggatctgtatgcgcccaagccctccaacaaaccgctgcccgccacagccaagatcatcgacagcacgctggagaccgtcaagaaatcctccgaatcggtcaagcaggcgtccgaacaggtcaaacaggcctcggaacagatgaaaaccagcgtgtctgattcgattgctagcgtgtcggagaagatcaagaagtcgaaggccgaacccgaagagggcgagaccggcgattccgccgacaatgccgacaatgccgctgacaccggcagcaagccggaccggccggctgacgagaagaacgaggagtaacgagaagtggccatccgtgagatcagggtcgtgcccgacccagtcctgcgcaccccctgcgatgagatcaaggaaatcaccccggccgtgcgccgcctggttgacgacctgctggaaaccgtggacgatccgggccgagcgggcctgtccgccaaccagatcggcgtgagcctgagggccttctcctacaacatcgacggcaaagtcggctacgttctgaaccccgtactcgaggaaaagtccggcgagcagtacggcgatgaaggttgtctgtccgtgcccggcttgtggtacaagacccgtcgggccgactacgctcgcgtgcgtggcatcgacctggacggcaacgaggtcgtgctcgagggctccgggctgatgggccgtatgcttcagcacgaatgcgaccatctcgacggccacgtgtatttggatcgcctggaaaaggaagaacgccgcgaagccctgcgctacatgcgcaatcgtcaggcgaagtagtccatacccggctcccgctggcgggagccgtcgaacgtagtgagactgagggtggttctgccggtaccgcccgtaactcccctcagtcgcctatggcgacaggttcccctcaaggaggggaacctgtcttcttagtactggctccgtgctattctcgaaacttgtgtgccacccggcaacggacgcagtcgctggcgtccggaaccacccaatattgtcaaccggcacacaacaaattcgcgtcatgctcgcgacggcctgtgtcggtcggctgcacaactcgtgaaaccgggggagtagctgcacgcaggtgcgcatggccaggcaagaaccgacaatgaaaggtagtaataccatggctcagatcactatgagcgatatgctgaaggctggcctgcacttcggccaccagacccgtcgttggaacccgaagatgaagcagttcatcctcacccagcgcaacggcatccacatcatcaacctgttcaagtcgctcgacatgatcgacaaggcgtacgacttcatcaagaccaccgtggcccacaacggcaccgtgctcttcgtcggcaccaagaagcaggctcaggaagctatcgccaaccaggccacccgcgtgaacatgccttacgtctccgagcgttggctcggcggcatgctgaccaacttccagaccgtctccaagcgcgtcaaccgcctcaaggaacttgaggagatggacttctccgacgtgcacggctccggcctgaccaagaaggagctcctcctgctcgagcgtgagaaggacaagctcaacaggcagctgggcggtatccgcaacatgaaccgcaccccgtccgcgatgttcgtcgtcgacatcaccaaggaggccctggctgttgaggaagctcacaagctgggtatcccggttgtcgccatcgtcgacaccaacgccgacccggacaccgttgagtacccgatcccggccaacgatgacgccatccgcggcattgaactgctgaccagcctgatggctgacgccgtcgccgaaggtctgctggagcgctccggcgccaacaaggccgagggcgaagccgccgagcagccgatggccgcttgggagaaggaactcctgaccaacgaggctcctgccgaggcttccgctgaagccgccgctccggctgccgccgagggcgaaaccgccgaggcccccaaggccgagtgatgctctacgatgggaagtgcctgaataagcgcttcccatcgttcatgggtaagcaaaatttctcaaggagaataatcaatggcagcaattaccgccgcactgatcaagcaggttcgtgaagacaccggcgccggcatgctcgacgtcaagaaggctctgaccgaagccgaaggcgacgtcgcccgcgccaaggaaatcatccgagccaagggtatcgccgcagccggcaagcgtgaaggccgcaaggctcaggaaggcaccatcgcctccaaggtcgtcgagaccgccaatggcgagaccggctacgccgtcgagctgaactccgagaccgacttcgtggccaagaccccgaagttcgtcgagttcaccgaggaagttctcggctacgccgtggacgccgacgccaactccgctgacgagctgctcgaggccaaggctggcgacaccaccgtcaagatggctgtcgaggagtccgccgccctgttcggtgagcatgtcaaggtcggccagttcgccaagatctccggcgagcacgtcgaggtctacgcccacaagaagtccgccgagatgccgccgagcatcgtcgccatgatcgccaccgacaaggccggcgccgccgtggctcacgaagctgctctacagatctccgccatgggcgctaagtggctgacccgcgaggacgttccggccgatgtggtcgagtccgagcgtcgcgtggccaccgagaagtccctggccgagggcaagccggagaagatcgttccgaagatcgtcgaaggccgtctcaacgctttcttcaaggaagtcgtgctgctcgagcagccgttcgtcaaggacccgtccaagaccgtcggcgacctgttcaaggaagtcggtggcaacgccaccgcattcgctcgtgtcgaggtcggcaagggcgaagaggagtgagcctaaggcttactccacgcgcttagcgtaatttcaacgaaacgccatccggttattcaataatcggatggcgtttcgctattccaagggtgtcgttgctagggggtgtcgtcgtaaaccgatacgcttgtctacggataatttcgcactttcggttttgagaaaggcatgatatgactgatagcgacaagccgcgcagagttctgctcaagttgtccggcgaagcattcggtggtggcaaggtcggcatagatacccatgtgattcgtcgcattgccgaggaaatcgttccggccgtacaacagggtgtgcaggtggccatcgtggtcggcggcggcaacttcttccgcggtgccgaactgcagcaggccggtatcgatcgttcccgcggcgactacatgggtatgctcggcacggtgatgaactgcctcgccctgcaggacttcctggagcaggagggtcaggccacccgcgtgcagaccgccatcaccatgggacaggtcgccgagccgtatattccgctcaaggccatccgtcaccttgaaaagggtcgcgtggtgattttcggcgccggtgccggcatgccgtacttctccaccgacacggtttccatccagcgttccctcgaaatccactgcgacgaagtgcttatgggtaagaacggcgtcgacggcgtctacaccgccgacccgcgcagggacgagaacgccaagcgttttgaaaccctgagctacaatcgcgccctcgtggacaatctggcagtcatggacgcctccgcactgtccatggcccgcgacaacaagaagcgcatccgcgtcttcggcctcgaagagccgggcaacgtgacccgcgccctcgtcggcgatgaaatcggtacgctggtctccaccgccgaatcgcgcgtggccgagtaagccgcaaacgcctacaatcgaatcaaacgttcatagacgaacaacacagacgaacaccaacacacaaggagtgaatatgtctcttatcgaccaggccaaggaacagatggccaggaccgtggaaaacaccaaggaaaacttctccggcatccgcaccggtcgcgcaaacccggccctgctcaacggcatcaccgtggactactatggtgcccccaccccgattaaggccgtcgcctccatcggcgttcccgaaccgcgcaccctgtccgtcaccccgtttgacgcttcccaggccggtgccgtcgaaaaggccctgcgcaactccgacctcggcatcagcccgaaccgtgatggcaacgtcatccgcctgaccatgccggaactcaccgaggaccgtcgtaaggagtacgtcaagctcgccaagggcaaggccgaggacggcaaggtcgccgtgcgcaacattcgccgtaagaccaaggaaaccatcgacaaggccgtcaaggacggcgagatgggtgaggacgaaggcgatcgcctgctgaaggatcttgacaaggtcaccaagtccgttaccgacgagatcgatactctgctggagaccaagcagaaggagatcatggaggtctgattcagaccaggtccggagaattatggaacgcaacgaacaactccatgaagaggccgaggagacgctcgaccggatcaacaagaagaccggccgcaacatgccgcaggccatcgccacaggcgcggcactggtcatccttattgtcgcgtgcctgctgctcagcgtcgacctcttcgtgctgctggtagtcgtgttcatgattctggcgctgtgggagctcagggtggacttcgccaccgtaggcctgcacatcccggtgttcatgctgtggctgtgcgcgtccttcaccctcatcgccacctattattccccgtaccatctcatcacgatgtcgctgagtatcatcgtgtcgattattctggtcgccatcgcggccagcgcaaaaatcagcgtcggcaaccgcctatctctggcggttgccggcaaactgtccaacacggatgccagcgcgcgcctcgaatcctcgttcaatcatgagggcggggaacagcatcattcccggctcagccatgtggctgtgtccgtgcttaccgtgttgtacattccgttgctggccagctgcatcatcatctcgctgactttcaatgggcatccgattgcacacgccatcatgctggtgttcctgcccgccctctccgatacgggtggtttgtttgccggtgcctggctcggcaagcacaagctcagcccgcgtatctcgccgaagaagtccgttgagggcctgatcggctcgatgctcttcgccatggctggcgcattcgccgtattcgcatgcacgtatgatgcctcgaaatgggccactcgttggtgggtgccgatcgtggcgggtattctcatcggcgccgtgggcacgttcggtgatttgtgtgcttccatgctcaagcgcgatatcggcatcaaagacatgggccatctgctcaagggacacggcggtgtgatggatcgtgtggattccattttgatgagtgcaccgttcacctgcgccttgctgtgggtcaccggactgtgattcgcatgcctcgtgcatgaacaatgtggcatcgtgtgtatatcgcacggtgccacatgtcatatatgggggaaatcatcgttcaatatgcgttcgccatgggctaagacatgggccatctgattcgtatgcggcacgccgtatggtggattctgatatttctattgcatgtttgactattttctgatattgagagcgaagcgaacccatcatgaccacacagcatcctgacactccggaaaccggcattactcccggcggcacatcaggtgccttccgtgacgtgctatccaaggaccatgcccgccgtggtaagccgccgctgcactttgtggatatgacgcccgagcagcgcatcgagaaagcggccgaactcggattgccgaagttccgagtcaagcagctcgccaaccattactttggccatttcgatgtgaatgccgccgaattcactgattttccggcagccaagcgcagcgaggccgccgccgcgttcttcccgcagctcatcaccgaggtgacccgccaagtggcggacgaaggcaccaccatcaagaccttgtggaagctgttcgacggctccctcatcgaatcggtgcttatgcgatacccgacccgcaccacgctgtgcatttcctcgcaggtcggctgcggcatgggctgcccgttctgcgccaccggcaagcttggcctgacccgtaacatgtccaccggtgaaataatcgaacaggtgcgtgtggccgccaaaatgatgcgtgacggcgaagtggccgggggagagggccgcctgagcaacatcgtgttcatgggcatgggcgagccgatgggcaactacaactccgtgctgtccgccgtacgacagatttccgccatgcctcccgaaggcttcggcatttccgcgcgcaacatcaccgtatccacggtgggcgtggtgcccggcatcaagaagctcactgccgaaggcattcccgtgcgtctggccgtttccctgcatgcccccagcgacgaactgcgtgacgagctggtgccgatgaacaagcgtttcaacaccacgcaggtgttggatgccgcgcacgattattggctggcctccaagcgccgcgtcagtatcgaatacgcgctgatgcgcggcatcaacgaccaggccgagcatgcgcagttgctggccaagaggcttaaccattacggcgacaactgggcccacgtcaacccgattccgctcaaccccatcgagggctcgaagtggaccgcctccaagccgggagacgaacagcggttcctggagatcctgcaccgcgcgggcatcaccgccacactgcgtgacacccgcggccaggacattgacggtgcctgcgggcagttggccgctaaggagcggtagttacttcagcgcatccttgattgcgtccacgaagtagtccaaatcagcgggcttgcgggacgtgatgagcttgaagccgttggcgtcgtccacgtgcagctgctcgtcgacgtaatggccgcccgcgttctcgatatcggcggcgatataacggcagggcgcggcggtcttgagatcgcgcagcgggcgcgtcagctcggattctcatattccagaaacgggtgcggcgcatgtaacgggcggtaggtagtctgaaggactgtaatgcaaagccgaacaggggagtgaagcatgtcgttggcggtacgagtcatcccgtgcctggacgttgacgccggtcgcgtggtgaagggtgtgcatttcgaaaacctcaaggatgcgggcgacccggtggagctggcggccgaatactatcgtcagggcgccgacgagatcaccttcctggatgtgaccgcatccagctcccaccgcaacacgatgattgacgtggtctcccgcaccgccgaacaggtgttcattccgatgactgtgggcggcggcgtacgcacgcccgaggacgtcgactcgctgctgcgctgcggtgcagacaaggtcggtgtcaacacggcggccatcaatgacccgtcgcttatcagccgcgtggccgaccgtttcggcaaccaggtgctggtgctctccgtggacgcccgccgcgaaaagggcgagcaacacacgcaatccggcttcgaggtcaccacgatgggcggccgcaaatccaccggcattgatgccatctggtgggtcaagcgcgccgagcagcttggcgccggcgagattctgcttaactcgatggacgccgacggtaccaaggaaggctttgatctcgagatgattcgcgccgtgcgcaaggaagtcaagattccgatcatcgcctccggcggtgccggcaaggtcgaggacttcccgcccgccatcgaagcaggtgccgacgcggtgctggccgcatccgtattccattacggcatcctgaccatcgccgatgtcaaggcggaactcaagaagcacggctacaccgttcgctaaacgaatacaccttgctcccgctggacgaacaatccagtggattgttcgtagcagtgcgctatgcacatgtcgcacataatccgggagctgtcagcgaagctgactgagggtggtccacataaggaagataggtatgacagacactacatacgacaattccactgaactcgatccccgtattgccgcgcgcctgaagcgtgacgtcaagggtctggtcgccgccgtcatccagcagtacgacacacacgaggtgctgatggtcggctacatgaacgacgaggcattacgccgcacgctgaccaccggccgcgtgaccttctggtcccggtcccgtcaggaatactggcgcaagggtgatacctccggccatgtgcaatacgtcaagggcgtgtccctggattgcgacggagacgcactgctcgtcgaagtagaccaagtcggtgccgcctgccacaccggcaagcgcagctgcttcctcgaaggcggccccctgtccgtggtcgaaggccatcgcccggccgagcagtagaacgggcttccctgactgggggaagccgaacgaccgcgtactacgaaacaagacaacgagtggtaagtaaaggagcgaatatgagcgaatgcagcgtcaaacacctgaagtggggcgccacctggcccagtcgcggccag

SEQ ID NO: 1233 - DNA, 5367 bp, Unknown
  R81_24m  MAG No. k141_25434
cgactccgaaacaccctccgcgtacgcatggcagggcaacaactgttggacgttggatgcgctgaccgcggcacgcgagcagggctatgacacggtgattgccgatgcctctttcgatgccgaccagactgaagccgtacacacaggcacctacgtggtggatacgcctgccggcgatgtcaccgtgctgaaggagcaatcgaccttgggcacgctggccaagggccaacccaccagcacggacgcgcaggccgagtccagcgatgccggtcggttggcccgactggtcgctcagagcgcgttctaccagatggaacagccctatacatcccgatacctgcttatgacgttctcccgcaccacggaggccagctggatcgatcaggtgatgagcgccttcgagcaggcctcttggttgaatctgacggatctgaagaccatggccaaggccgatccgtacaatgtcagcgattcggtcaatcccgacaaggccgatgatgccaacaccgccaatacccggtcggcattgagacagttggccgacagccggcatgacatcatgcgcatggccacctccatattgaggaacgagattgattccgacgaggtctcgtcgttggccccgcaggccctggcccggcaggatgccaatgacaccgtctcgcacagcaacgatccgacgcaatggattggctctttgctggtgctgcatgacgatatggcgctgcgatccatgtctggctccccccagccgacagccacgcgaaaagccatggtcagagccgcgaaaacactggccagcgatcttctgaacggcgtacgcatcaacccatcggaatcaatatccgtgttcagcgaatccgcgaaaatgccaatcaccgtcagcaatgaccttccttatgccgtcagcgtgcaggtcaactcgctgactgactccatgcagatcgtcacctcgcgaaccactgacatcgatattcccgcgcatagcgacgctcaggtgaccttcaccatccgcgtttccacttccggctcatcgacggcccatgtgtcgctgagcgaccgggaaggcaacagcttcggcaacacgcaggataccgcgatcaccagtgtgatgcgcgtcagtgatgccagcggtttcattatcatcggcttcgccgtgctactgtgcattatcggcctgtggcggcagttccatcggaagaaggaccccgacgaatgagttcaaccgtaggtcgtaattccctgatcatggccacgggaaccgctgcttcccgtgtgaccggtcagctccgcacgattcttctcgctgcggccatcggcaccactggattggcggccaacgcctatcaggccggttccatgattccccaatccgtgttcacgctggtgtccggcggcatcttcaacgccgtgctggtgccccagatcgtgcgcacgttgaaagaaaaagacgcccaagaacgactgaatcgtctggttacgttggccatcggcatcctgttggccatgaccgtggtgatggcggcggccagccctctgcttgcccgcctgtacgtgggtagcgacgatcaccagatgatagccctgaccacctcgttcaccctgtggtgtatgcctcaggtgttcttctacggcctgtatacggtattgggtcagatcctggccgccaaagaccatttcctcacgtatgcgtggagctcaaccggtgccaacattattagttgcgccggttttactggttttattctgctgttcagcaaggccaatgaacagcccctcgaattctggaccgccgacaaaatcgcgcttaccgcaggcacctggactttgggcgtggccttccaagcgctgatactgttcctgccactggcccgtatcgggttcaagtacaaacccagcttcgggcttggcggctttggactcaggtctatgggtcccgtggcgttaggctctttgggcgtggtggtcaccagcgagatctgcggcattatccttacccgtatcgccacatccgcaccgcagcgcgcccacgaactgacgggtgccagcctgttcagcgtggcaggcaacgcgacctatcagaatgcgtacaccctgttcatcctgccctattcgctcatcgccgtatcggtatccacggctatgttccccaaaatctcccgttctgtcgcagctgcgaatctggatgaggcacggcacgatctggtgagcgcgctgaacaacgtagggctgctgatcatattcttcgccgccgccatgattgtgttccccgaaccgattatccgcgcattgcttccgtccgtctcgatggacgagaccatgctgatttcctacgcgcttatcgccctatctgtgggcactcctttgggatcggcgttcctgctgatccagcgcacgttctatgcctttgaggacggcctgcaccccttcctgtccgcggtgatgcagtatggattcacctcggtattcatgatcattggcatgatggtacttcctcctgagcattgggtactcggcatcgcctgctcggtgacactcggtggattactggcgttgccgctgacattgatgatgttgcgccgcaagttcgaaggcaatcttggcggtcgggagatcacgaggacatatgccaaggccattgtggcggcgctggcttccggagttgtggtctggctgatcaaacgaccggtagtcgcactgttcggcgcggatattcgatcggtaggcgggcacatgagctggtggtctgcactggccatctgcgtggtgctcaccatcgtgctggccgtagtatatgtggctgtgttgtgggtgatacgcaccccggaactcatcagcgcctatcactcgatactggcccgtttacacaagactccggccagtgaggacgttgctgtgacagcccagccggaaaaagtcgacgatacgcaaatcaatcctgagacggagcccgtcaaggatagccccacacgtagaatatctaagaccagtctcgaacaccaatcacacggagccgaacgcactatgaaaccgcaactcggagacacgattctcaaccgatacaccttggtatcatcgttgcgtgaggagcctggcattcaggcatggaaagccaacgaccgtgtgttggcaaaggattgccagctgttcatcattaccaatcgcagcgctttcgccgcaatcgatgagctcgctggtcgcatcgccgccactcgccctgatcgtgtgattcccgtactgaaataccgtatggaatccgacgtacttctcattgtcatgccggtggacagcggccaatgcctgactgactacatggtggataccgacaagccgctcagctacagcgccatccggtcgattatcggagaatgcgccaacgtgctgcgcgaggtcattgcggatactcccagcagcatcgtcatcacaaccgacaccgttcgagtgactacctccggtgtgcagattgccgatgcaccatgtgccacgatgctggccgacacgtccgctaccgatctgcgtacggacggtcctgaacggtatgcgattcgccagcttgcggcattgctctatgccctgctgacacgcacgccaagccaagcgacacccacattcaatcttcgcgccttgccgcaagacacccctggcgaattccgcgtgatttgcaagcgtggattggccttaagcaagcccgacgagcacacgttgccgatggctgcccttgtagaactcgacgccttgttgggtaattggaagccgctctctgaactgagcgatgctgatatcgctttgccgagcgtggaaagcgattgctcgattaccaaggcgatactgaagcccgccaacgagaccgatatcgtgcctattcccagcacgttgattaacagcagcagtcttccggaattgtctattaccccttccctgccggttcagccggccgccgtccccgctccgcacgcgatgtcaccggctcctctgcctgatgggtccagtactgctgacggcaaccagtctcaatctgacgcccgccgtctgtttgacttcaacctttctgacgcctgggagcacgagaatctttccggtgaagacaccggtgactggtacagcgaaatgaatccggcccccatcggcggtccgggtgataatactcggttgacggtgcctattgttaccggcggtatttccgatgccaccgtgggagagacgaccagtcgtattcccgtgttcgatgtcagcggccgtgctgtggcccccggtgaggaatcgctgcgtgctttggaagaggagcaggcccgcattgccgaagtaagcgccattcctccgagcttcacaccgaaggatgtgccggatgacgaggatgacagcaagctgcccgatgaacatctgttcggcaaactgtcgaccaaggtcgttgccatcattgtggctctgatattggtagtggcagcggctgtttgggcagtgcatgcgttccgatcctccggagacaatcctgccgatgcttccagcaactccagtgaaggtgactggcccgatatcaatgctgacgctgtgccattcggtggcagcaagaacgcgacgaacggtggcgccactgacgattcctcaaagtcgagtgatgccactcagagcgaatccagggactcggcatcagacaagtccaagaagtccgagactgctgattcgtcgtccaagaagaccaaggccaagaagtccagcgataaggattccagcgctgctccgcaaccgcgccatgagaacaacacggcgtttacgatttccagcgccaacttcctgtcgaatcctggcggccaatccgggtacgcatactacatgcaccttgaccagccgcaggatgcgtaccgcatggttatcaccatccgcacatccggtggtaagggctatattcgcgcaaataccactggagaccccactcagggcgagcaggtggccgaattcacctttgctgaaggtggcactactgaggtgaagttcaccaaagccgtcaatacgcaggatctgctgctgtgggtgccatcgggtagcctgccgcagaaccagctgtacatcgagaaggtggaggtcttctaatcggcatctataccgataactgacccaagaagggcggtaccgttcgcatacattcgacggtgccgccctttcttcgcgtctggctgaatgacatggaatatcgtatgggggtgtgacaatgtttcacgtgaaacataacgtcatcattatcggttctggtcccgctggctacacggccgccatctatcttggccgtgcaggtcttaatcctgttatggtcactggtgcgttgtcgccaggtggacagttggtcaacaccactgaggtggagaacttccc

SEQ ID NO: 1234 - DNA, 9806 bp, Unknown
  R81_24m  MAG No. k141_25845
cggtgttctggccgtggtcagcaatgaaacggttgatgtggccgatgaggaagttcaggccaggggtagtgccccagtggcccaccagacggtgcttcacatcttcgcgggtgaagggctccttcatcagcgggttggaacgcagataaatctggccgatggaaaggtagttggcaacgcgccagtacttgtcaacgccttcgagggcttcctcggaaaccggagcgttgagcttcttccaaggggtgccaataacaggactcgtcatgtgtactcctgtactcctgcacgtgatcgtgcgattgattatttccgttaggtcgcgggccttggttccttgcggcgccaaggattcccgttcccaatcaatcgtcatggtacgaggacaacacgacttttgaacgatttcttgcgggtgtgttcgaaattgttgcggaaatttcagtatttgtgcggttcacctgaccgtttgtcaacattagttttttcaacatactttttcagaacggcggaagcatgcggaaatctagcatctggctagaacagcgcacgttcgatttcccatgttcgaaatcggcgtgttgtccgactacaggcatgtagtttgttcgatttgcgcacatagtccctgcgtgtcggccttgtcgccttgaccagtgataatcaggggtgttcagcccacgtaaaattccaatgaacgttaggggaatatcaatggcaaacggtcctgtgcttgtcgtcgacttcggcgcccagtacgcccagctcatcgcccgccgcgtgcgcgaggcaggcgtgtactccgagctggtccctcattccatgccggtcgacgagatcctggccaaggatccgaaggcgattattctgtccggcggcccggcctccgtgttcgagcccggcgcgccgaccatagataccaaggtattcgaatccggtgttccggtgcttggtatctgctacggcttccaggtcatggcctatgagctcggcggcaaggtggataaggccgctctcggcgaatacggcaagacctcagccaccatcgacgacgccgacggcatcctcgccgactcccccgccgagcagaccacgtggatgagccacggtgtggcggtcgaacaggccccggccggcttcgaagtgctggcccacaccgaaggcgcgcccgtggccgccatggcggacgaatcccgcaagctctacggtgtgcagtggcacccggaagtcaagcactccccgcttggccagaagcttatcgaaaacttcctgcaccgttgcgccgcgctgcccaacgactgggacgcctcctcgattatcgaggatcaagtcaagaagatccgcgagaaggtcggcgacgccgaggtgatctgcggcctgtccggcggcgtggactccgccgtggccgccgctctggtgcacaaggccatcggtgaccagctcacctgcgtgttcgtggaccacggcctgctgcgcaagggcgaggtcgagcaggtcaagcacgacttcgttgccgccaccggcatcaagctcatcaccgtggacgcggccgacgacttccttgaggccctgaagggagtctccgagccggagcgcaagcgcaagatcatcggtgagaagttcatccgcacgttcgagaaggcccagcgccaagtgcttgaagaggccggcgcgcgcggcaaggaagtcaagttcctcgtgcagggcaccctctaccccgacgtcgtcgaatccggcggcggcgacggcgcggccaacatcaagtcccaccacaacgtcggcggcctgcccaaggacatcaagttccagctcatcgaaccgctgcgcaccctgttcaaggatgaggtgcgcgccatcggcaccgagctcggtctgcccgacgaaatcgtctggcgtcagcctttcccgggcccgggtctgggcatccgcatcatcggcgagatcaccaaggagcgcctcgacctgctgcgcgaggccgacgccatcgcccgcgaggagctctccaaggccggtctcgaccgtgacatctggcagtgcccggtcgtgctgctcgccgacgttcactcggtgggcgtccaaggcgacgagcgcacctacggctcccccatcgtgctgcgtccggtgagctcggaggacgccatgaccgccgactggtctcgcgtgccctacgatgtgctcgccacgatctccacgcgcatcaccaacgagtgccgacagatcaaccgcgtcgttctcgattgcacgagcaagcctccggccacaattgaatgggagtaattgctctctgtgacgaatgggattctccatcggggaatccctttttttgttgccgacgatgcccggtataatttttccgcttacgacgtcgtccggaaagggatgccgacctctttgcgccagggattcgacaacgaaaaatacatcgaactgcaagccgccaacatctcaacagcgtgaaccgacgcttgcactcggatgaaacgctgattgcattgtcaatcaccagcgccaccagtcctgtggccgctcgcgtcatcgacgggctcaaacagttgcagggctgcgacgcctttttctccgttatcatctcatccacggacgaggcgttgtatcgcaaactcggcatcaacgtgtgctgcgaaccgaagtacgaacgggtgagtctgtatcaccggtaaacgccaccgataagcgcggtatgccgcgaatcgtcaagccggtaatcatgcagcatgcggcctgacgattcgctgctgtcgcattgtctctcccctcgaccatgctgggcttgttttccgtttgttggagagaacgggggatgccatcagcactacggtgagagaaggattatccgtgaatcggttcgtgggtctagacggtattaaaggactggcgctgatagccattgtgctgtaccactgcatgcagcaactgctgccaggcggattctacggagtcgacgtgttcttcaccgtctctggattcctgattgccgtcagtttgattcgttctctggcgaaaaccggatcgctgaatctcgtgcgatatatccccaagcgtgcagtacgtctctatccggcgctgtttctgctgattccggtcaccgtctccgtcggctggctgctcgatcacgacattctagtttccatccgcgaccaagtcatcaccgtgctgctgggctgctacaactggtacgccattgccggaggccaaagctatttcgaccaaatgaacccgcaggtgtttcgccatctgtggttcattggcgtgctcatgcagttctacgtcatcgtgccgttcatcgtctggctgatgtggaagctccgccagacgaaactgccctcactcatcccactgggactcgcggcgttcagcagtatcgccatgtgggtgatgtacgtgcccaagggcgaccccacccgcgtctacttcggtactgatacccacagcatgggcctgatgctgggtgtggctctcgcctggtgggtcaccgctcctcagttgggccacgctcgtcagggagctgtgccgatgccccgcaccattagatcgagcgctgcggccgtcgcacctcgggcttcgttacctcggattcctgtaaagcatcgcatctggaatgcgacggcaccggtattggcgttcctcagcctgattgccttggtcaccatgacggttatcggcaaacaggatgcattcgccttccgcggcggcatcatattgtccagcctgttgtccgtgctgctgattgccggtaccatctccgacgattcctggatgcaaagcctcatggtgttcaagccattggccgccctcggcaagtattcgtacggcatttacctgtggcactggccgttgtggattctttccagcgcccttgccccgaagatcttcaaggcagcagggccttggcctctcatcatgaccgcgttgctcaccgccattgcggtgatgatttcctggctgatggtggagaaaccggcggcaatgcactcggtgatatccgtcgtggtgccccttcgcacgaacaagaagaatcatgtggcccgggttattgccgttgacgttatcctggcgctgtcgttggtcggctgcgcgcagggcattactcatgcacctgcgaaaaccgccatgcagatccagctggagcaacaggccgcacaactggaacgcatacagaaaaccgaacacgtgctgctgcgccatgccgtgccggcaccgcccaagcccaagcatgagatgcccaccggcgatcagattaccgccataggcgattcggtgatgctggcctcatcacagggcctttcggaagtcttccccggcattcagaccgacgcgagcgtttcccgctccatcatggtcgcccccgaactcatcggcaatgatctgtccgccggcagtctgcggcaatgggtgctgatcggccttggcaccaattcggcaatcacccctgatcagctggaccagattcgtaatatgatcggccccgaccgcgtgctggtactggtcaatgcccacggagaccgtacgtggattccacctaccaaccaggtgcttgccgactatgcggccgcacatccggacaatgtggtgctggtggattggaatgccacagccaacgcgaacgcgcaggtgctcggctccgacggcatccacccgagcatggatagcgatatctatgcaaaggcggtcaaacaggccatcgaacaatggatctcaagcggcaggtgaacggcaggcaacgctgagttgtccaaccggtcgtgaagaacggctatgctgaagactgcatcaacgagaccacacgttgggagacatggtgagcgcaatccttgaagggaagcccgataagaatcttattctcgttacgggaaggattcatccgaagttggctgaggatgtcgccgagcagctcggcatcgacgtccttgaaaccaccgcatacgatttcgccaacggcgagatgtacgtgcgctacaccgaatcggtgcgtggcgccgatgtgttcgtgctgcaaagccactacaaacccatcaacaaggcgatcatggagcagctcatcatgatcgacgcattgaagcgcgcctcggcccgttccattactgcggtctgcccgttgctcggctactcccgtcaggacaagaagcaccgcggccgcgagcccatctcctgccgtctggtgttcgacctgctgaagaccgccggtgccgaccgcatcatgtcggtcgatctgcatgccgcgcagtcccaaggcttcttcgacggcccggtcgatcatctggtggctatgccggtgctggtcgactacatccgtgatcgtttccaaggccatctcgacaacgtcgccgtcgtctcccccgacgccggccgcattcgcgtggccgagcagtgggcgcagcgtctcggcggcggtccgctcgctttcgtgcacaagactcgcgacatcacccgcccgaaccaggcggtcgccaaccgtgtggtcggcgacgtcgccggcaaggactgcgtgcttgtcgatgacctgatcgacaccgccggtaccatcgcgggcgcatgccacgtgctgcaggacgcgggagccaagtcggtgaccgtggtcgccacgcatggcgtgctctccggcccggccatcgagcggctcaagaactgcggtgcgcgcgaggtcgtgctgaccgacaccgtgccgattcccgaggaaaagcgctgggatggcttgaccgtcctgtcgatcgccccgctgctggccagcgccatccgcgccgtattcgaggacggctcggtcgccgaactgttcgacacctaccccgagcaccacggtcaaggcttcctgttcgcctgatcacgtgcgtgtttgttcaaggaaagcacacgatgcgagacgcgacatggcgtagtctttcggtaaataccgacagtatggtataaatgaacacttgtgggccgaaagcccacgactcccccatggtgtaatggcagcacacgggtctttggaaccctttgtcttggttcgagtccaggtgggggaacggctgacggccgctcgacatccgggcggccgtctattgttttgaggtgtttccaccctcaatagacattccgatcgaagggaatacgtcagttatggcattatccgcagccatcgtcctcgccgccggcgagggtacccgcatgcgttccaacaagccgaaggtgctgcatacttttgcaggcaagaccttcctgaacagggtcatggattcggtgaccgccctgaaccccgacacgctggccgtggtcgtgcacttccaggccgagcgcgtcgccgaagccgcccgctcctatgacgagcaggtcaccatcgtgaaccaagacgacattcccggtaccggtcgcgccgtgcagtgcgcaatggcacagctcaccgaggctggcaaggtcgatggcccggtgctgatcgccgcctccgacatgccgctgctcgacagcgagacgctgcaccgcctggtcgaattccacaccgcctccggcaacggcgccaccgtgctcaccaccatcctcgatgacccgaccggctacggccgcatcatccgcgatcgcgaaggcaacgtgctgcgcatcgtcgagcagaaggacgccaaccgcagcgaactcgccgtgcaggaagtgaacacctcggtctacgtgttcgaggcttccgtgcttaccgaggcaatcgccggactgaagtcgaacaacgcgcagggtgagttctatctgaccgacgcgctggaaaccgccaaggccgctggcaaggtcggcgcgttcgccgctccggatccgctcaccgtcgaaggcgtgaacgaccgcgtgcagctggccgcgctgtccaagacctacaaccgccgcgtctgcgagcgctggatgcgcgacggcgtgaccattcttgacccggaaaccacttggatcgaggacgatgtccagatcggccgcgacgccaccatcctgcccggttccttcctgcaaggccacacggtggtcggcgaggacgccatcgtcggcccgtacaccaccctcattgacgcaaccgtggacgaaggtgccgtggtcgagcgttcccgcgtgcaggaatcgcacatcggcgcacgcacgaacatcggcccgtggacctacctgcgcccgggcaacgagttcggcgaggatgccaaggccggcgcgttcgtcgaaatgaagaaggcgcacatcggcaacggcaccaaggtgccgcacctgagctacgtgggcgacgcccagctcggcgaccacaccaacatcggcggcggcaccatcaccgccaactatgacggtgtgcacaagaatcgcaccaccatcggctccggctgccatgtgggcgccggcaacctgttcgtggccccggtcgaggtcggcgacaacgtgaccaccggtgccggctccgtggtgcgccacgccgtgccgagcgacacgatggtctactccgagaacacgcagcacaacgtcgagggctggaagcccgcctgggagcgctgaaccatgcccgcacttcaggattccatcaacgccgtccgcgtggccgccgaggccgcagaccgtatcaaggccaccgacattgtggccttcgacgtagccgacctgctcggcatcaccgacatcatgatgatcgccggcgcctccaacgagcgtcaggtactggccgtggccgaggaaatcgaaaaggacctgttccttaagtgctccggccgtcagccgcgctctcgcgagggcctgaccgagggccagtgggtgctgcttgactacggtgatttcgtgattcatgtcatgcacgaggaatcgcgcgaattctacgggctcgaacgactctggcgcgactgcccggccatcgatcttgaactcgcacacccggaaacggtggagcatgcggacgctgctgccgtcaccaccgcgtaacgtgcgaatcacataacgctgatattcgctgatactcgctgatattcgtgtgtcgggctgcctgttgccgaacgtcattgacggcaccaggcagccctcccttttccctgtttcctcactggaatcgaaaggatcgtcactatggccaatcatgttcgttccattttccttatccgtcatggacgcacttcctataacgccgctcacaagctccaaggccaggtcgacattccgctggacgccgtgggtgaatggcaggtcaagcagaccgccgcggccttgaaaagcctgtacgtcgatcgtcggccggaaatcaaccaccggttcattgtctgctccgatttgaagcgtgcgcacgccaccgcgcaggctttcgccgacgtattgggtggaatcgagcccgtcgatgatcatcgcgtccgtgaacgcagcttcggcgactgggatggccatgccgtggctgaactggccgaacgctaccctgaggacttccgttcctggatggagtctcggggcggtgaactgaagtatggtgccgaacccaaggaagccgtaggcaaacgcggtgtggaggctcttgaggactggtccacgcgtgccggagacgacacggacctgttcgtgttctcgcacggcgcatggatcgcgcagacattgcagaccctgttgggcatttccgcgatcgatccgaccttctccacggtggtctcattgcgcaatgcgcactgggtgcgcttggtgccgatggacaatcccgatggcactgtgcgctggcgtctgctggactacaatcacggtccggccatcgccgacaccgacgaatgggaacgcgaacgctgatcatgttcccgactcccctgctaatccaataggtccggtgcattcggaaccgttcaagcaataactgaatgactcaatgcctgaataatggcggaaacaagccaaaaagtgtcgccaaatcacacttttgtcatttggcgacacgccggcttttgccagaatcgacatctcgtcgtaatgtatacgaggtccaaacaacgggccaacaattgaaaacggggctatagcgcagctggtagcgcatctccatggcatggagagggtcgggggttcgaatccccctagctccacgacgaagccatcaaatcgggtgatatggtggtttctccgctggttcgtggcgggtcttgtgactcccatgaatcggatagcttcactcggggctatagcgcagctggtagcgcatctccatggcatggagagggtcgggggttcgaatccccctagctccacaatcaaggccggtgcttcacacaccggcctttttcgttttctatcctatcgggcgacttttgcgcaacattcccgggaatgcgtcgcaaaacagggactggaatgcatgcagtgcgatactttccccggaaagtatcgccaaggggacgctcttccgattggcgcgacaccggcgtgagagataacagtaatcgccactacaatgaggtgtggtccctatcgtgttgatcatcaaaggagacaaaaacatcgtgaccgtcacccgtgtatatatcgccagccctgaaggcgccaatggccgcaacgtcgtcgcttacggcgtgctcaacgcattgacttccaagtacaagaccatggtgttccggccggccgtgtcgaaccatgacgaattcacccccatcctgctcgccgcctccaatgcgggactcggcgtggccctgtccaccggcctcgacgtgcataaggtgcgcgccgacaaggacaccgcccgcggagacatcgtcggcgagttcaactacgccatggaggtctcccgcgcgaacgccgccctgatcgtcggcaccgacaaatcccacgtcaacgacccgaccacctac

SEQ ID NO: 1235 - DNA, 3001 bp, Unknown
  R81_24m  MAG No. k141_25929
atccaggccctataacttggctcccttctcggaggggagctgtccgccggaggcgactgaggggagtatgacgcaggggtagtggtctcatgaccatatacgaatgggggctgattccaatcggaatcagcccccatagtgttgcaactagagattagtgagatgcctaacggcggttacttacttggcgaaggtgttgccgtaggtatcggtgccagcctcggcgattgcggcggacttgcgggcgatggccagttcttcgttcgtcgggatcacggcgatgatcacggaggagtccggagtggagatgatgcgcggttccttggagcgggtggcgttcttctcctcgtccagcttgacaccgaacggagcgagcttgtcgcacaccatcttgcggaccacgtcgtcgttctcgcccacaccagcggtgaaggtgatcacgtcgcagccacccatctggtaggtgtagttgccgatgtagctgacgatgcggtgcacgtagacatccagagccagcttggcgtcctcgttgccttcggacaccagacggtgaacctcacgcagatcgccgtagccggtcatgcccatcatgccggaacgcttgttgaacagggcatcgagctcgtccacgttcatgtgggcgttgcggatcaggtggaagaccacagccgggtcgatgtcaccggtacggccacccatcatcaggccctcaagcggggtcagacccatggaggtctcaaccggcttgccggagacctcagcggaagcggaagcgccgttgccgatgtgcagaacgatctgcttcaggccttcagccggcttgccgatgacgtccggcaccacggaggagatgtactcgtgggaggtgccgtgggcgccgtagcggcggatgtggtactgatcggcgatttccttgttcagcgcgtaggtgctggcggccttcggcagctggaagaagaaggaggaatcgaagacgaagatctgcggaacgtccggcagcagggagcgcatgacttcggcacccttggcctccgggccgttgtgcagcggggcgagcacagccagatccttgacctggttgatggtcttgttggtcacgagggccggcttcgggaagatggagccgccctgcaccacacggtggccgacggcgacaatgccagcctcagacaggttcgggccgtactcctcgaagaagccgagcacgcgcttcagaccctgctcgtggtcgtgaatcggctcttcaagctcgtgcttttcgccgttgtactcgtgcttgtagtggccgtcgaccggttcaccgatcttctcgacgaggccggaagcgaggccttcgccggattcgagatcaaccagctggtacttgatcgagctggagccggaattgatgacaaggacggttttcgccattgtgggcatcctccattgtgattgaatgttcccgtgagacacgggttaccgttgattagattactcgttgcttgctacaaaataagcattacagtggctcccgctggcgggagccaagccgggctcactgcgcttcgatggcggtgagggcgatggtgttgatgatgtcctgcaccatcgcaccacgggacaggtcgtttaccggcctgttgagaccctgcagcaccgggccgatggccaaggcgccggaggagcgctgcacggctttgtagccgatgttgccggcgcacaggtccgggaagacgaacacgttgacgtgtccggccacatcgttgcccttggccttggtggcggccacggtgggggaccaggcggcgtcgaactggatggaaccgaccaccggcagatccggagccttctccttgagcagcttggtggcttcctcgaccacgtccacgtccgggcccttgccggagccgagggtggagtaggagagcataccgaccttcgggtcgatgccgaaggcgcgggcggtctcggcggactgcagcgcgatctcggaaagctgctcggcgtccgggttgaggttgatggcgcagtcggcgaacacggccacatggtccttgaagcacatgaggaacgcgcccgagaccagtttctggcccggcttggtcttgatgacctgcagggcggggcgcacggtgttggcggtggaattcacggatccggagaccaggccatcggcgtagccgagcaccaccagcatggtgccgaagtagctggcgtcggtcagttgcttgcgggcctgctcctcggtcatgcccttcttggcgcgcaactcgcacagcttggcgaccatgggcttcaacacgttctcgtcgtccatggcctggaatcgggcacgccccagactgttcagccccagttccttgccgcgggccaaaatggcgtccttgtcgcccacgatgatgaggttcacggtctcacgttcgagcaggtaatcggccgccttgatgatgcggtcctcctcgccttcgggcagcacgatggtcttcttgttgctcttggccttgccgagcaggtcgaattggaaggcgtacggcgtgaccggcgcggtgacgtccacatcgagcgcggcgagcacctcgtcgatgggagcgtgcttgcggaaggtctcaagggccagatccttggtggattcgtcggtgaagggcacctgcggcagagtccagaccggcaggccgtatttggcgagggtctccttgacggagaaggcgtgacgcggctcgcagccggtcacgaagatgccgagcaccgtattgcccgcggcgcgcatgccctcgatggacagcttgacggtctcgtcgagctcgtgcggccagcggtcgatggtgcacacggccaggaacaccccggccttcagatcggcggcgacgtccgcgttgaattcgtaggtggtcgggtcgttgacgtgggatttgtcggtgccgacgatcagggcggcgttcgcgcgggagacctccatggcgtagttgaactcgccgacgatgtctccgcgggcggtgtccttgtcggcgcgcaccttatgcac

SEQ ID NO: 1236 - DNA, 14659 bp, Unknown
  R81_24m  MAG No. k141_26462
aatcacaggtgccgcaatcatctcccgctacggcatggcgcagatgcacggccatgacttgacgcagcaaagcatcctgttccgcaccaaccatcgccttgtggtgctcaacgacacggttaacggcaatgtgtggaaccctgaggattccaccaaagtcatcaaaatacagtggaacaaaatacaggccgagcagaccgagaaagaacagcagaacaacgactcggccaacaaccaccacgacttctccaagacctgttccgcacaatccggccaaatcaaagccgaggatgatgaaatcggcgcacgagccggttcggaacagattctcgacgtgctgcgcaatgacgagcagaccgattgttccgtgcttaaaatcaccaaggttggcgcaccaaacaacaaagacgtcaccatttcgccgatttacgacggccggtatctgcaactcgatgcctccgccacatccgcaggcaccgttacctttacttacgatatttccgatggccgcggccagacctcttccgccacggtgaccgtaaccctgaatgatggaggcaaccacgctcccgtacagttcgacactcctcccgagatcgatgtggagcagggagccagttataccgccaatgcgctgagcagcttcaacgatccggatggagacccgctcactctggtctccgctgtggcccagaacaccgaccaggtgcaggtgtccacccgagccgacggccagcttacgttcaacaccggtgcgctggcgtcgggacgcgtgggcgtcgaggtcaccgtctccgacggcacggcgaccggcaccggcatggtgtatttctcggtcaagcccgcgaacaccttggccgcggtcatcgacccggtagcgaaaaccaccgttcccaacacggataccgtcgtcaagctgtcctcttacgtgcatggcacttccttgcagccggcacagctgactcaggtggatacgcccaacggcgcttcgacgaccaccaatgcggcggatatgtcgttgacgttcaaggccaccaatcccggcacctattatgtgccctacaccattactcaaggctcgattccggccaccggattggctcgcgtcgaggtacagcccgccaccggcgaggccgccaaaccggttgccgccaacgatgtcgccctgcttggcgcggataataccgccattgtggagccgctcaccaatgacgtcgatccgatgggcggcgtgctgtccgtcaccacggtgagcgcaccggccgactccggcatcaaggttggtctcgtcagccataagcgcgtgtatatcactgcgcgtcaggtgcccacgaaacccgtcgcccttacctacaccgtggccaacgcctccggaaccgccaagggcaccatcgtgttgcagccaccggctctgaccacctcgaattcagtgcccaaggccagcaatatcaatgcccaggtgcgcaccggcggcatcgtgtccgtggatgtgcttgaccatgtggcctactcggatggcaccacggtcaagctcaagaacaacctgcaatacgacaaggagacgttcaagggtctggccttcgtctctggagacacggtccgctaccaagcatccagcgagaccggcaacttccccatcacctatacggttgaagacaatctgggtaatgtggcttccgccaatatcaccattaccgtgcataagagcgacgcagcgagcaaggccgcgccaaccccgcatgacgccgaagcgcaggttgccgccggacagaaggtccgcatccccatcacactgaccggcatagacacggatggcgacgacgatcagctgttgggtctgggcaacaaggcacccacgctgggccgcatatccgaagtcggttccgactacttggtctatgaagcgtatccggattcgtccggcaccgacaccttctcctatgccgtggaggattggaccggtcagcgcgcacaggcgcagatccgcgtgggcgtattccaaggatcgtccgactccggcgtatacgccagggatgacgaaatcacgttgaggcccaatacggccgcaaccgtgccggtcgcgcagaacgacatctccggcgacaacaccaatctgaccgtcgacaagcatgtcgaggtccaaggtctcgacggggtgagcgcgaaagacaacatgatctccttcaccacgcccggcagcgccaccaccgcctatatcgcctacacggtcaaagacaaggccggcttgtccgatacggccaccctcacggtaaacgtggatccgaatgccgccatcgagccgcctaccgcctacgactatcgtgtgccgtccgccgccaccatcgataagaagtccgtggatgtggatgtttcccagtggatcgccaatccttccggcacagccaatgagctcaaggtcggcgtgcatccctccgccagcgctcacgctcacgtcaagggcggtgagcattcgaccaccatcaccgtcgacctgacgtcacaggcgcgagccgtgccttacacggtgaccaatacgaaatacaacatcacctccaccgcgttcatccaggtaccggcctatggtgtctttccgcccacgttgcgtcccaaggcaccggaattgaaggtcaattcgcgtgagaccattgaaatcaacatcaatgactatgttcgcgtcggtgccggcaaggaaccgtatatcgaaagcgctgattccgtcagcgccaccaaggcttccaactccgatttctacgtgaacgacaagaccctgaagttcactgcggcaaaagactacgcaggccccgcctccattacctttaccgctgtggatggcaagcagggatcggataagaccaagatcatcaattccgcagtgatcactctccagatcacggtgataggccgcgatgtgccgccgcccacgttctcgtcctccactattgatgtcgaggcgggcgcgaaccccaagaccgttgatctgacggcgctcacccatgcaccgtccggcgtgtatgacgacgagaagcaatacacgtattccggcggaagctcatcgtccgggcgaatcaccgctaacctgtcccgttccggcagcttgcaggtttccgccaccaaggatgccgctcctggcaccaccgcgtccattcccgtgcaaatcgcatacggcgcgggcaccgtgaatgccggtgtgaccgtgcgcgtagtgtcttccactcgtccgctggcacgcgtcggcgacaagacgctgaagatcaaggccggtgccagcgatgccgtgaacgtgcttaccggcgcgtacaatccgttccccgattcctcgctgaccgtcatcagctgcaaggcggatgacgccgccaaactcactatcgccggatgcgatgcctccggaaacgtcaccatcgccgtcgcatccgatccgggtgcttccacgaacaccgtgctcgtcaccgtgcaagacggcagcaagtccaaggatcgtgaagtcaccgcatcgattaccgtgtccgtgatcgacaagcccgagccgccactgctctcccccgtagccggggaaccgcaggacagcgcggtcagcctcacatggacgcccggtgccgccaatggcagcccgatcaccaactacaaggtcagttggaccggcgccgccactggagagaaggattgcggtgccgtcacctcatgccaggtcacgggtctgaagaacggcaaaacctattccttcaccgtcgccgcgcgaaatgacgtcggttggtccaaaccgtccaccaccgtcgaagccacaccggacaaggtgccgtccgctcccaccgatgttacggtcacaggtggcaataaaaccgccaaagtgacgtggaaagcgccgagcggtgatttcagcgccgtcgacaactattcagtgaccgtcaccggtgcaggtgctccgcagaccaaggaaaccggcaatacggccaccgagctgtcgtttacgttcaacaacaacgacatttccgatggcaccgccattacggcgaccgtcaaagcccataacaaaatcaattggagtgccgagtccgcctcatcacagccaaaggacatctggggagacccggatgcgccgaccattgcgctgtcgaacgacgacaccacaggaacggcgaaagtcactctcggcaacaaccgcaatgccggctgccggcgaatttccttgggaggagacatcaaggacaccatcgattgcagtgacggtggcgctacgttcgatatcaatgagaacgatttgaacacccgggaaatcaccgtaacggccaccgtggtgccgcagcgcgatgcttccgccggcacaggcaagagcaggtttgtcccgcagtacaaggtccagccgcccactgacgtctacaccaccggatccggcagtacatgcaccgtgcattggaccaagcaggggcatgcgcagtcctacaacgtgactgccgatggcatcgattccggtacagctactaaccggaactcactcgacttccgaatgagtccttgggccaaatgcaataccgcatcggtgcaacaggtgttcaacggcgctaccagcgatgccgccaccggaggcccgtacaatggcgctccttacacctatgagaagaaggctgtaatcaacaaaccgcaggagctgcgctggtcagacaacgctcacgtcattaacgtcaccggcggttcggttgaggtctatggcaagcaggccaccgtacaaatcatcatcaatggccaaccgttcacgtggaaccccggccagccattggacgtcaccgacttggccgtggccgccgatggcaactacacgtggagcgtcaaagtcaccggcgggccgggatactccggtctcgacaatacggcggacggcagcagcgtcgcgggcacacgcccctctgattcctcggaggggaccgagtcgctcaaatccggtaccgatgtcaccactttggccaagaacccttggattcttggtttcggtaataccccaatatcgtcaaccaccattcacaagcagtaggagaacatccatgagcgagaacatcgacgacgcgacgcagctgtctgacagcacgcagctatccgacgccacgcacttgtccgatgccacacatctggcatcggaaccgcacactggcaccaccccgaacaccgagacggcacagcaacccgttgcgttgcctaacctgccgcagcggccgtcacaagcgtcgtcagaaaagccgtctcctactactgatgccgcctccattcctgcgggcgatgacagcaccgtgctcaagccgcgcaaggacgcggcgccagccatcccacagcaggtcggcatgccggcaaagaccagcacgcccaaagtcgcgcttccgcacttcggacgtaaatccggcaagcaggccgctactgcgaatgctgcccccgccacccagacctcccgtcaatggacgaccacaaccgccggcaagaccgcagcatccaacgccgaaaccgtggctggtcgcgggccggtagccaatcagcaggccgccgcgcaatcccagccgcaatcccagccgcagcgtcagtcgagcaaagccgcgcaagcagccgcatcggcactgcccgccagcatcaattccggactactgccccagcccacggctcaggtccgggatttccagcagtccttcaatgcgctggtcgagaatgtctccaaggtggttatcggcaagaccattcccatcaagcaatgcgtcaccgcactgatggtcggtggccatattctgcttgaagacaaccccggcaccggtaagacccagttggcccgaggcttggccaactccatttccaccggtttcaagcgtattcagttcacgcccgatctgctgccttcggatgtggtgggtgtgactttctacgatcagaagcgcggagaattcgagttccgcgagggcccgattttcgcctccatcgtgctggccgatgaaatcaaccgtgcatcgccgaagacgcagtccgcacttctggaggttatggaagagcagaaagtcaccgttgacggcgtcacccatgatgtaccgcagccgttcatcgtgatcgcaacccagaaccccatcgagcagctcggtacctataagctgcctgaggcgcagatggaccgcttccttatcaagacgtcgattggctacccgggccatgatgtgtccgtcgatatcctcaagcaggtcgatatcaccgaccgtgcgcagaccatttccccggtgctgagcggtgacgatgtcatgcggctgcgtcaggtggccaccgaaatctatgtggatgatgcgattcgtgaatacatcgtcaggctcgtcgaggcgacccgccacaacgagaagatcacagtcggctcctccatgcgtggcgctttggcgctgacccgatgcgcccgtatctgggccgcggccgatggccgtgcctacgtggtgccggatgacgtcaaggaccttgcagtggccgtgctcgcacaccgtatcacgctgactccggaagccaccttcgatggcgcgactccggaaagcctgatcgcacaggtgctcgaagacgttccctcccccaccatcggttcctgatagggcctggaaaggtatccgaccatggcatctacatccgccgcattacgccgtcgccggcgcgctgaacgcatgttcaagcgcgcggtaagacgcatcagacggttcttcgcatcctacgtctcgcccttgggctgggcggtaacgggcgcaggcatcgcatgtcttattgcgttcctgcctttgggctggtatgagctgctcgtattcggcatcgtggcgatggtgatgatgctcgcggcaatcgcgctttccctcggcaacacacgcttccacgcgtccatcgccgtatccgatcatcgcgtgaccgtgggagacaccatatccgttatcgtcggcatcgacaacaccggcaaaacgccgacaaccacggcacgcggatatctgccaatcggcgatgcgcatgaacgattcaacatccccatgctggctcccgggcaatccaagcaaaccgatgtggagttccgtacggtatcgcgcgcaatactgcccatcggaccgttgcgcatccgcaagggagacccgttcggcctggtacgtcacgaaaaggagctggccgaccgcatcaccgtattcatccaccctcgtaccgtgcgtctcgataccctgaatgccggcgtgccccgcgatctggaaggccaaccatccggccagatcgtggatgatgatctcgacttctacggattgcgcgaatacgagccgggcgacgacgtgcgtaacgtccactggctgagctccgcgaaaaccggcacgttgatgattcgccaatatgaagccacgcgccgcaccgacacctcggtgaccatcagcgtgaacccggatgagtacgtcaacggcgaggaattcgagatggcggtgtccatccactcctccatcggcgtcaaatgcctgctgcaggatcgcccgctgttctgtcacgcgggcaacgcgcacggccagccgcgcaacgccatggagttcctcgacaacgccagtgccatagagcctgatcgtgaggacaatccgaatctcgccgagggcacgctgaagcacagtcctgatgcttcgttctattttttcactgttggatcgctgaaagacatcgagcaaatcaagcgcatgaccttggccttgccccgatcggccagctgcgtggtattgcaggccagcgccggcgccaatcgcggcatcagaagattcgccaacttcacattggccaccatcggcgaactcgatgatctcccactgatcatgggggtgctcgcatgaccttcgaccagtccagtatcaccaataccaataccgctgcgtacgccggatcgagcggcacatacaccggcacttcctccggcacgtacaccggaacctccaccaccaccggctcctgggccgactccacacattcggttatctggatgaccagaggcaatgtgcttcgcggcatgggcctcagtcgccagccgtggggcaaacgaatcaccagcctcgtactcatagcggcgatgatgttgctggcgcaagccaatctcatcgacgtgtacggcggcgtggccacttgggcgatcgccgccgtaccggccaccttgctgggcgcgatcatcgctctggcgggcatgttgccggcgttgcgactgtggtggcaaatcgtgtttctggcgtttgcccaattcatcatcggtccggtggtaacgctgagttccaccacgtcccattacgtgattcccaccttgaagaccttgagttcaggttgggaaatgacgtttggctcgttcaagtacattatttccgtcgatccgcctctgggcacgcaagacggcgtgctgctggcggtatggaccatcggcctgtggcttacgttcctcaccggcgtgtttgccattaatgccaacgcatggttgtctctggtgggagtgctgccccttgcggcggccgtggccgtatgtgctctgctgggtacggacagcggctggcaacgtgccatctgcggcattgcctttgccttgctgctgattatctggctgtcttggcgtcttgaactgctggaatgggggcgctggatatccgcgctgatcatcgtcgtgctcgctgccggccttgctttcggaggcacgttgctggtgccgcaggaccgtttcgtgctgcgtgaccgctacgatccgccgttaagcccctacgattacaccagcccgctcagcggcatgcgatcctatatcaaggaccacaaaaaagacgtgttgctgaccgtccataatctaccggccggaacaccggtcaaacttgcggtgatggatcgattcgacggcacagtatggaacctgtccgattcttccgaagccacggactcctcgaattatcatcgcgtgggcaccacgatcaaggcggatgagcagggtaaatccttcactgcgaccttcaccgtcgatcagggactgaccgacacctggctgccgctggcgggagcggccgctggcgtgagcttcgccaacgatgccgacaacggcaatgacacgttctactacaacacggataccgattccgccattattcccgtcggcacgcgcaagggactcacctataccgaatccggcatcatagcccacaagcccaccgataagcagatcagcagtgcggccgcggcccgcatcacgcagccttcagcccaggatgttcccgattcggccagcaaactggccacgtccattgccggcgggcagtcctcgggcggtgccgccgccacggccttggccgacacattgaaagactccggatggttctcacacggtctggaaggcgattatccctccgatgcgggccatggcaattaccgtatcaacaagctgctggcaggcacggccatggtgggtgattccgaacaatatgcctccgccatggcactgatggctcgtgagctgggactgccctcccgtgtggtcctgggattcctgccgaaaaacgaggatggcgaaatcaccgatgcccgcacggagaagacctcgggcaatggcaccaaaatcgaattcaccggcaacgatgtcaccgcttgggtggaaatcaaattgcagggcctgggatgggtggcgttctatccgacgcccaaggagaccaaggtgcctgatgaaaaccagaacctgacgccgccgaatccgcagacactggtccggcaaccaccagtgccgttgaccgacccgctgcgcgatcagacgcaggccaaaggccagagttcgttggccggtaccgacgccgatgattcgccgaccaacctgttctgggtgcggttctggcgagttactcgtgcggtagccatctatggaagccccctgtggactctgctcatcgtttgcggactaatcctgatatttaaagctgcattgctggcacgtgcacgacggcacggcagtccgaaagcccgtgtggcagcggggtggaatgccatacacatacttgccgagcaaagcggcatcacagccaagggcactcgtcgcgatcaggccggcgcaatcgccagtcagctcggcacggacgatcaggcactgattcaactcggtcgggaagccgactacgccacgttctcggggcaagacattgcatcgggccaagccaccacatattggaatggagtcgaccggttgcgcaaggcaatgctcgcttctttgccgcgtttcaggaggatacgtacacggctttcgctgaaaagcgtgtctatattggcaaatagacacgcagcaaagccgtatacagcgcgagtcaagcacaagcgtaagaaggggaagacgtcatgaccacaggctccatccgtatcgcgatgaccagtgacgtgggtcttaggcgcaagaacaaccaagacaccggattcgcccaacagggcgtgttcatggtctgcgacggcatgggcggcggcaaaggcggcgagcaggcaagccagttggctgcccagcatttcgcgcagctggcttccatgccctcgcgcacccgccatgacatcgacgacaccctggcacaggctcagcacgacattctcgatttgggtgaccgtctcggcggcgtggccggtacgacctgctccggcctggttttgccccagccttacgcagatgccatcaatgcccacagcgcagctccgtttggcgacgccgactccccggatttctcggaccagacctatgtggtcaatgtcggcgattcccgaacctaccatctcagcccgctgccggatgccgatgcccccgccacggatatcatccccgtgtgggacgcctcctcgctgacccgcatcacgcgggatcattcccaacgccaggaggctatcgattccggtcagatgctgccggaagaggcggaggcgaccattccacgcaacatcatcacccaatgcctgggcgatccggacggcatagtgcccgacgtatatgttgccgatctgaccggccgtttcatcatctgttcggatggattgcacggtgaagtgtcagacgaacagattgcggccatcgccgcagcgcattccagtccgcaggaagccgtggacgccttggtggcggccgcgctcgatgcgggcggaaccgacaatatcactgtgattgtggccgatatgccactgaccgaacccgaacatcacgcgttcagcgcttttagactggacgagggcgaggacattggcgccattgaagacgcaacattgcaaacactacggaccatacgttcggcataaccgagcgagcataaggaggtaatcccatggttgattatgatgctgcggtcgctgccgtacaggatccgaacgcggacccgattctgttggcaaaaatcgcctacgagaatccggaattcggcgcaaacgtcgccgtaaatccgcgttgctaccccggcttgaagcgttggatcgccgaattcggcgatgagcgtgcccgcgaaaccctggcacagtacgggttcaccgccgacgcattcggcggcccggttcaggatcaggaggctccggaacaggcggccctgcaggctgccgagcagcagcctgcagacgcttacgccgccgaccagtacgcggcccagaagcccgcagctcaggcggcattctaggagcctgtggccaccaatccttatggcttcaccgccgaacaggccctgaccaccaccgaccagatgctaatcgcccagattgcccagtacgcgcctgaactacgcgcctgcatcgcacgtaatcccaacacctatccggcactgatcgaatggctgggccagctcggcgacccggcaatcaacgccgctctggcttttcgtcagtgaaaggacggcatcatcatggccaaacttccctaccctccagcacctgaactgggttggtattccgacgatccggtggaaggcaccccggattccgcagttggcacagccgaaccgcagaacgactatgggcagcccagctctgcggaaaccgcggccaataccgcttttgcggcagagcctgccgccactgccgctaccgccgccgctgagcccgctgccaccgcttcggcagacaccacaccgcacgccgccgaaaacgacatcgaggattgggacggcaccgtgctctcctcctcgttcacgtccaaggcaccgaagaagacgtacctgatgcataacgatgtcaccggccagaccattgtgatcgataagagcacgttgctgggccgcaagccttccatggatgtgccgcaaggtgccaaggcggagcgtatcgaagacccgacccgcaccacgtcccgcaaccatgccgccatcagcgtcgacaccgatggcgcgctgtggatcgaggactacggctcgttgaacggcacctacatcatcaccaatggccaggagacccaagtcaccaagggcacgacgctcaagctcagtgcaccttcaacggtgcgtattggtgatcagttcttccagttcaccgaaaaacaggcctgagtaatcaagcaacgagcggctgcctgctcttgttcaacaggaaaatcacaatggcaaatatacggatggcccggaactgatatagttccgggccatcttattgcgattaacgcaagatctgggtcctagaaaggacatcctttctaggaccctctcgcttactcctcgatgtcaggctgaccgccctgatcggagtagaaatcatccgggttgaagtcgtcgccgagcttcagatcgccgaactcgagattcgagaagttcaggtcggacaggtcggcatcggagaagctcgcgtcgccgagatcgccatcgccgcccagaccgaagttcgggtagatggtgtcgcggatggccttgtcgggctcgaccacggcgttgcggtaacgggcaagacccgtaccggccgggatgagcttaccgatgatgacgttctccttgaggcccttgaggtcatcgaccttctcggagagcgcggcttcggtgagcacgcgggtggtctcctggaaggacgcggcggacagccaggagtcggtggccagagacgccttggtgatgcccataagcgccggacgaccgacggccggacggccaccgttcttgacgatgttgcggttgatctcgcggaagcgggcgttgtccaccagctcacccggcagcaggtcggtgtcgccggagtcgatgatggtcacgcgacgggtcatctgatgcacgatgacctcgatgtgcttgtcgtggatatccacgccctgggagcggtacacggtgtgcacctcctccacgatgttgacctgggcggcgcgcttgccgaggatggtgaggatcttcttgggatccacggaaccttcgaccagctgggtgccgaccttgatgtggtcgccgtcggcaaccttgagcggcacgcgcttggagacctggtaggtgatcggcttgatcacgccgtcttccttcggcgcgccggagtcggcgtccggggtcaggatgatctggcggccgcgatcgttctccacgatcttgatgctgccggcgaactcggtgatcggcgcctcgcccttcggggtacgcgcctcgaaaagctcggtgacacggggaagaccctgggtgatatcggaggccgcggccacaccgccggagtggaaggaacgcagcgtcagctgggtaccaggctcaccgatggactgggcggcgacgataccgacggtctcgccgacatcgaccaacttgttggtggccagggaccagccgtagcacttggcgcacacgccgcgcttggactcgcaggtcagcacggaacggcacttgacttcctcgacaccgtgggccacgaggtcgttgagcacgtccatggacagggcgtcgtcgcgcttgtacagcacggtctgtccgtcggccgggtcgatgacgtcggcggcgagcagacgggagtacgggccaccgtcggcggccttgacgagcaccaggttgccgtcgttgtcgcgctcggcgacgcggatgggcagaccggccttggtgccgcagtcctcttcgcgcacgatgacatcctgggagacgtcgaccagacgacgggtcaggtaaccggattctgcggtacgcagtgcggtatcggccagacccttacgtgcaccgtgctgggagatgaagtactccagcacggacaggccgtcgcggtagttggacttcacaggacgaggaatgatctcgcccttcgggttggccacgaggcctcgcatacctgcgatctggttgatctgcatcatgttgcctcgtgcaccggactgcacgatgatggccaggttggaggtcgggtcgaacttctcctcgacttccttggacacctcggcggtgcactcggtccacaggtcgatgagttcctgacgacgagcttcctcggtcaacagacccatctcgtagttggcgttgaccttgtcggccttggcctcgtactcggcgatcttctcgtcgcgctcgggcggctcgttcacgtcggagaacgcgaaggacacaccggaccacggtgcgcgggtgaagccaagatccttcagggcatccagcgtggcggccacctgctgggtggagtaacgcatggcgatgtcatcgacaatcttggacagacggcccttggccacctgctcgttgacgaacgggtagtcggtcggcag

SEQ ID NO: 1237 - DNA, 2847 bp, Unknown
  R81_24m  MAG No. k141_26964
cgacgcggagatatggatcggcgactacacgatgttcggaccgtccgtcaccatcgccaccgccggctacccgatcttgcccatcctgcgcgaacaccacactcttgttcctatagcccagaaatcccgcgtctctttcgttgtgacgcgggatttctgccggttgggctatcggttggattgactggtatgtttcagcgaacggctttgaccagtgcctcggtgaggtacttgccggcggccatcaccagcggcgcatagcggcgtccgggagcggcgcccatgcggccggtcgggccggaaatcgagatggcggcgatgacctggccggaggcgttgcggatcggggcggaaatcgagcacacgccctcttcgcgttcgttcacggactcggaccagccgcgcttgcgtacggcggccagcttggtggcggtgaacttggcgtggcgcaatccctggtgcagacggtcggaatcctcccaagccagaagaatctgggcggcggaaccggcttccatcgacagcatggcacccaccggaatggaatcacgtaggccggaggtgcgttccacagcggcgatgcacacgcgctgatcgccttggcggcggtaaatctgcgcagactcgccagtgcgatcgagcagggtctgcaggatcgggccggcggcggtcagcagacgatcctcgcctgctgcggcggcaagttcggcgaaacgggagccgagtacgaatcggccatgctggtcgcgcagtacgaaacggtggcgttccagtgcaatagccaaacgatgtgcggtcggtcgagcgagaccggtggcggccacaagctggcccagcgtagacgggccggattccagtgcgtcaagaatctttacggttttatcaaggacgccaacgccggaatggatttccccatcgtccttggcggtggtgtcttcaaccggctcggactcggtcaagctgttgttcaatggttcttcccgggaatcagtcataataagggcgattatgccatctcacatagtgaaatggcaaattggggaagtgtctcacagggtggccatgaagttgaaagggcgttcgtggatgccgaagagacatgtctggagcggaaccgagtcatgactaggtcatgttcgagtcgggtccgagtcatattgaggccatcatttgaccgtatctcaatatccggcatgctcatggccgggcccatcgcaagcacataggctaataccacgaacaaggcgcgaacacaatacctcgcgcggaattttttggaggaatcactatgggaacgacactggccgagaaggtctgggccgatcatctggtgcgcaagggcagcgacggagctcctgatttgctgtacatcgatctgatgctcatgcatgaggtcaccagcccgcaggcgtttgagggcctgcgcttggccggccgcaagccgcgtcacgtggatcagctcattgccaccgaggatcacaacacgccgaccgttgatatcgatcgcccgaacccggatgagacgagcgcgttgcagttgacgactttggagaagaactgcaaggagttcggcgtgcgcctgcacccgctgggcgacgccgatcagggcatcgtccacgcgttcgccccgattctgggcctgacccagccgggcatgaccatcgtgtgcggtgattcgcatacgtcgacgcacggcgcgttcggcgcgctggcgttcggcatcggcacttccgaagtcgaacacgtgatggccacacagacgctgtccctcaagccgttcaagaccatggccgtcaacgtcaacggcaagctgcccgcggacgcgacggccaaggacatcattctggcgatcatcgccaagatcggcaccggcggcggccagggttacgtgatcgaataccgtggtgaggcgattcgcaacctcaccatggacgaccgtatgaccgtgtgcaacatgtccatcgaggccggtgcgcgtgccggcatgatcgcgccggacgagaccacgttcgagtacctgaagggccgtccgcacgcgccggaaggcgagctgtgggatcaggccgtggcgtactggaagacgctgaagaccgatgacgatgccgtattcgacaaggtggtggatattgacgccaccaagctcggtccatatgtgacgtggggcaccaaccccggccaaggtctgccgatcaccgcctccgtgccggagccgggcaagatcgccgacgccaccaagcgcgccgccgccgaacgtgcgattacatacatgggtttgaagccaggcatgccgatcaaggacatcgccgtggacaccgtgttcattggttcgtgcaccaacggtcgtatcgacgatttgcgccaggccgccgcgattatgaagggccaccgcaaggccgagaacatccaccgcgtgctggtggtgccggcctcctcccgcgtgcgtttgcaggcggagaaggaaggcctcgataaggtgttcaaggactttggcgccgaatggcgtaacgccggctgctcgatgtgcctgggcatgaacccggacaagctggtgccgaacgagcgctcgatttccacttcgaaccgtaacttcgagggccgccaaggcaagggctcgcgcacgcatctggcgtcgccggccgtagccgccgccaccgccatccgcggcacaatctcgtctcccgccgatctctgagtcaatacacgtgagccccctctgacgaggggctgtcagtcgaagactgactgggggagagatccccgaaaggaaaattgttatggaaaaactcaccacactgaccggcgtgggcgtgccgctgcgccgctccaacgtcgataccgaccagatca

SEQ ID NO: 1238 - DNA, 23920 bp, Unknown
  R81_24m  MAG No. k141_27598
caacggcaactacgatctttcgctcgtggaccatgccgaaagccacgacttctacggatggaccacgccgagctactacttccactacgacaacaaggacgtgcaggccctgtacgccaaggcgctggaggccacctccgacgacgaggcctcgaagtatctggccaaggccgcgaagatcgtctccgaggacgcgccggccgactggctgttcagtttgaaggtcaccatcgcctacgccaagggcgtgaatggtgtaccgcaggacttcatccagaccgtgctgcccctctggcggatcacctacaccaagtagtcccggaacccatcggtcgggcgcggcgcgggagtgattccgtggcgcgcccgaccgtggacggcccatccggccggtgacgccacgggcggtggcgagggaatcgataagggaggcgttatgcggttcttgatgcaacgcttgctgctgttcgcggcggcgctgttcggcatttcggtgctggtgttcgcgatgctgcgcatcctgccgggcgacgtggcggtcgtgatggccggcatgaacgcatcgccggcgcgtgtggcggccctgcgcgccgaattcggccttgaccggccgtatgtcgtgcagtatctcgactgggccggagggctgctgcacggcgacctcggcgtgtcggcgctgaccggtcgggcggtgacctcccaggtcggccaacgtgcgacgatcacgttcccgctgatcgtgatgagtctggtcatcgcgctcaccctcggcttgtccatgggtgccgccgccgtgatctcccggtcgccagccgtgcgcggtttcctgcgcgtgctgtccatcgtgggcggcgccgtgccggccctgtggagcggcctgctgctcatcctcctgttcgcacggggcgtgggccttgtcggtctgctgccctcgcaggggttccccgccgctgggtggggcgctcccgggcgggcggtctcgtccctgatcctgccggcgctggccaccggattcgtgtccggtgcgggcatcatgcgttacacgcgctccattctggaaggcatcgccgatgagggagggccgatcgatatggccatgtcctgcggcatgacccgcacccaggcgttggtgcgcgtgggattgcgattggcggctccgcagctcgtctcggtggtgggactggcgttcgcctcgatgatcaccggcgtgatggtggtggagaacctgttcgccctgcccggtctgggcgccctgttggtgggcgatgtcggcaaccgcgatctggtggccgtgcaaagcgagttgttcctgctcgccgcgttcttcctgctgatcggcctggcggtggatctgctgcacgcgctgcttgacccgcgtctggccgccggaaaggaggaatgatggttgatcgcaatggtcgatggcgtcgttcgggcgtggttctgggcaccatctggtcccgtggcaccggccgctactcgctgatcgtgctgggatcgtggatggtcgtcgccctggtgtcgttgttctggaccccgcagtcgttgctggccaccgacggctaccacgtgtgggacaagccgtcgtccgcgcattggctgggcaccgacggcaccggcgcggatgtgctgagctggctgatggccggatcgcgtacgaaccttgccgtcgccctgctcactgttgtctgctcggctgccatcggcatcctactggtcgggctgatggtcgcccgttcttcggcgctcgcttcggcgtcggtcgccgtggtcgacgcgctgatctccatccccaccgtgctcatcgccctgctgctcgccgtgccgttcggcgcatccgcggccgtggtgatcggcgcgtgctccatcggctacgggctgcatctggcgcgcgtcgcacgcccggccgccctgctcgccgcccgctcgggatacgtgcagtcggcccgggcgaacggtgccagcgggttcggcgtactggtcagacacatcgtgccgaacatcacgccggtgctgatggtgcaatcgtcgatgtcggcgggcacctcggtgctggccgaggcgggcctgacctatctgggcgtgggcgtcggcgcgggggtgccgagctggggccattcgctggccacctcggtcaaactcatcaacgtgtttccgttgacggtggtgtggcccggtctgatcgtcaccctggtggtggtcgcgctgaacctgttcggcgacgcgttgcgcgacgccaccgacccggtggctaatcccgcgttgcggcagatgactgtgcccggtgcggttgtgccggtggctaggggagccggtgacactgcggcgcagtccgcagtggcagcgccgaaggagacggatgatgagcgttgaaattcacgggctgaatattgctatcggcggcaaaccgattgtcacggatgtcgatctgtccatcgcggacggcgaacgggttggcctgatcggttcctccggctccggcaaatcgatgatcgccaagtcattgctcggcctgttgccgcgcgaggccgtgctgtccggcaccatcacgatgggagaaaccgccatcctgtccggagaaaccgccgagtcgcggcatgggcaggaagatgactcaggatctgacgaagaacgcggcgcggcagataggcaccatgttgccggtgaacgcagggttgccacctcgggccacgattccgctgcgtacgccgacgagcatacgcttgccgatctgcgcggccggtatgtgggtacggtattccagaatccggcccatgcgctgaacccggtgatgaccgtggcgcagcagattgcgttgccgttgagactgcactacgatctgaccaaggccgaacgtgctgagcgagtgaataccatgctggacaaggtcggactggaccgtgacgtggccggcacatacccgcacgaactgtccggcggccaacagcagcgcgtgggcatcgccacggcgctgatcacctcaccgcgattcatcatcgcggacgaacccaccaccgcgctcgactccatcacgcaacgtcagatcgtggacctgctgacctcgttggtggacgacgccggcgcatccatgctgttcatcacccatgatttctccgtactcgcgcgtgccaccacccgctgctacgtgctggacgccggccgcatcgtcgaatccggacccaccgccgacctgcttgctgcaccgaccacgccgcaagcccaacgcttggtcgccgccgcccaaaccctcaccctccacacccccaaggaggattcgcatgagtaacagcagtgtgccactcctctccgcccactccatcaccaaatccttcggaccgcgcaccgcacgccaccaagtcctcttcgacgtctccgccgacgtccacgccggcgaatgtctggccgtgatcggcggctccggatccggcaaatccacgctgacccgcattatgctgggcttggaatccgcggactccggcagcgtggaatacgagagccaatccattgtcggcggccgaaaatcgccgggattcgcgaccctgcgccgcgaatcgggactggtgttccaggacccgttctcatcactcgacccgcgttggcaagtcgccaaatcggtggctgaaccgctgagtctgcagcgacgtgatctgaacaacaccgatatcgacgagcgggtggtcgcggctctgaccatggcgggtcttgaaccggcggacttcctgaaccggtacccaatcgacctgtctggtggccaggcgcagcgcgtggtcatcgcccgcgccatcatcaacgagcccaaggtaatcctcgccgacgaaccaatgagcgccatcgacgtggccgcgcgcatccagatcctcgacgccttcgccgctatccgtgaggcccggccgagcaccgccatcatcatggtctcccacgatctcggcgtggtgcagcacatcgccaaccgcatcctcgtgcttcacgacgggcgcgtcgaagagacgggtcccaccgccgaagtgctcggcaacccccaatccgattacacccgtcagctcatcgaggcagcctcgttatagacctttttggctcccctccctgaggggagccggccgccggcgacacgcgcttgtcgcgggttgtgctatggtgtgaggcatgcagattatctcatgttgttgtcgctaaccgacgcccctgggcgagcggtcagtgacgcataacttgagatggagcattcgaatagcggcgaatctgccgcatacttttcatgtatccgatggcacaagcgtaatcgtgtaatgcgcgagccgtggttaacatgaaaaaccggttcacttttcggattcaccgtacagtgagcgggaatactcgattttcaaaccaaagccacagtccattcgtctgggaacgtcggttcacgaacgcaacgcagcaaaacccccacaaccccagcaacgaaggacttcacatgaccatccacaacagcctcgcagaactcatcggcaacaccccgctcgtcaagctcaaccacatcccgcaggcggccggcgtcaaagccaccatcgccgtcaaagtcgaatacttcaaccccggcggctcctccaaggaccgcatcgccgagcgcatcatcgacgccgccgaacagtccggccagctgaagcccggcggcgtgatcgtcgagcccacctcgggcaacaccggcgtcggcctggccctggtcgcccagcagcgcggctaccgcacgattttcaccctgccggacaaggtttccgaatccaagcgcgcggtgctgcgcgcctacggtgccgaagtcatcgtcacaccgaccgacgccggcccggacgacccgcgctcctactaccaggtcgccgaacgactggccaacacgattcccggcggcttccgcccgaaccagtacgacaacccgaacggcccgctgagccactactacaccaccggccccgagatctgggaggctacggaccacaaggtcacgcacttcgtggccggcattggcaccggcggcaccatctccggcaccggcaagtacctcaaggaagcctccaacggcgcggtcaaggtcatcggctccgacccggaaggctccatctactccgcttcctcacgcgacgaagtccaccagtacgacatcgagggcgtgggggaggacttctaccccaaggctttcgaccggaacatcaccgacgacatcgtgcgcgtatccgacgccgaagcctttgaaatgacccgccgtctggccggcgaggaggcgttgctggtcggcggctcgtccggcatggccgtggccagcgccatcaagtacgcgcttgccaatgatttggacgagaaccagattgtggtggtgctcgcccctgattccggccgcagttatctggagaagatcttcaatgacgactggatgcgtgccaacggctacggcgacatcgtggaacgcaccagcaagccctccctcgccgagcagtaccttaacggaactccctctgatgagggagctgcggatggactccataactagctatcaaaagaatcaataccaacatccgcactaactaaccgcacctgttttaccttcgaatacggaacaatcccgaaaggaacccaatatcatgtccgctgaatacaacgccaagttcgccaacaccgacatcgccactcgcgccatccacgccggccaggagcccgacccgaccaccggtgcggtcgtcacgccgatcttcgccacctccactttcaagcaggatggcgtgttgggcctcaggggaggccacgactactctcgctccatcaaccccactcgcaccagcttcgacgagcagctcgccgccgtggaaggcggcaagtacgcgctgagcttctcctcgggcttggccgccatcgacgtgctgctgcgctccaccatcaagcccggcgacaacatcctgctcggcaacgatgtgtacggtggcacctaccgcctgctctccaaggtgttcgtgccgtggggtgtgggcctcgacgtggtggacatcaccgatctgaaagccgtggaaaccgcattggcctccaagcactaccagtatgtgtgggtcgagaccccgtccaacccgctgctcaacatcaccgacatcgcggccaccgccgaagttgcccacaagtacggcaccaaggtcgcggtcgacaacaccttcgcctcgcccgcccttcagcacccgctggccgatggcgccgatgtggtggtctactccaccaccaagtacatcggcggccactccgacgtggtcggcggtgccgtggtggtcaacgacgaggagacccgtgagaaggtcgccttcctgcagaacgccgccggcgcagtgccctccccgttcgactcctggctggacatccgcggcctgaagaccctggatctgcgcgtcaagcgccacagtgccaacgccctgaaggtggccgaatggctcgaatcccagccctctgatgtgattgagcgcgtctggtacccgggcctcgagtcccacccgggtcatgaaatcgccgcccgccagatgcacggcggcttcggcggcatcgtctccgtgcagctcgcggccggtgccgaggcggccaagcacttcgtggaccacacgcagatcttcacactggccgaatcgctcggcggtgtggaaagcctcatcgaggtgcccgccgccatgacccacgcctccgtggccggcaccaccctgcaggtgcccgccaatctggtgcgtatttcggtcggtatcgagaacgccgacgaccttatcgccgatctcaagcaggcgttggatcgtatctgaccgtactgacggtactggtggcaccgtattgacggtgccaccacgcttatcggcggactcgctatcgattggtacctacaaaaaatccccggcccacaagggtcggggattttccgttatcgattgaacatggatcgaatcagctggcgttgccgccctgccatccggtggcatccgcaccagccgggcgcaacgcctgaccggaagtcggtgtggtgccatcaacgaccacacgagtgccgatggtggcaaagtcgtacatccacttggcgtcggccacctgcatgttgatgcagccgtgcgagcctgggataccctgctgcacatagatggggtgctcgccccacatgtatgcaggaacaccgtgcagggcctcgccgccgttatagtaggaaatccacggcgtgcctggctggttgtagccttcgccaaccatggtctgcgattcgtacttgagatacacgtagaacgtgccggtatcggacagcatggaaccatcggcggtgggcttgccagaagcgatgttgaacttcttgaccaccgtggtgccctgatatgcagtggcagtctggttcgtcagatcaacatgaacccacttatcgccatttgccgtatcgaagttatgaggcacctcgacctgcttgacatcatatgggctgtctttcacagccacagtggaatcagtggactggttctgctcgatggcggtagccagacgttcgggggcgtccccggcaccagtcacttcaataccatccacaccgagtgtcttatcggcaccaatttccacgccgccttcgtctttcggcgtgatgtagacctcgcgtgtcaccttgggaacagtcagttctttggttacgctgtcactggtgacgtacttggtgatggcatcgcggtcgactaccagactcatggtgccacccgccttattcaccgtgggcttgaggaatgaggcaatggtatcggccgggatggtgatgctcttgttcacgccgttgtccacggtcagtttgaggccaagcttggcattggcgtcaaactgtgtttgctgtgcgctcgcgtcatcaatcggattctttgcagtctgtagcttgaccggcaccgtcgcattttcgcccggggtcgcgacggcctccttgactgcagcattgacaacattgatatccgggcccttgccatcctgacccgcggtgtaatcgaactgcttggtgctcttgttgtagacaacggtggcaatctgcgctcggtcggcctcatcgaccaggccggcggtgacgaattgttcggcagtctctttgtccctggtggcggtcagagcgatatgcggctgatcgaaaatattgagcttggccacgtcgccggtcttcgcgttcaacagcgcatctacggttttatccgtgtcgacggtgacgccaaggtccttcagcgaggctttgacgctgttgccttcggcggtgaacgtcactgtggtgttattcagctgctgcttcacagtattcgcaagttcttcgcgggtctggcccatgacagagacattgcccaaatgaacaccgggcgcagccttgtcttggaagtaccaacgtccgacgaagaaataggctattaatgcggcaagcaacactgcaaatatggttatgatggcaatccgtgcggccttgccatgtgatttagcggtggtagatgccataacatgttcacccacataggctgtattgtcggcatggttattggtgccattgtcgctttgctgtggcgtggcggtacctgtggccgcggctgcgaacagcccatcggcggccacaggctgcagcaccgccgtctcctgatcgtcaggagaggagaaggaaaatgtatcgttggccataaaatgccccgtcttagttctctcaaagcggcatatcgtgtgatatgccgggaataacgtttcttgacgcataataatacggaagggctacgtacatcgttacgaggtattccgttatacgatgaaatccatccgcggtcggcctacactggtcgtttatgacagcacatcaggcggcgctggaggcgctcacacgatacttcggctatgactcgtttaggcccggacagcaaggaattgtcgaggctttgcttgccggacgcgatgtcttgggcgtgatgcccaccggcgcaggcaagtccgtgtgctaccagattcccgccgcgctcagcccgggtgcgactttggtcatatctcccttgatttccctgatgcgcgaccaggtcgatgcgctgaacgacctcggtctgccggccgcgttcatcaacaccactcaaactcccgacgagcaggcgatggtgttcgcccaagccgccgccgggcagatcaaactgctgtacgtggccccggaacgcttggaaaccgggcgatttcgcgactttgccgcccgtacgccgatctcgctgatcgccgtggacgaagcccactgcgtctcccagtggggtcaggacttccgctcgtcgtacttaggtatcggcgatttcatcgccgggctgccgcagcgtccaccggtgggtgcgttcaccgccaccgccaccgaacgggtgcgtcgggacatcgtgggactgctgggattgcggaatccggccgtcaccgtcaccggattcgaccggccgaacctgtattttgatgtggtcaaactggagaccaaatacaaggccgcatgggtggcgcggtatgtggccgaccatccggacgaatccggcatcgtctactgcgccacccgcaagaccaccgaagcgctcgccgacacgctgaaccagatggggcatccggccgtcgcctaccatggcggcatgtcgccggacgcgcgtgaggtggcccagcgcgacttcatcaccgacaaggtgccggtggtcgtagccaccaacgccttcggcatgggcatcgataagtccaacgtgcgttacgtcatccaccacaatctacccgaatccattgaagcctactatcaggaggccggccgcgcgggccgtgacggcgagcccagccgatgcacgctgctgtggaatgagtcagacatcgtcacccggcgtcggttgctggataacgattatgagaacgagcgattgactcccgaagagcaggagatcgttcgccagtccaagcgccggctgctggacggtatggtcggctactgccgcgccaccgactgcctgcaccggtatatgacccggtatttcggtcaggaattgtcgccgaatgctggttccgcggcgggtgaagacattgcggcggactcttcgcagtccggcagatgcggtgcctgctcgaactgcgaaagcacgttcgagaccatcgacgtgacccgcgtggcgcaggcgatcagccgttgcgtgcatgacgtggggcagcgcgtcggttccggcaagatcgtcaagatcctgcgcggttcgcgggcgcaggatctggcatggctgaacccggagcggatgcccaccttcggcatgctcaaggacgtgaacgaagctcgcgtgcgcgacgtgttgagccagatggccacggacgggtacctgtcaatcgccgaagggcgtatgccaatcgtcatgttcggtgcgcgggcggccaaaaccgccgctcccgacttccactatgagatcaaacgggtggaacgcaagtcggcggcggccggttccggtcggagcgggggagtggctgatactgccgattccgccaatgttcccggcgatgcgctgggctcgtatatcccggacgatgacgaggaatcgctgttccagaagctacgcgaactgcgacgcaccatcgcccaggaaatcggcaagccgccgtacatcgtgttctccgacaagaccttgcgcgacatggcccgcatcaagccggttaccaacgcgcaatttctggcggtcaacggcgtcggtcaacacaagctcgacctctacggccagcgcttcatgcaaaccatcgcctcgttcaatgccgggagtgcgtcataacaatctcctatagcgaaccgcggagtatttgcgggcgttcttgggctggcgcgactacgatgactgttcgatacttcatgaccgaacactcagcaagtagaaaggcaacagcatggcagaagacaaggccgaaaagcccgtcgtcgaatcattccagcttgatcacaccaaggtcaaggcgccgtacgtgcgttacatcgacaccgaaacgggccctcacggcgacgtgatctccaattacgatctgcgcctgacccagccgaacgagcaggccatccccaccggcggcctgcacaccatcgaacacaccatcgccgtgctgctgcgtgaacgcattcccggctacatcgactgctcgccgttcggctgccgcaccggcttccacctgctgacctggggcacccactccaccgaggatgtggccaaggcgttgaaggaatcgttggagttcatcgcatacaaggccacatgggatgacgtgcccgccaccaccgagaagagctgcggcaactatcgcgaccacagcctgttcgccgccaaggaatgggccaagcagatccttgaggaaggcatcagctccgacccgttcgagcgcaaggtcgtctgattcgtctgattcgattcaattctgattcggctcccgctggcgggagccgggggcgaagccgactgagggtggctgtcctcaactcggctggactgtccggctcctgcggacgggagtcattgtttattagtgtccgtcatgcaacgcggacgggatttcttgtgcctacggcatggtaggttggccgtcagttagtcgccggtcaccgtgccggcaacccggcatgtcggagaggtgagaagtgactcagtcgaacgctgcaaacaaggcgacaggccgccgtttccgccacgccaccatgcgcgatctgccgcagatgcagaaaatctacgcacgcgcacgcgcgttgatggccgccaacggcaaccccacccagtggggcaacgaatttccgcgtgaatcggtgattgaggacgacatcgccaaccagcgtacgatgctgctggtcgacacctgcaatggccacgaacgcattctggcccagttcgccctgtgctcgggcaaggatccgacctacgccaaaatcgacggcgcctggctggacaacgacacctatgtgaccatccaccgcatcgccgcatccggtctggtgcgccacgcggcccgcgactgcatcaggtgggccctgaagcactacggcaacgtgcgcgccgacacccaccccaataacaaggccatgcagcacgtgctcgaaagctccggcttcgcccgttgcggcctgatccagctgctcgaccggccggtcgacaccaccagaatcgcctatcagcgccacgagtggtgagtgtggctgtcgccagcgtgttcggttccgcggtggagctggtcaggtaaggtccacgtcgtcgcgcacgtacggtccgtcggccgcccgttcaaactcgtgcatatcgcaaaaaccgtacgctgaaagtaactcagcgtacggttttcacgaaagcagccatcgactatcggtcagccgatagacctcagtcctcagtcgcagcgaccttggtgtcagccccggccttctgctcaaggccgagcttggagcgcttgcggctgtagccgaagtacacgatcaggcccagaccgaaccagatggcgaaacgcacccaggtctcccagttgagaccggcgatgagcacgaagcagaatacgatggccagaatcggggtgaccggcacgcccggcgcgcggaagccgcggggcgcattcggctgggtcttgcgcatccatagaataccggccgacacgatgatgaacgcggacagcgtaccgatgttcaccagctcgaacagcacgttgatgttgatgaagccgccggcgaacgcggtcagcagaccgaagaaccaggtgcccttgaacggggtgcggtacttctcgtgcacgtggccgaagaacttcgggaacaggccgtcacggctcatggcgtagcagatacgggactggccgtacagctgtacgagcatcaccgtggtcatgccgatgagggcgcccaggttcacgatcaccgcgagccagttcatgccggtctccagaatcacgccggccactggggcgtcgatgtacttggcgaactccttgtagggcaccacgccggtcatgatcatggtcatgacgatgtagagcacggtggaaacggctagggaaagcaggatgccgcgtggcagtgtcttgttcgggttgatggtctcctcggcggaagaggacacggcgtcgaatccgatgaagctgaagaacacgatggatgcggccggcacaatgccgtacggctgagtggagccgggctggaaggtgtagatgccgtacggggagaacggctgccagttggacggcttgacataccacacggcgcacacgatgaacagcacgatgatggcgagcttgatgagcaccatcacgtcattggtgcgcttggtctggttgatgccgatcgagagcacccacgtgatgatcagcacgatgacgaaaccgggcaggttgaagtaggtggtgacgtccgggttggtgccgtaggcggcggtcagctcgaccggcagatgcagtccgaagccttccaacaacttgttgaagtatcccgaccagccggcggacacggtggccgcctgcagagcatactccagaatcagatcccagccgatcacgaaggcgatgagctcgccgaacgccagataggcataggagtaggccgagccggacaccggtgccatggcggcgaactcggcgtagcacaggccggcgaaaccgcagcagacggcggccagcaggaacgatacggacagggccgggccggcggtgagcgcgcccttgccggtgagcacgaagataccggtgccgatgatcgcgccgataccgagcatcgtcagatcgaaggtgcgcatcgtgcgcttcaggggagtggattcggcgacaagctgatccacgcttttcttacgaaacagatccatgttcttctctcatgaaacttaagatatggggctagaccggacggatttccgggatcccggcacgcctcaacgccgggaatcaaaggcggcttccgagaaaccgcatatcggtcattagtgtacgactgccgggcgaaaacaaacgattgtgaccacacgtcacattcctgcgcaacaataggtgcctatgagcatgaacgcagcacccgaaatcgcattctcgtccgagcagggcaaggccaactatgcggccgcccgccgccaataccccgcacaggccatcgtgaacctcaaaaccatgcgcgacaacatggcccacctggtctccgtggtcggcggcccgaactccggcacggcggtgatgggcgtggtcaaggccgacgcatacggccacggactgctgcccgccgcactggccgcgctcgccggcggcgcgacatggctcggcaccgcgcaatcgcatgaagcactgctgctgcgcaaactcggcatcggccccgaccgttgccgcattctgacttgggtctacaacggcaccgaagtgccattcgatgagctgatcgctgccgatatcgacgtatcggtcggctccctgcccggcatcgatgccgtggccgccgccgcacgcaagctcggcaagcccgcccgcgtacacgtcaaggtcgattccggcttcggtcgcaacggtttcacgccggccggattcgacgccgcgctcgccaaactcgtgccgctcgccaaagagggcgtgttgcatattgtgggtcagtggagccatctcgccgtggccgattcgcccgatgtgcccgaattcgtgtcctccaccgaccagcagatcgcaacgttcaaggacttcacgcgccgcatggaacaggccggcattccgccggagatccgtcacctggccaacacggcggccactttggaccgcccggagattcacttcgaacttacccgccccggcatcggcctgtacggctacgagcccgatcccgcgatgggcaccccgcgcgactggcatctgaccccggccatgcgcctgcaggcgcagctcggcacggtcaaggatgtggaggccggccatggcatctcttatggccgcacctacctgaccccggacaacacctcgaccgctattgtgccgctgggctacgccgatggcatccaccgctccgcttccggtttcgatatggaaggtgccaagcacgtggagaagccgggcggcccggtgcgcatcatgaccactgaaggtccgaagctctaccgcgtgtgcggccgcgtgtgcatggaccagttcatcgtggacctgcacggatccgccgccgaactcggcgttcacgagggcgacacggtcgaactgttcggcccgggccgcggcgaggattacgttgagcctaccgccgacgattgggcccgcgccgccgacaccatcagctacgagatcttcacctgcctgcgcaaccgcatcccgcgcctttacgagcatgccgccgaagtactgcccgccgccgacctcgccaagctcgaccccgccacgctgctataaggtgcattaccgccatacggtggcaccccgtaatcccttcttcccgaatatgtgccgttgacatgtgctgagcgtcacatattcgggaaatcggccccaatctcccgaatatgtgccgttgagttgacgtcagtggcacatattcgggaagtcgggattactgcggccgatatgtgtgcctatgcttggaatatggaaacgacgttggatggggaacaggtgctgagcgatgagggctacaacgccttcgacgaggagcgatgggcacccgagccgcccaaatccaagtcgcgcacggctttcgaacgcgatcgcgcgcgactgattcattcgtccgctttgcggcgtttgggcgcgaaaagccagattctgattgccggtaccgacgatttcgcccgcacccgactgacgcatacgctggaagtcgcccagatcggtcgccaaatcggcgcattgctcggctgcgatccggacgtggtcgactgcgcctgtctggcccacgaccttggtcacccgccgttcgggcacaacggggagcgtgcgctcgccgacatcgccagcaatatcggcggcttcgagggcaacgcacagaccatgcgtatcctgacccggctcgaacccaagatctttcacccggacgggcgttcggccggtgtgaacctgacccgtgcggccttggatgcagccgtcaaatacccgtggaccttggccgaagccgaccaacaccccaagggggagcggtcgaagaagttctgcgtctacccggatgacgaaccggtgttccgctggctcaaaatcggcgctccccaggccaccaagcccatggaatgccagatcatggacctttcggatgatgtcgcctactccgtgcatgatgtcgaggattccatcgccaccggcgcgttcgatccgattgtgctcgccgatccgaagatgctggaccacatcatcgagcagacgcgcgcatggtatggggcgaagtgggatgccgacaagctgctggccgcgttcatgcgattgcgccgagagcatttgttccctgcacatttcaatggttcgcgcgaatcgttggcacagctcaagaacatcacgtccgatttgatcggccgcttctgctggtcggtggaaaccgccacgcgcgacacgtatgggcccgggccgttgacccggtattccgcgaacatcgtgattcccgaggacacgaattacgagatcgtggcgttgaagggcatcgccgtgtacttcgtcatggcgcctcgcgagcgcgagccattccatcaggaggagctcaagatcgtatcggatttggtcgatgtgcttatggccgattcgccgctcccatccgacgctttggaaagccagttcctggccgattggaatgaatccaccaatgacaacgagcgcctgcgcgtcgccatcgatcaggtcgcaagcctgaccgacaactccgctctggccctgcactccatcttgtgctgagggcgtgttggacgggtgcttccctcagtctcgctgcgcgagccagctcccctcgggtgaggggagctgtcgctgtaggcgactgaagggagtttcgcggaagaaatgataaccgacggtaaaaatttaccgtgtctcaggtgaggcggtactctagagacttatggtcggaatgattaagaaagaagatgtcgagaaggtgcgcgccgccgcggacctgtatgacatcgtatctgcgaccgtaacgcttaagccctccggcaccggcaccttcgtgggcctgtgcccgttccacgacgagaaaaccggcagcttcaacgtgcgcccctcactcggcgtgtggcactgcttcggctgcggcttgggtggcgacgtattcaaatacgtcgaacaatccgaaaacatcgacttccgcgaagccgtggaactgctcgccgacaagtaccatatcgagctgcactacgagaacagcggcaacggcccgaaccgcgagaacaccggctccaagcgcacccgactgctggaagcctgcgaggaagcccaacgcttcttcgtctcccagatcctgaccaaggaagcactgcccgcccgcaagctgctcggaggccgcaacttctcccaagccgactgcgaacgtttcggttgcggctacgcgccccaaggttgggataatcttgtgcgccacttggcctccaaggggtttacgcagaaggaaatcctcgacgcgggcttggcccgccaaggccagcgcggcatctatgactatttccgcggccgcgtgacgtggcctatccgcgattcgaccggccgcacgctcggcttcggcgcgcgcaaactatacgaagacgatcagatcgccgccaaatacatcaacacgccggacacgcagctctaccgcaaaacccaggtgctttacggcatcgatttggcgaaatccgccatcgtcaagaagcgacaggtggtgatcgtcgaaggctatacggacgtgatggccatgcacttggccggcattgacaccgccatcgccacgtgcggtacggcgttcggcgccgagcacgccaagattgtgcgccgcctgatcgccgacgattcgctgggcgcggtccagctggtcgggccgttgaaggtcaaggaccagccgttgagctcgcgcatcgtgttcacgttcgatggtgacgccgccggtcagaaggccgcgctgcatgccttcggccttgattcggccttcctctcccaaaccttcgtggccgtggccgacgacaatctcgacccgtgcgacctgcgcatcgagcgaggcaacgaggcggtgcgctcgctgatcgcccgggccaaaccgttgtatgacttcgtaatcgacgccgccatcagccggttcgacctgacctacacgcccggccaagtgggtgcgatgaaagccgtggccccgctggtggcgcagattcgcgaccgctccctgtgggacgcttacgcgcgcaagtccgcgggccgtatcggcgtggatcttgaggtgatgcgccgcgaggtgatgaacgcgcgccggcagatgcatgtacgcgatgaggacgcctacgcgcccaaacgtcgattcgagcgtgacgagccgcgtgtggaacccggcaccaacccatacgccaatccggccacgcgcaaggcgttggagcgccgtgacgccgccgaacaggcatatttcaagatcgacgacgccgtattcatcgccgaacagcagttcatggccgtgctgattcaggtgccgcgcgccatcgaccgcaccatgttcgggcagctgaccatcgaccatttcatgacttcggtgttccgcaccctgttccaggcgatcgcggccgccggcggactgccatccgacgataccccgcaggggctatggatgcacaacctcaccaaggccggcgggccgatgctgaatcaggtgatcaacgagctggccgtcatgccgttgccactgcctggcgacgacggtggtaatggcgcacaacctccgcagtcgaacgtgcctgggggagtcggcggtggtgcggccgccgtgcagctacgccctgccacgccggaagagcagcgctatgccactgagcttctcacccgattgttggacatgggcttcatgcgccagatcggcttggccaaacgccgcatggcccagctgcccgacggcgaagagaagataaccctcctcggccagatcacccgcatggaaaccgcccgtaaagacctccaagcccaaatctacggcaacaccgtcggctaatacctcccactgattgcgcgaatcttcgaatacgtgccggatgcataaggccatacaaccggttgccggattggatgggtgcagaagttgcggattggccccatccaaattggactggtttgggtgggccaatccaatccgttcaataatgaagcgcgataccaagcagcgtcgaacgaagggaaactcatgacgcagaatcgtgcggaactcaaccgtaatctggcccagatgctcaagggtggcgtgatcatggacgtcaccacgcccgaacaggcgaaaatcgcgcaggatgccggcgcgtgcgcggtgatggcgctggagcgcatccccgctgacattcgtgccgccggcggcgtctcccgtatgagcgacccggccatgatcaagggcattcaggaagctgtctcgattccggtcatggccaaggtgcgcatcggccacatcgccgaagcccgcattctgcaggccatcgacatcgactacatcgacgaatccgaagtgctttccccggccgacgacgtgtaccacatcgacaagaaccagttcgacgtgccgttcgtgtgcggcgcgaagaacctgggcgaggcgctgcgccgcatcgccgagggtgctgccatgattcgtaccaagggcgagcccggcaccggcgacgtgattcaggccgtgcgccacatgcgcaccatgaacaagcagatccgcgagctcgtggccttgcgcgacgacgaggtctacgaggccgccaagcagctggccgtgccctacgatctggccaagtacgtgcacgacaacggccgtctgcccgtcgtgaacttcgccgccggtggcgtggccaccccggccgacgccgccctgatgatggagctcggtgccgaaggcgtgttcgtgggctccggcatcttcaagtccggcgacccggccaagcgcgccgccgccatcgtcaaggccaccgccaactggcaggacgccgatctgctcgccaagctgtccgaaaacctcggcgaagccatggtcggcatcaacgaggacgagattcagaccatcatggccgctcgcggcgagtgagtgcattaccttggctcccctctttgaggggagccaagaaagggtgacgctcccgccagcgggagtcaaggcccaaggagacaacatggttgtagctgttgaatatatttccaaagaagagtccgcggacgtcgaaaacgtcaagcacggcgtgaccggcatcctggccgtacaaggcgcattcgccgaacatgcggcggtgctggacaagctcggtgcgccgtggaaactgctgcgcgcggccgaggatttcgatgaatccatcgaccgcgtgattctgcctggcggcgaatccactacacagggcaagctcctgcattcgaccggactgttcgagccgatcgccgcccacatcaaggcaggcaaaccggtattcggtacttgcgccggcatgattctgctggctaaaaagctcgacaatgacgacaacgtctactttggcgcgctcgacgccgtcgtacgccgcaacgcctatggtcgtcagctcggtagtttccaggccaccgccgattttggtgcagcggatgatccgcagcgtatcacggacttcccactggtattcatccgcggaccgtacgtggtgtcggtcggccctgaggccacggtcgaaaccgaagtcgatggccacgtggtgggcttgcgtcaaggcaatatcctggccaccgccttccacccggaactcacggacgatacccgcatccacgagctcttcctgtcgctgtagtcgattcgtctgccgctagactggtatccgactgacgaatcaaggagacgatctgccatgcagcttgagctgaatcgacgcagcaaggtgccgatgtaccggcagctggccgccgggctgcgtgaacagatcgtctccggcgcgatggctgagggctaccgcctgcctcccgaacgcgagctgtcctcgcgtctcgaagtcaatcgcaccacggtgttgcaggcgtatcagcagctcaaggacgaaggtcttatcgcctccaaagtcggcaaaggcacgttcgtgctgccggctgcctccgcaagccgaacaccgcacacgtcaaacagtgacttcgggaatgcgataacgcgaacaacacgatcgtcggcagaaatgggaacatcgcaagcctcctcttccggcgacgtagaacgtgctacctccactggtttcttgacgacggaccagggcagcagctctgcggcggtccatacgattcgtgaaaaccgttcggttcagggcccggagccaaccgtcgtgcgtccgccatggtcggtgttgttctctgattattccaaccggtttacctaccatgacatcgcctcggccgagcgggcgcagcgcggcgacaccattattgacttcgccaccggttcgccgaacccggcggatatcccggacgatctgctgcgcaaggtgagcatcgaggcgttcgaatcgcgggaattcgacggccaaccggaatcacctatcgagggattcgaagagttgcgtgcgctgcttgccgaacatatgcgcgcacgaggcgtacaatgcggcgtccgcaacgtgatggtgctctccggctccgagcagggcatcgacctcatcgtgcgcgcgttcatcaaccccggcgactgcgtgctggtcgaacaatccacgttcttcccggcattgcagaccttccgctcggcggatgcgcgcatcatcggcgttccagtggacgagcacggtatgcgtacagacctgttggacggctattgcgcgcgattccggcccaagctcatctacaccgtcccgacgttccaaaaccccaccggtaccacgctgccgcccgaacgacgcagcgaactcatcgacgtggcgcggcgctatcagtgtctgatcgtggaagacgatgcttacggcgatttgtggtacggcgggggatcgtccgacgcacatcgccccataccgcttaagggcatggagaatgcgggatacgtgatgtatttgtcgacgttctcgaaaaccgtcacttcgggcctgcgcacgggatgggttgtggccgacccgcatgtgattaaccggctggcggctctgcggcgcatggtcgaccagcatacgagcacgtcatcgcagcgcatctgcctggaactgcttaaagaaggccgcgtcgccgaacatttgcgcggtttgatcaaggcttaccgcattcgacgagatgcagcaatcgcagcattggagcggtatgcgccggatgaagtgtattggaccgtgcctgcaggcggctactatatttgggtttccttaccggacggcgtgcgctctctggatgtattggaatcctgccgttcccaaggcgtcacgttcatgccgggcagcgtgttcgacgttgacgaaatggatgattcccatattcgtctcaactttgtgcgcccggatgctgctgacattgataccggcattcgaatcattggcgagacgatagcacagatgtagccaagtgactggctcattgcggttgtcgagtttttttgatggctgcatacccacatcgatgggtgcattcgacgaatgaataagcgaggaagccatcatcagttcgctgtggcatgcgcatagcgttgtcgggcgaacggggcagaccacgtggtcgttgcgtgacctggccgatcgagccggcatcgcattgcccctggcgtagtggcgaggtggcgcagtaacgagtcatgccatcgcgagccgatgatgcgaaatacggaaccggtcgcggccatcaacgggtatcatacatgcgggagcaacgatacgttggcgtcagcacatccatctgactccagaaagggacacgatatgaccacatcctccgtttcgccggtgaccactgaactggcgggcagcgaaaccggcatcacgcttgtcattcacgccggagcgggcagtcgtggcaagcacagcacgcctgaacgcatcgcccaggtcgaacttgatctgcagcgcgccctcgatgccggataccagttgttggaatccggagcaccggcgcatgaggctgtggtcgccgccatccacgtcatggaagacgctcccgaattcaacgccggccgtggtgccgccctgaccagcgatggcatcgcccagatggacgcctgcctgatgaccggcgatggcgaggtcggtgcggtcaccggcgtaagcaccgtgaagaacccgattgatgcggcgcgtgccgtcaaagagcagaccaagcatgtgctgttcgcggacccgaccgatgccgagatcgccgattggggcgtcgcgaccgaaagcaacgagtacttcatcaccgaacagcgtcgtcagtccttggccgaggctcagtccggtggcgatgagtgggagaagcatggcaccatcggcgccgtggcgcgcgatgccgaaggcaatatcgccgccggcacgtccactggcggcatcaccaaccagatgcacggtcgtgtgggcgattcgccgctgcccggttgcggcacgttcgccaaccagtccacggtggcggtgtcctgcaccggcatcggcgaggcattcatcaaggtggtcgccgcccatcaggtgtcggatcgtgtgcgtttcgccggcgagaacgtcgaggatgccgcgacggccactttggacgaagtcgccgcgcatcatggcgatggtggcatgatcgttctgccggcggtcggccgtggcgtggtcgcctacaacagcgagatgatgaacttcggataccgtagcgcgcaaggcggtaaggtgcagggctgattgccccccctgtattg

SEQ ID NO: 1239 - DNA, 25463 bp, Unknown
  R81_24m  MAG No. k141_27675
gcaacagctggacgcattgcgcagcgaagcagactccattgccgacgatgacggtgccgcattggacgccgcgcgtgcaacgctcgccgaatgccgcgaacgactgaacgaactcgccgataagcagcgcgagatacagtccaagatcatctcgctcaaatccaaggccgatgcgcttgccgacacgctaggcagccgcaatgcctccggatcattggaacgcgacacggacgtggcctcgcttggccgactcaccgacttcatccatgtggccgaaggctgggaagaagccgtggcccacgcgctcgaccagtatgccagcgccatcgtggtacccgaggcaggcaacatgttgcacgccctcgaacgcgctcgggaagataagctcggcaaagccgtggtgctgaccgcgagcattgccggcgatcccgccacagagccgggcacggagtcggaggagagtagcgccgagaacacggcggccgccccgcaatcgggcaacgcgctggcagcactcgtcaccgcgaacccggatgcaaagaacccggcacaggccgaagctgtcgtgcacaccgtgcgtctcctgctggctgatgtagccatggccggcaccgccgacgaagcacagcacatcgtggcatccggcgaagccatgcgggccgtcaccaagaacggcgagaccttcacacacggcgtggcggcggtcggcggctcttccatctctcaatcggacctgtctctggccgcccgtcgagacaaagcattggcacaggtcaaacagttggccgcccaagacggcggaatggctgagcaagtggccgaggccaaagccaaacgcgatgaagcggcccgactcgtcgaccaggaatccgccaaacgcaccgaagcccggctcaaagcccaacaggcggagaaatctctgaaatccgccacagaccgcgtcgcatcgttcacccgtcagcttgagcagctggataggaaaatcaccgagacccaagagaatcgcaacgagcatcagcgcaagctcgacgatctcaatcgcgctttggcatcggcccggcaatccacagcggaacatgccgatttcgacgaacttgatgaacgtgaacgcacgctggagcgcggactgaacctgactcgcgagcatgaggtcgccgcgaaaatcgcgtggaccgaagcaagccgcaaaggggagtcactgagccgacaggccgggctgctgcgggacaacgccagagaagccgccgaacgccgcgcccgcatcgaggcgttgaacgatcgcagacgcgagcaggccgcacacctgcaaggcgtggccgatgacgcgcgagcagtggccgccatggtggaacatacgctgcatgacgtggccgccaaacgagacgagctgcaggccgccgcttccagccatgacgaggaactcaaggccctgcgcgcgcagcgcaaccagatcgagcccaaggtcaccgatctgaccaggcgcgaacatgccttggatgtaaaccgcgaacggttggccgccgaatccgggcagctcatgcaaaaagtgtccgacgaactcggtctcactttggaggaattggttagtggttacggccccgaacagccggtgcccgtgctggatgatgagggcaaccctgtgccgttggatgagacggaagctgaggctgagaccgaagagggagaaaccgggggagagaccggcaccaacggcgattccgccctctttaagaccgtgccgtataaccgtcaggagcagaagaagcgtctcgataaggctcgccgcgatctggccgcactcggtaagatcaaccctttggccaccgaggaattcgaagcgcttgaggagcggaacaagtatctcaatgatcagcgcaacgatgtggtcaaatcacgtgacgatttgatgcagctcatcaaggatctcgattccacgatggtccaggtattcaaatccgcgttcgacgataccgccgaggcattcgagcagatgttcgccacgctgttcccaggcggcaccggacgactgcgcctggaaaacccggaagacatgctcaccaccggcgtactggtcgaggccagcccggccggcaagcgcgtcaaacagctgagcctcctgtccggcggcgaacgttcgctgaccgcgctggcgctgctgttcgcgattttcaccgcccgccccagcccgttctatgtgatggacgaggtcgaggccgcgttggacgacgtgaacctgacccgtttgattaatgcgttcaatgagctacgcgcccatgcgcagctcatcatcattacgcaccagcaacgcaccatgtcgattgccgacgcgctttacggcgtaaccatgagagccgacggcgtaacagccgtggtgagtcaaaaactcgaacgataaacgaatggttcccgctggcaggaactggtaccacaggtgacagagggcggtccatatcgaaagaccgccctcagtcttgcttcgttcgacagctcccgccagcgggagcggggcggtattagcgcaatgccttgcgcacgccctgtacagtctgcagcgtcttgtagaagaccttcttgatgggtacgtcgcgggcgggggccaccggggtgatttcctcggtgaacttgcacttgaactcgttaaggcccttgagagacggcgcgaagtcggagccaatgcccatcagatcgtattcagtaataccctgcgagcctaggatgcagcattcggaatacagcagcttgtcggtcacatgcagccgcatgacctcgttgcgcatgccggcatagtagcgcaccgcatgcgtgccgttcacggtgacaatcgaccatgccaccacacggtcttcaatacgtgcggcgaacacacggcaatgatcggcacccaacgcgccgatcatatcggagtagtcgctcatcggagcaggcgtgaatccatcgcgctggccggtttcgaccatcacatcgtaatattcggagaaatcggccagcgccttatccgtctcatcggcaacctcggccgggcactcacgtagagacttgcgcacgtcacggcgtccacgacgcttcatccgagccagaatctcatcatcgccaccggtgacgtcgatgaccacggtctggtcgtacggcactgtggagagcaccttctccgtaccatcggcgaaccaggtgtcgatacgcaggaacgcgatgttcttgtcggccttcttgacggtgtccacgatggcgtcgacgacctcgcgctcctcagcctcggtgggcttggcgacccacgccggcccatgcatcgagcgcagataatgataaccgtgcgtctcaaaatcgataaaggagatcacggcgaccaattcaccatcacgcttgatcagataatcgccccatggcgtgcgtccgtcgatatccgcctgaaaaccagaccaaaccttggtctgttcgataggcaacgtgatgccggccttctcggcttcggcttccagtgtggctccgtcaactttctccaacgtgatcattacgattcagctatcctttttcgtttgtatccgtatgtcgtgtttctggtttggtcgtattgcgcgtgatctgatgtgggctaatcgggatccgatcaggatttgattggccggaatcccgtcacaagccaaacatgcgttcgacgacgtgatcgtcgccgtcgaacggcacatgcttgcgatggtccttgatccaacgctcgttgcccttgccgatgatcagcaggatgttgaatcggtcggcgtgcgcacgggcatcgtaaatggcgttggtgatggccgtcagacggtcggaaatcaccgtggagaccacatccttgttcgtgatgtagccttgcatttccatgcagatgtcgatgatcggctcggtgtccgtatcttcggcggtgaaaatgaagttcgcgatacggttctcggcagcctcgacgatttccttacgacgatcgtaggccttgttgccggccgatccggtcaccagcgtgatacgcgggttttcctcgccccaacgctcgtagacgaagtcaagcagcgcggtgacggatgcgtagttgtgcgcataatcgacgatggcgagcgtgtttgactgcgggtcgcggaactgttccatacggccggcgatacgtacggattcgatggcgtgcagtgcgtcggcgtcatcgagcgatacgccaaccgcatgggcgatggcgatggctgccgccgcattgaggtagttgaagtcgccatcgatggacagatggtagtcgccaagggcctgatctccgtcggcgatgtggaaggaggcgtgcgccgggtcggcgggccaggcgacgacgtccgcactggtgccggcattatccgcgtcatgcagggcgaaggtggtcacgccgatgccggctgcctccgcgtcctcccgcaacagatcggcgtgcagactgtccgcgccgagtaccagcgacttcgcgttgacgatgatctggcgcttgcaatacaggtaatcctcgaacgtggggtgttcgatcgggctgatgtggtcgggggagatgttgaggaacgcggccacatcgaaagtcaggccatagacgcggtccaccttgtacgcttgggaggagacctccatcaccagatactccatgccgttatcggccgcctcgcgcatcatgcggaaggcgtccatcgattcgggtgtggtcagatcggattcgacgtaggtgtggccgtcaaggcaattatcgaccgaggagaacaatgcggccttgccgccggagacggcgttgataagcgcctgcgtgaagtacgaggtggtcgtcttgcccttggtgccggtgacgccgatgaccgtgagctcgttctgcggatatccgtagaacgcggcggacagcaggctcatcgccttacgtgcgtcgttgacgatcaggccgggggtggcggttgcggctgagtactcggtttcggccacgtatgcggccaggccggcttcgtcgatgccgttcagatactcggccttgaatcggcccttgcagcacagcagggtgcccggcgtgaccttgcgggtgtcgtaggtgatgccggcgaacggctcatccgccgaagcgatacgggccgggtcgtcggtccagacatccccttggatgatttcacgcagcagatggtgttccttgagcaggtcagcggccgaagccaaagtcaaagccataattgttactccctattatctagccgatacgccattctacaggtggggtgtagcgtgttgtggctcacacgtcatcgaccacgatatgggcacatgatttgattagaatggtgaaccgtgacgacaagcgaagcaactacgcaatccgggcagtcagccggatcgggcgagtccatggcagccaagcgcgccagattcgagcagctcgccatgcccgccgtcaatgcactgtaccggcaggcgatgaggctgaccaacaatcccgatgacgcgcaggatctggtccaggacaccttcgaacgcgggttcaaggccttcgactcatttcagccgggctccaatttcgaggcgtggatgaccaccatcgagcgcaatgcctacttcaaccagtatgccaaggccaagcggcgcccgcagcgtgccaacgactccaccggcgaatacgacgattgggacatttacgatgccgccgaacatacgtcggacgggctcaagtccgctgaagaggaatatttggacgccttcgcgcccgaggaaatcatggccgcgctcgccaaactctcgccggaacgccggcaggtgttcatcgacgccgccatcgacggcaagtcctaccaacaggtggccgatgagcagggcgtgaaaatcggcacggtgatgagccgcctgaatcgcgcccgcacgcaactcaagcgtgagctcgcctcgtatgcgaaagagcgcgggtatgcgactggttcgtcggctggttcaccatccgcgaagttgagcgaaaacgttggtcgaatcgccgattccggccataatgaaagtagtgaacgaactgttggcagcaatggcgacacgcaagccgtagtgagacatagtcatgcgactcacgcccacacgccacaacagtcaagcaagctttcgggaaaggagatctgatgaacgatcagccggtagagcgtactcgccatatctccataacccgtacggcggccgatggcacggtaagccagaccgaagtgcatatcacggcggtgcatcatcgttcagtagataccggctcggccgctgcgtcggtccagacagacgtgcatatcgttacggagggcgactgttttgacccccgtacctgctgcgacgagcgtgaacaggcgttgattgccgcattgcgtgcctacttgcgcccggatgtggcgcccgaatgtctgatggcccggctcaaggccacgcttgatcactgctgcggcgaagataagtaacgacatatacaacaaggcccgtctgatgtatcatcagacgggccttgagcgttctataagaaacgcgaagaatcaggcgttaggacgcttgccgtggttggcggccttcttacgacgatccttgcgcttacgtccgcgcatgcccatgatggactcctttgctgcagtaaaaaaataagccttcggaattatgccacataagtacgacgtgatgcaacacgggtgtccatgtggcgatgatcgtcaggcttggttattcggtttttcagatttgttcggcgtggaaggtgaccacggtggtgtagtcatcgcccggctcgagcacaaccagatccttgccggtgcggaaggcgtcggcgtaggcggtcatcggttcgacggccacgccggcctgacgagccttcccgccgatttcgttgccggtgcacacctgccaggagttgatggtcttgtcgccggtcagcgtgaccttgatgccgtcggggcgggtgaacacggcggaagtgctgccgtcttcgccgcggttggtgatatcggtccaggcatcgtcgaagccacgtccctccagcgtggggttatcgcgcaggtcgaagatgccggaaaccggctcttcgccggtgggtagcaggtgttcgtctacggtcacgtgggtatcgcagtgcagctcaagacggcaggactcgttgtcggcggtaatggcctgaccggtggcgtgcttgccgttggccagccacgggtggatgccaaatgcccacggggccttcacgctgtcgttgttgtgcacggtgaaggtttccgtgagaccgttctcgtcaagtgcataagtggcggtgatggtgatatcaaacgggtagccggcgatgtcgggggaacgccaggagagcatcacatgtgattcctgcaaatcaacgagctcccacatgtagcggtaggcgtagccgtgcagggaggattggcggtcgaactcgtcgatcggcatctggtagtcttcgccatcgaaagaatactgaccattggtcacgcggttcgggtacggtgccagcacccagccgttgcagcaggggatgaccttgttcgggtcgaaggggacgatgaggtcttcgccgcgccacttcagctcgcgcaggctggcacccagttcggtgacgacggcactccattcgccggacgagatgacatattggttaccagtgcgaggcttcaaagccatagtgcacactcctttgtgaaacagattgttaccgctcacaatcgtatcgcacaagtcccaagacgcggcggcacataaggataaaaaattggctcccctctggaggggagccagcgtaacggaactacttctggactacttcgtagcggaccacagtggtgtagtcgccattgggggcgagcgtcaccaagtggtcaccagtgcggaaggcattggccggggcggtcatcggttcgacggcgataccatacggatgctcggcgaacggcgcgccagtggcggtgtagcactgccaagcattgatcgtctcatcgccaatgagcttcacttcaataccgtccgggcgggtgaatgtggtggtggtcgtaccatcggcggcacgctccacgtcgacccaggcatcatcaaaggcgcggccttcgagcgtcgggccatcgttcaggtcgtagatgccggtaaccggttcggtgccggtgggaatcagcgcctcgttcaccgtcacatgactggcggccttgatctgcaggtggcaggcggcggagtcggcgtcacgttcggcgacagtcgcgccctgcttgccgttggccagccacggatgcaggccgagagcccacggtgccggctcgtcgccatcattgcgggcattgacggtcacggtcatgccgttgttgccgagttcgtatgtgacggtcacggtcacatcgaacgggtatccgtccaggttggggaagcgcagtgaaagcgtcacggcgctatcggtcaacgattcaagcttccacatgtagtggtaggcgtatccgtggttcgcgttgttgcgcggtgcgggatgatattcgttgaccggcgcgcagtaatgcttgccattgaaatcgtattcgccgttttcgatgcggttcggccacggggccagcacatagccgttacaggtgggggtcaggtcgttgacgccgaacgggcagaaaatttccttgccttgataatcgaatcggcgaatcttggcgccgagttcgcagatgacggcggaataatcgccatagtgaatcgaatactgatttccggtgcgtggtgttttactcgtcatggaatcactcccgtagtgaggttggtgggccggtagctcctgctatcgctggccccagtctagcgcgtctcctctatcgaggcggggattggcgatagccggcatataataaacaattcgtacagacacggtagcaatacgtggagtgacgagtctcacaccatcatgcgagaagcacgtggattccttggaaaccggtgattcgtgggagacgcggaaaagttgtgacggcagattcctgtaatccctgccttacactggaaaacactattgacgttcaggaggttccgatgaccaaaagcgttgtgctcgctgatccgcgaggcttctgcgcgggtgtggaccgtgcgattcttaccgtacagaccattctcaaagccgcggaggcttccggaaagcggacgcgcgaggatgggctgcccccggtatatgtgcgccggcagatcgtgcacaacaagcatgtggtcgaggatttggccgggcaaggcgcggtgttcgtccaggaattggcggagattccggatgctgctgcccaagcgggtattccggtggtgttttccgcccatggcgtatctccggtagtgaaggcggaagccgaacgtcgtggcatgcatgtggtggatgccacctgccctctggtgggtaaggtgcaccgtgaggtgctgcgtttcgtgcgcgaggggtatgaaatcgtctatatcgggcacaagggccacgatgaagcggtcggcgtggtgggggagaaccccgaacatgtgcacttgatcgagcatgaatcggatgtcgattcgttggattttgcgcccgacaccaagctggtgctgctctcgcagaccacgttgagcgtggatgagaccgccggcaccattgccgcgctgaaggccaagttcccgtggattcaagagccgccgagttcggatatctgctatgccacatcgaatcgtcaggctgcggtcaaactggtggcccagcagtccgattgcgtggtgattgtcggatcggccaactcctcgaattccgtgcgactgatggaggtggcgcaggagggcttggggaagcgcggcaaagcgtatcgcgtggatgatgccagcgagcttgatccggcgtggttcgtcggactggagtccgtgggggtctcctcaggtgcctccgtgccggacgaactggtgtccggtgtgattgacgctctgcaaaacttgggtttcaccggtatgaagtccgtcgaaaccatcaaggaaaacatgcacttcgtgctgccggcggagttgcgcaggaagaagtagtcatccttggctcccctcaccgagggaagccaagaacggtcaccacgtgccgattggtgcggcaacggcgttcaagaccttgagcaggtcctgtggattcacgcctacggacaggcctcgcttgccgccggagaccagaatctggtcgaattgcatggcgctttcatccaacacagtcttatgacgtgtcttctggcccaacggcgagatgccacctaccacatagccggattcacgcattgccaccttgggatcggccatagaggccttcttggcacctacagccgcagccagggccttcaaatccatatgtccgctgaccggtaccacgcccaccacacgctccgaaccggtgtccgccatcaacgtcttgaacacctgatgctcgtcgaagccgagcttggtggccgcctccacgccgtagccgtcatccatatggtcgttggagtgctcgtattcgtatacgtggaattccacgcccgccttctccagttggactgtcgccggagtggaacccgcgcccttatcatgcttgtttttctttgccatgattaccgttctactacgaaaaacccccgcacaaggcgggggtctcacagcttagttctcaaacgaaccgtagcggcctagaccgcagtggttcactcggagatctcagcgaagtacagcagggtacggatcatgttggaggtgaagccgtactcgttgtcgtagaagtacacggtgcgagccagggtcacgccgtcaatggtgttgacgtcggtctgggtcgggtcgaacacgccaccgtgggtgtcgccgaggatgtcggaggagacgatgccctcatcgttgtagccgtagtaatcggtgtcggagaaggcagccttgaaggcttcgttgatctcgtcggcggtggtctcggtgttcagaacggtggtcagctcggtgacggagccgtccggaacctggacgcgctgggcgtggccctgcagcttgccgttcacggacggaacgaccttgccgatggccttggcagcgccggtggagtgggcgatggtgttgatggcggcggcgcgcaggttgcggccggtcttggtgccacgcgggccatcgagcagcatctgggtgccggtgtaggcgtggatggtggtcatgaagccggccttgatgccgaacttctcgtccagcagcttgaccatggcggccatggagttggtggtgcaggaaccggcggagacgatcacgtcggaagccttgaggatgtcgtggttcacgccgaacacaacggtcggggtggtgtcatccttggccggggcggagatcaggaccttcttggcgccagcgttgatgtgagcctgggacttctcggcggaggtgtagaagccggtgcactcgagcacgtactcgacaccgtcgttcttgacccacggaatgttgttggcgtccttctcggcgtagaccttgtattccttgccgtcgacgatgatggagtcttcggtggccttgacgtcaaccggagtgccatcgtcatgacggaaggtgccgtgggtgctgtcgtacttcagcaggtaagccagggtagccggggtggtcagatcgttgatggcggcaacttcaatgtcaccagcctggccgccgcgagcctgcagctcgaagatgcgacggaaggcgagacgaccaatgcgaccgaagccgttgataccaatcttaactgtcatgtaattctcccttgtagggtggccttggcgcgctttggcacaccgggccattgtttaccaacagttgctactgtaatgccgactctgtacacatggcaacgtttcagcgtgcgttttgggtaaaaatgccgtattttttgtgagcgctcacaatttggattgcccgcaaccgacatgtgattttcctctcctttggaggaatgtctcgaatcatcacgagcaagcgcgcggcatgcaagtcagcgaaccagcagcttggacacttcggtgtccagctcgccgatatcgccgccgaattcatggaatctgctcacctgtggcaacgccacttcgatggggaaggtgacgatcagtgtgccgcgtttcacgctgatggccgcgtccacgccgtcgcggaactcgttgctgaccccctgcaccaccgtattggtcagcgtgccgttcttgagctcgtatttcagccccggttcgttcacgccaagcgaaacatcggagtgggagaacgccgacaccatgcggccgtcctcgggcaccggatgcgcggggaacgaaagcctaccatcggtgatggccgtgacgatgagcccgtcgccatacagatacccgcttgccccgtgtcgggccagcagcgccatcagttgaatgccggaaatcgtatggtcaatacggccgccaagcccgccgtacacgtgaaactcgcggcaacccgccgaccagccgaccttcagcgcggaaagcatgtccgggtcgtccttcaacgcgggcagcgcgatggtgcgcacatcggtgcggggcggccggccctccagcgaatcgaagtcgcccaccaccacatcgggcacgatgcccaactcgcgcgtatggtcgagtccgccatcggccgcaatcacatacgcaccggtgggaaccacgggcgtgcccgcatagtattcgcccgcaccaaaaatcacgcatacctgagtcattatgcctactgtagccggtatccacccatcgacacacggtccgcgaatgtccgggcatgtggtaaacttcctatttggcttgaggaatcaagaaagcggggcaaccccacctggaagcctttcaaggcctcgggttcaaggcaaacagcctagcgattgcgatatacaacgcgcagtcgggaatgacgcaaagaactgatatgcgtctgcagaagctgagcgcatattggcgctggttttggcttgccatgaacccaaagcattgaacaggactccagcaaaggccccgccacggaattgaagtagaggattggagtcatcatcagcgacgaaccacgcattaacgacgagattcgcgtcccgcaggtacgcctgatcggcccgaagggcgagcaggtgggcgtcatcgcgacttccgtcgcgctgaacctggccaaggaggcaaacctcgatctcgtcgaggtggccccgaacgcgaagcctccggtcgccaagctcattgattacggcaagttcaagtacaacgagaagatcaaggctcgtgaagctcgccgcaaccagagcaccgcggaaatcaaggagattcgtttccgcctgaagatcgacgaccacgatttcgacgtgaagaagggccatgtgacccgcttccttaacggaggcgacaaggtcaaggtcaccatcatgttgcgcggtcgtgagatctcccgcccgattggtggcgtggaactgctgcagcgtctggccgacgatgtcgaggaatacggcaccgtcgagtccaagccgaagcaggagggccgcaacatcatcatgacccttgcgccgaagggcaagaaggtccacacccagtccgagcagcgtcgtcgtggcgccgagtcccgcgccgagcgtcaggctcgccaggcggctcgtctcgcggccaagcaggagtctcaggctcaggccgcggccgacgcgcagtccgcgatttctcagaagacttccgacaagaagcaaaccagcaaggagggcagcaatgccgaagatgaaaactaattccgccgcttccaagcgcgccaagatcaccggcaccggcaaggtgaagcatgtcggttccgccatgcgtcacaacctcgagcacaagtccgctcgcaagcgtcgtgaactgtccgccgacgatgtgctgcgcggcggccaggccaagaagctgcaccagcttctgcagaagtgagcatagggcttacccggaaataataagactttagaaagctgaggaatagattatggcacgtgtcaagcgcgcagtgaacgcccacaagaagcgtcgcgttgttctcgagagggcttccggctaccgtggccagcgctcccgcctgtaccgcaaggccaaggaacagctgctgcactcctttaactacaacttccgcgaccgcaaggctcgcaagggcgatttccgtaagctgtggatccagcgcatcaacgctgccgtccgcgctgagggcatcacctacaaccgcttcatccagggcctgcgtctcgccggcatcgagctggatcgtcgcgctctggctgagatcgccgtctccgacccggacaccttcaagaccatcgtggccgccgccaaggccgccctgcctgaggacgtcaacgctccggttgaggcctgattgcttgaagtcgtgacttcacactagaaaccccgcttccgagcggggtttcctattattagccccctctggcgaggggggctcccgcgcagcgggtggggaagagaacaaacacatgaccaacggattcaccaaactcacagagcagttcctcgtccacatcggcgtggagcgaggactcgccacggccaccgtcaccgcctacgaatccgatatcgccaaatacattgattggctcgaaacccgcggcatccacgaaccggacgccataaccaaacaagacgtcgaagactacatcgccgcccttgaccaggcgggggagtccgcccgctccaaagcccgaagactggcctcgatccatgaattccatcgcttcgcgctcggccagcacgcggtgactgccgacgtttctgccgcagtcaaggcacccaaaggtgccagcaccctgcctgacgtactcaccgtggacgaggtaacccgtctgctcgacgcggcggcagccggcggctcaaccgatccggtggtattgcgggacaaggccctgctcgaattcatgtacgccaccggctgccgcgtctcggaagccaccggtgtgaatctggacgacatcgacctggacgagcacatcgcgcgactcatgggcaagggctccaagcagcggcttgtgccattgggcagctacgcatgccgggccatcaccgcatacctcaatgcggggcgtggcgagctggaacggcgctccagcgccaagattcccgagagacgcgcactgtttctcaacaaacgcggcaagcgcatctcgcggcaatcggtatgggaaatcgtcaaagcaaccggggagcgggccggcatcaccaaaccactccatccgcacaccttgcgccattccttcgccacgcacctgatccaaggcggcgcggacgtgcgcaccgtgcaggaactgcttgggcacgccagcgtgaccaccacgcagatctacacacacgtaagccccgaaaccctgatcgaaacgtatctgacctcacaccctagagcgcggtgagacacaccattttgcgacgcgtccgcccatagcggaatcgcggcggggggggggagcaccaaagtcggccggaaattcaaggcgtgacaatacagtacataacagcgaaccgtcagccaggaagaggtattcatgctgcagatcaaatcgatctcgaagcgctataaaaccggtgatttcgttcaacaggcgcttgacaaagtcagcctgaacctacgcgacagcgaattcgtcgcgattctgggtccctcgggttccggcaagaccaccttgctcaacatcatcggcggcctcgaccggtatgacgacggcgatttggtgatcaacggcatctcgacgcgccaatacaaggatcgcgattgggattcgtaccgcaaccacaccatcggcttcgtgttccagagctacaatctgattcctcatcagacgattctgtcgaacgtcgaactcgcgctgacgatttccggcatcggcaaggccgaccgtcgcgaacgtgcgcgcaaggcgctggagaaggtcggactcggcgaacacatcaataaaaagccgaaccagctgtccggcggccagatgcagcgcgtggcgatcgcccgcgcactggtcaacgacccggacatcgtcctggccgacgagccgaccggcgcgctcgattcggacacgtccgtgcagatcatgaacctgctcaaggacgtggccaaggaccgcctcgtggtcatggtcacccacaaccccgaacttgcggaacaatatgccacgcgcatcgtcaacctgcgcgacggcgtgattcgctccgactccgacccgtttgtcgtggatgagacggccgaacagccggccgtgcacaagacgatgggccgcgcgtcgatgtcgttcgtcacgtcgctggcgttgagcttcaacaatctgaaaaccaagaaggcgcgtaccctgctgacctcgttcgccggctcaatcggcatcatcggcattgcgctgattctatcggtgtcgactggcgtgaacgcatacatcagcgacatccagcgtgacacgatgaccgcctacccgatcaccatcgactcccagaccttcgacctgagcagcatgatgggcggccagatgggcggcgatgacggatacggcggcaagacgcacagaaccgacggcatctacccggacgaccgcagcgtcaagcaggcatccagcctgaccagttcgattaccgaaaacaacctgacccgcttcaagaaatacctggataattccaagagcgagattcaccagtatgtgggttccgccggtatccagtacacgtatgacgtgaaattctccgtgttcgaccacgaccccgatggcacgctggtcaatgcggacggcgtgacgatcggtgccagcgactccacttcaatggcctcgcagatggcgtccacaagctcgtccggcatgtccggcacctcgtcgatcacctcgcagcagatgtcgatgctgaccggcaaaaccgatgagaacgccgcgcccgactcgttcaatgagatcatgcctggagcggacgacagcaagctcgtaggcaaggtcatcaccgacaactaccaagtggtcaacggttcatggccgaagtccaaggacgaggtggtgctggtgctcgacgacaacaacagcgtgccgctgaccacgctgtacgagctcggcctgctgcccgcctccgactaccacgagatgatgtccaagctcaacgccggcgacaaggtcagcactccacaagacaagatcgactatgctaaggcgctcgaccagacgctgtacatgattccggcatccgaccagtacgtcaagggcgatgacggccactaccgattcatcggcaacgacaaggatgtaatcgaacagcgcctcgaaacggccaccaaactcaaggtggtgggcgtcgtcaaggcgaagaaggatgcttcggccacaccgttggccgctggcgtgggatacacgcgcgctctgaccaatgatctgatcgaccgtgcggcctccagcgccatcgtcaccgatcagaaggccaacccgaacacgaacgtgctcaacggcatgacgttctcgccctcggacgacgccaccaaggcggccgacgcgcgcacctacgtggtttcgctgggcgtgacgcagaaggcgaacatggccaagtcgatgatgagtgccgggcagcggtccggtacgggcgcatcggatgccgctggtgctggtgctggtgctggtgctggcgctggcgcggcgggtgccggcgatcaggccgacgcgatggccgcgatgagcgaacagcagctcgccgacagttttgactcgtatatcgccacggcttcgaacgacgtgcttgtcgcgatctacgaccagtacgtgtcgaccggcacctacgacgacaacctcgccgcattcggtgtggtgagtcgtgacgcgcccagctcgatcaacgtctacgccgacagcttcgaagacaaggaccacatcgccgacgcgattaccgactacaacaacaccgtctcgaagaaagacaagatcacctacacggattatgtggggctcatgatgagctcggtgaccaccatcgtcaacgtgatttcctacgtgcttatcgcgttcgtgtccgtctcgttgattgtttcctcgatcatgatcggcatcatcacctacatttcggtgctggagcgcaccaaggaaatcggcatcctacgcgcaatgggtgcctcgaagcacaacgtgtcccaggtgttcaatgcggagaccggcatcatcggcctatgctccggcctgttgggcgtgggcttgaccgtgctgctcgatattccgatcaacgccgtgttgcatcacttcatcggcaatgcggacgtcaatgccgccctgccggtgaccggcgacgtggtgctggtgatcctaagcgtggtgctcacgctgatcggcggcctgattccctcgcgcaaggcagccaagcaagacccggccaccgcactgcgcaccgagtaagcgcatcgacatagtacgagacgagatccataaacctcggaacactggaatgcccgctgcaaaacggtgttccgaggcgagcccggcgagtacattaggataggcgagcaggtattcccggcaaagggggcgaggggcaacgatggacgactggcgagacatccgcgataaagacagcgcattccgtcaaggaacgctgcctatggcgggaacgtatgtcgttgcacccccagcgaacccggatgttgataaggtagacagtatgcctaccgatttgcttggacgtgaatacgaaaccttccccgcacccgaaccgctgcaacagcacggtccggcgcgtgtcattgccatgtgcaaccagaagggcggcgtaggtaagaccaccagctccatcaatatcgccggtgcgttggcccagtatggccgccgcgtgcttatcgtcgatttcgatccgcagggcgccgccactgtgggactgggcgtcaacgcgaataccgtggagaacacgatttacaccgcgctgttcgatatttccgtggacccacatgatgtggtgcagcacaccgcattcgagaacatcgatgtgattccggcgaacatcgatttgtccgccgccgaggtccaactggtcacagaagtgggccgggagcagatcctgaacagtgtgctgcgcaagctcaagtcggaatacgatctcatcatcgtcgactgccagccatcgctcggcctgctcaccgtgaacgcgcttgccgcagctgatggcgtgatcattcccgtggccgccgaattcttcgccttgcgtggcgtggccctacttatgcagtccatcgaaaaagtgcagtcccgcatcaatcccgcattggaagtggatggcgtgctcatcaccatgtacaccaagacactgcactgcgaagaggtctgccagcgcatttacgaggcgttcagcgaaaaggtgttccacacgttcatctcccgctccatcaaactgcccgattccacggttgccgccgcgcccgtggtggtttatgcccctgagcacaagacatcaaaggaataccgtgaggtggcacgtgagctcattgctcgcggcatcgtggcgtaacgattgtttcgataaacgatgaatgagacttccctttctcggctcccctctctgagggaagctggctcgcgtagcgagactgaggggagctccgcggaagccgaaatcagcacggaggaatccgccacttccggcttccgggtcaacctcgagatctattccggtccgttcgatgccttgctcggcatgatcgccaacaacaaactcgagctgaccgaagtttccctctcctcgatcaccgaggaattcctgacatacgtgcgtgggctcgatttcacgaaaaacatggatgaggccagcgcctttctcgatatcgcctctattctggtcgaggccaaaagcgtggcgattctgcccggcagcgaagacagccagcacgacgagcaaagccttgaagcactgcgcgaacgcgatctgctgttcgcccgactcctccaataccgcgcctacaagcaggccgccggtgatttccgggcgcgtatcgccgccaatgccggccgattcccgcatccggcggccatggacgagggcattgccgccatgctgcctgagctggtatggacgctgaccccgctcgaactcgcccaactggccgcccaggtcatcgccaacgcgcccgcctccgaagtatcgattcaccagctgcacgtgccgctggtcgatctgcgggcccaatcgctggtggtgcgcgaccggctgatcgcggcactggaatccaagggcgaccagtcgatgtcgttcagcgaattgacccgggactgcacttctcgtattgaggtggtggctcggttcatggccgtgctcgtgttcttcaaacaaggtgtgctgcagtatcagcaagatggtccgtttgccgaactgcacctgaggtgggtatccggcgtagacgaaacgatgaacgacgtgaacatttccgaaggcgattttgcgtaaggacggcgactggtgactgagcggattgacgcaacgaatgcaaccgagcacatggcggatgccgaatcgacggctgaatccgcaaaggccgaggtgaggggagtggaggagacgcgccccgaatacgtggatttcacggtagacgattttcccggcgggctgcccgcatgtctggaagcgattctgatggtcgccgaccagccgcagaccgccaccgagctggcccgcattttggcattggaccgcaacacagtcgaagaggcattgcaagccctgcacgatgactatgagggcgatgaatcccgtggcatccgcccgcgcggcttcgaactacgccgcaccgctcgtggctggcagttcgccagtcgcgccgcgttcgagccggtcgtctcattattcgtcaccgacggccagactgcgagactcagtcaggccgcactggaggcgcttgccatcgtggcctatcgccagcccgtcacccgagcccaagtggccgcgatccgcggtgtcaactccgatggcgtgattcgctcgctcacggtacgcggccttatcaaggaagacggcgtggaccccgaatcccgcgcggcccttttggtcacctccgaatccttcctcgaccaaatgggcctgaagagtctcgacgaactaccctccctagcgccgttcctcccgtccgtcgccgaaatgacacagtcgaaatcggaagacacggacgtgatttcgtagcgattggggcccgctacctgaccaatattcgtgcgctagaccatccaatatgtgatttatggtcattgtgactataagtagtgctatgctctcaatgcggggagaacaaccggtatggaaagaggcatggcatgggattcggcaatgtgtccgagcgccgcagcgcaccgccacaggtcggcgtgtcagtggtgattctggcactcggcccgaaaggcgataccggcaacagtgccgccgattccggcaacgccgcgaactcggcccattcccgtctctggctgcccctggtcaagcgcgtccgtcagccgttcctgggctgctgggcgttgcccggcggcgacctgcgctccgatcggtcgttggaacagtccgcctacgcggccctcgaatcgaccacagacctgcacccgcgatacctcgaacagctgtacacctttggaggcccgacccggtcccatggcggattgcccatggtatccgtcgtgtactgggcgctcgtcggccagaccgaggccgcgggcttcgaggacggtgacaacgtacgatggttccccgaagacgaactgcccgagctggcgttcgaccatcgccagatcatcgactacgcgctgctccgcctgcgctccaaaatcgaatactccgacgtggccacccgactgctcggccccacgttcaccctgcgccaactgcacggcgtctatgaggcgattggcggcgaaaccctcgacttggcgaacttccgccgcaaaatgcttgcctcgggagatcttgaagacaccggggagaaggtgcgcgaaggccgccaacgaccggccaccgtctaccgctacatccccaaacgacctgtcgagaatggcacgccccacgaatccgatggcgacgacatcgtggaactgtccagacaaggcgagcgtgaagacgctctcgacgcgctgattccatccgcgcgcatctgatttttcccgccgacccgcttcgggccggcatcacagacgtatataggaaaggaaccgctatgaccgcactatccactgcgccgtccgttgacgagatcatcgccaagctgggcgcgcaaagcacctgcgatgcaggactgacccaggacccatggcacttcgacaccaccacacccagctacggtcccggtgcctcgatgctcgaccgtctgcccgccaacgcgccgcgccagcaggtgctgccggacgagtaccgcaaggcctctgacgaggagctgcagcagcgcatcaccgacgccaagcagcgtcttggctccaaactgttgattctgggccacttctaccagcgtgacgagatcatcaagcacgccgatttcgtgggcgactccttccagctggccaagaacgccaccgaacgcccggacgccgaccacatcgtgttctgcggcgtgcacttcatggccgaaaccgccgacatcctctccacgcccgaacagagcgtgaccctgcccaacctgtccgccggctgctcgatggccgatatggccaacatcgaccaggtccaggaatgctgggaccagctcggcgagatctgcggcacccagccggacgccgatggcttgcagcagatcatcccggtcacctacatgaactcatccgccgcgctgaaggcgttctgcggacgcaacggcggcatcgtatgcacctcgtccaatgcgcacgccgtgctggaatgggcgttcgcccgcggcaagcgcgtgctgttcttcccggaccagcatctgggccgcaataccgcccgcgcgatgggcattccgctgagcgagatgccgctgtgggacccgttcaaggcacagggcggcgccgccgatccggccgactacgcccgcgccaagatgattctgtggaagggcttctgctccgtgcaccagcgtttcaccgtcgaacaggtcgaacgtgcccgtaaggcatacccgggcgtcaaggtgatcgtgcaccccgagtgctcgatgcaggtggtcgacgccgccgacggtactggctccaccgcgtacatcgtcaaggagatcgccaacgcacccgccggatccgccatcgccgtgggcaccgaaatcaacctggtgaaccgtctggccgcgcagtacccggacaagaccgtgttctgcctggacccggtggtctgcccgtgctccacgatgtaccgcatccacccggcttacctggcttgggctttggagaacctcgaagccggcaacgtggtcaatcgcatcaccgtggacgaagacaccgcccgcgaagccaaggtggcactggagcgcatgctgcgcgttcacccgtgacatgcttctagctcccctccctgaggggagctgtcaccgtaggtgactgaggggggcagatgacgcaaaaacagaggaaagcaacacaatgagcaacactgaaatcgtcgtcgtgggcgcaggcgtcgccggactgtccgcggcactggccgtggccggcaccggacacgacgtgaccttggtaaccaaggccggactggtggaatcgaacacctatcatgcgcagggcggcatcgccgcggccatcttctccgacgacgacccgaagctgcacgccgccgacaccatggccgcgggccatggcctgtgcgacccgaaggccgtggacatcctcacccgtgagggtgcggagcgcgtccgcgagttcgccgcggccggcgtccacttcgaccgcgacgcgcagggacacatgctgcgcggcctggaagcggctcattcgcgcgcccgcgtggtgcatgccgggggagacgccaccggcaaagtgctcgaactggacgtctccgccatggtgcgcaagaacccgcgcatccacatcatcgagaacgcattcctcaaagacctcatcgtgcgggacggccacatcgccggcgtccgcctgctgatcgacgggcaggacaaggatctggccgccgaccgggtgatcttggccaccggtggagcaggccgtatgtacccatacaccaccaatccgccggtcgccaccgcggacggcctcgccgccgcatggcgtgcgggagcccaggtcgccgatctggagttctaccagttccatcccaccgccatggccgtgggcgagcacttcctcgtctccgaagccgtgcgcggcgaaggcgcggtgctgctggacgaacacggccaccggtacatgaaggacatcgatccgcgcgccgaactcgcaccgcgcgacgtcgtggcccgcgagaacttccgcgtgatgcaggcgcaaggcggcaagcccgtgatgctcgacgtctcgccgatgacccgcgagaaccccgacctggccagcttcctggcccaccgattcccgaccatcgatgcctatacgcgttcgcttggcttcgactggagcaaggagccgatcccggtggcgcccgccgcgcactactacatgggaggcattcgcaccgatctgaacgcccggacctccatccccggcctgtacgcggccggcgaatgcgcccgcaccggtgtcatgggctccaaccgccttgcctccaactcgctgctcgaaggacttgtctacggacgccgcgccggtcttgccgccgtcgcggacggtgacgacgcggtctgggcacccgaaccgttcctgaactccgccaccggtgccgtgttcgaccatgcgccgatcgcgctggccgctcctgccactacggctgctgctgacgataccgccgccgacaaggtctgggaccgtacccgcatccagaacaccatgtggcatggcgtcggcgtactgcgcgacgaggccggactgaaaaccgccatcgccgaactcggccaaggcctcgccgccgcaaacgcccaggctgatgtaaacgccgatggcgctgcaagtagcgttgaagctttggagaaccgcaacatgctcaccgtaggctatgtggccgccaccgccgcgctcgcccgcaccgagtcgagaggcgcccacgcccgcaccgactacagcgagccagtcgacaactgggcccactccgtcgcctacatcaaggactgacccatgctcacatcacacatcatccgcaccgccgtcgaagcggcgctcgccgaagacgcgccctacggcgacatcacctgcgagaccaccatccccgcggacgaaaccggctcggcccacctcaccgcgcgcgaaaacggtgtgatgagcggcatcgacgtgttcgccgcagccttcgccgcacagaacccggccgtcaccgtcaccgccgccatcaaggacggcgaacgattccagcgtggccaggtactcgccaccgtggaaggtccggtacgcgacctgctcaccgccgagcgcatcgccctcaacttcacccagcgcatgagcggcatcgccacca

SEQ ID NO: 1240 - DNA, 2658 bp, Unknown
  R81_24m  MAG No. k141_28458
cgatacgcacggtgaacggcctcggccttggctgcggcaagaatcatcacacgctgcttgatgctcaaatcgtcgacggtgacaccttcctcacgggcggccgcttccagcgcagcaggctcatccacgtgcgagacgcgaattgtggggcagatacccgccgaatacagcacgtcacggcgaggcttggacttggaagcaagaattagcggaatggacatgacttaagtccttatgctcccgctggcgggagctgtcgaacgaagtgagactgagggtggtctctgccggtatggcggaccactctcagaccgcctgcggcggccagctcccgccagcgggagccttctcctcgacttagcgacgctcgatttcgacgccggcggtgttgatgggcaggtgaagcacacgccagtggccggaagcaagctgctccgatgcgatctggtcgatggcttcgcgggcgttgccgtagtgcagcacgagcacgcaggggccggcaccggagacggcggcggcatagcccttggagcggaagagcgcaatgagctcggtggacggcggcatcagggtaccgcgatacggctggtgcaacttgtcctgcgtggcggtgaacagtagcgcgttggactgggcctgagcggccgtaagctcgtcagcgaacggcgattcacgggttccgccagcgcaagcgcacgtatcggcatcctgagccggggcagcggcgacgccggacttgccctgctgggcggcctgggccagcaccatgggattcatcgcagcgggcagcagacccacgcgagacacgttgtagacggcgtccttgtatggcagttccctaggcagcgcctgacgggccttctcagtggacagctcatagtcgggcacgaacacggcggcggtgatggacgggtccaccgggtagttgacggcgtggaatccgccgtgcagcggttcaccaccaggaacggcgaccgagccgacgccttccgcggtttcgaagtcccaagagacggtcaggccaccgaacacagccggggccacattgtccgggtgtccttcaatctgggcggccatatcgaagatggccggacggttgaggtcaccggtctgggcgaaggccgcggcggcggcgatgccggccacgatggcctcggcggaagagcccatgccacgagcctgagggatgttgttggtcgcttccagcgtgaagccgagtcggccgaggccgaacgtggcacaggcacggcggaaggtggagaccacgaggtgggtttcgtcgcgtgggagggtgtcggcaccctcgccgtggatgatcacgtgggcaatgccgtcgttcgggtcgtcgttgagcgtgaaagtgagctcgtcatggtagtcgagcgccagacccacggtatcgaagccggagccgaggttggcggacgtggcgggcacgcgcacgtgaacgctattgcagattgggttcatggttgttccttaaaaaggagctccccttgtcaggggagcttgggtattcagctttcaactcacgggcagccgttcgaccgcctcatcagagggagcctagacggtgtcagtccagcacgcgcaggatggacgggtcaccggtgacgaagtcgagcgcctgcacggccttgacggtgttgcgcagggtttcctcgtcggtcaggtgggtcacgatgcgcaactgctgaatctcgccgtcgtagccggggtcggtcatggtgggcttcagatcctggttcacaccgttgatggagacaccgttcttggcgaactcggcggcgatggcggccagcacgcccggcttgtcgtggatcaggaagcgcacggcgaatgcagccttggaggcggtaatcggagccttcggcagattcttgtacagcgggatggacgggccggtgcagccagcagcaatgtggcgggcttcggtcaccacgtcgcccacgacggcggaggcggtcggagcgccgccggcgccacggccgtagaacatgaggtcgtcggcggcctcggccttgacgaacacggcgttgaaggagccgtgcacggaggccagcgggtggttctcgtcgatcagggccgggtagacgcgggcggagacgccggcctcgccgttctcgaccacggcgagcagcttgatgaccttgtgctcggcggtggcggcggcgatgtcgtcggcggtgatcttggtgatgccttcgacggacacgtcgtcgatggtcacggaggtgtggaagccgagggtggccatgatggcggccttgttggcagcatcgtagccttcgatgtcgccggtcgggtcggcttcggcgtagcccttggcctgggcgtccttgagcacgtcgtcgaactggagacccttggtggtcatctcgtcgagaatgtagttggtggtgccgttgacgatgccaagcatgttggtcaccttgtcgccgaccagggactcgcgcagcgggcgcaggaacggaatcgcaccgcctacagcggcctcgaagtagatgtcgacgcccttggcctcggcggcggagtagatctccgggccgtacttggccagcagcgccttgttggcggtgaccacggaagcaccggattcgatggcggcaagcacgaacttgcgggccacggtggtgccgccgatgagctcgatgacga

SEQ ID NO: 1241 - DNA, 34752 bp, Unknown
  R81_24m  MAG No. k141_28720
cgggatgccgtagtcgcgttcgatggccttgccggtggaaacgaggtccttggcataggtagtgatcttgcggtagatgttgtcgcaggtcttgtcgacatcgtccgaggcgcagtcgagcaacgagatgcccatggtgatggtgcggacgtcgagcttctcctgctcgatcatctgattggtctcgtggacctccatgatgttcagcatggtttgttccttacaggatatttaaagactagtttggcggtcaccctcatcagagggataaggatggctccgtcagcggaaagcccaccgggctttccgcctcctcgcgtgcggcggcctgctgagcgggccgcctcaaatacggtgcatcttggtgaagatttcctcacgctggcagcggatgcgcacgccgatgtcgtcgccgaggtcctcaaggttgccgaccatcgcgccgaagtccttgtccgcgttggcgtagtcgacaatcatcatcatgttgaagtaaccgtcgatgatggtctgcgagatgtcgagcacgttgacgttgtgctgggacaggtaggtgcagactcgcgcgatgatgccgacggtgtcctgaccgacgacggtgatgattgccttgttcatggctctccctggtcgtatacaaaaagcgggtgactacccaattatagggaagacacccgccattatgttcattaccgattcatgtatcgtttgccgcccttgaacatgaaggagaacaccagcacaacgcccgagttgacgccgatggtaaagaacagtgcgccgccgatcgcggtcatcaccacgccaatggccagtatgcagccgacgaccatccactgggcggtaccggaggatacggagaactcgtccatcaaatcgggcagggcgatgttcatggatgtctcggacagcatgccgaggaatgcgccgatgtacaggccgagcatcaccttatgcggatggtcgaaatgcctggtttcaggagcgttatgggggttatgggaataagtggtgccggatgcgccggcgggcatggtggtggtgcgggataaaacgaagctccctcgtcagagggagcttgcaatggctcaggcctcgcgcaaagcgctcggcgctgcgcacgcggtcctgcaattacggacgacctacggccgacccagcattacctcggcctcgcctattggctcgacctcgaccgcatccgccggacaacccaccgggttgtcctaggcctcgcgcgaagcgctcggcgctgcgtacgcggccagggcgcgcggtgcgtggaagccttgattttcgaattcgtcggcgatcttctgagcgacttcctgagaacggcccttatcaaccagagcgatgatggagccgccgaagccgccgccggtcatacgcgcaccgtaggcgccgttcttgcgggccacgtccacggcgatgtccagctcggggacggtgacctcgtagtcggcggccagcgaatcgtgggaagcgttgaacagacggcccgcagccttgatgtcgccctgagcgaaggcacgcacgaaggaacgcacgcgctcgatttcggtgacgacgtggcgcacgcgcttcttcatggtctcgtcaggcagggcgtcaagcgtttccttgagggcctggaactggtcatcggccttggagatgccgtcggcggtcacacgcaggttggctacaccaagaatcttggcggcttcctcgcaggtggcgcgacgctgagcgtactggccatcgttgagctggtgcggagcctgggtatcgaccacaagcagctcgaggttgtacttgtcgaggtcgaactcctgctgggagacgttctccagcggggtcagctccgagcggcagtcaagcagcagcgcgtggccttcggtgcaacgcatggaagcgttctggtcaagaccgccggtggaggcgccggccatctcgttctcggacttgatggcggcgttgatgagggtcacacggccggcgtcggaatcgccgtagccaaggccgtacacgtcgtccagagccagagcggtggagcaggtcatggcggcggaggagctcaggccggagcccagcggcacgcaggagacgaaggcggcgtcaaagcccttgaccttgtcgaaaccagcctgacgcagcgcccaggccacaccggtcgggtaggcggaccagccgtccacgccacgggccttgaggccatcgagatcagcttcggcgaccttgtcgggagccacgccggagacgacgcgaaccttggtgtcttcgcgcggcttcagggcgatgaaagtgcggtgcggcagagcgatcggcaggcacaggccggcgttgtaatcggtgtgctcaccgatcaggttcacacggcccggagcagcccacacgccctcgggcgcagcgccgtaggtatcgacgaacagcttggtggcttgcgagacgccttcctcatgggtcagcggctcaatgaattcaacagcagtcattgatgttttctttctatcagtcggcgatgtcgatggagccgagctcgtggaagcgcttggcgatgagttccggcgtggtgtcggagatccaggcggccatgccggattcggagccggcgaggtacttgatcttgttggcggcgcggcggaaggagaagaactgcaggttcaggcggtagttctcgcggcgggcgtcgtggatcggggcctggtgccaggcggcgatgtacggcagatccatgcccttgccgtcgcccttgtcgaagaaggcgttgccgcgcttcaggaggtgcgagtacatggaggcgaggtcccaacgctcttcgtcgttgagctggtcgagggtgagcacgtcgcgcaccggagccacgtggacctcgaggggccaacgggcggcggccggcacgtaggcgacccagctgtggttgcgcatcacgatgcgttcgccggcttcgagctcggcgttcatgatgtccttaagcaggttgccgccggtcttctcgtggtaggcctcggtgtgctggagttccttctccatcttcggggcgatgaacgggtagcagtagacctggccgtgcgggtgggcgagggagacgccgatttcctggccgtggttctcgaacgggaagatctgctcgatgccttccatcttggagatttcggcggtacggaaggcccaggcctcaaccacggtgcgcaggcgggagaccggcagatcggccggcaggccatcctcgttcgggtcgaagcagatgacctcgcagcggccggcggcgagcttcttctcccacagcgggttgccgtcaacgtaggtcacgtcctcggagacaccgggcacgcgcaccatcgaggggaagcggttctcgaacaccacgacgttgtagtcggtgtccggcacttcgccgtcctggtacgggtcaccgggcttgcgggcggccagcgggttgcccttggcggtggcgccggggccggcggtgatcgggcggttcatacgggcggtggccatcgggatccagtcgccggtcagcgggtcgcggcgcatctgcggggcggcgtacggcacttcgttgccgtcggcgtccaggtgcggggcgaaacggtagtccagcgggcgcgggtccttgagctcgcgggtcttggcaccggagacgaactcggggtcgtcgtccaggtagaagaagtcacgaccgtcggcaagcgtcgtcggcgtgatgcggatgtgctccttcgcatactccccgggggtgtagttggcgaaatcagccatgggtttactcactttcctcaatgatctcgctctggtgggccagcacgagttcctttaccaaatccttggttttggcggcggagtcgggatcgagcccgtcgtcagtaatgaccgtgtccacctggtcgaagcgcgcaaacagcgacagcgatgtgcagctccacttggtgtgatcggtcaaaactatggtacgatcggcgatgtccatcatcgccatatcggttgcggcttccagcgaattcggcatcaggaagccacggggaatcgacaccgagtgggtgccgaggaatacggtgttgacacgcagcgaggcgacgaccttgtccgcgatcgggccgacaagcgagttcgatcgggtgatcacgccgccggtgacgatcacctccacgtccttggattcgagggcctggaccagttcggccacgggaatcgaattggtgaggatggtgatgccgctggactgctgcgattcgagcagatgctgggcgaagacataggccgtggtgccgccgccgatggcgatcacatcgccgggagccacatatttgatggcttcctgggcgatggcgtccttcaggccgagatccatctgggacttgacagagaacaggggttcgctgagcaaggtactggtagtcaccgcgccgccatggacgcgcttcagcagtcccttgtcggcaagttcggcgatatcgcggcggatggtcatcgctgacacacccagttccttcgatagcgccgtaatgcgcactgccccgcgcgtgcgcaacctgctcaagatgaggtgctgacgttgtgacgaaatcatgtgaacattatcgcacacaaaagctcacaaaccaaaccggcttgagcgttttggggacaatctctcgaaaattccgggcaattcaggtgttcatttccacaaaaccgcgcaaaatcgcacattgtgcgaaccgatattctcgcagcgaccactagcgcgatgactcacgaccgacgactctcccgagcgcgttgctcagcggcgagtcacgcctgatacctggtgcatcccgattcatgtatcttctgccgagccgacgcctgcgtgcgcctcgacacgcggtagccccttccccaattcgcctaggcaggaatcgcctagccgcaccagcccaagcgtgagacaataggcggtatgacttacgtttctgaaagcttctggcacgacgccgtcaacaaagccaccaccgatctgttcaccttcggctacaagcacatcatcaaaccgaacttcgtgttcaaccaccgccccgatgaggcacacgatcagatgatcgagttctgccacgtcgtcaagaacgtcccgccgctgctgctcgccgagcagctgatgctcgactacaccgaccccattctggaaacgaatgtgatgggcgtcgatttcaccaacccgttcggcctgtccgccggcctcgacaagaactgcgacatgcccgtggtgctggaccatgccggcttcggttttgaaaccgtaggctccaccacctcgcgtccctgcccgggcaacgccaagccgtggttccaccgtctgcctgaatacgattcgatgatggtgcacgtcggcctcgccaacatcggttcggacaaggtcatcgagcgcgccgagaaggcttggactcaggcccgccagatgcagctgtctgtgtcgatcgcccgcaccaatgacgaccagtgcggcgatttggacgaaggcattgaggattactgcatttcgatgcgccgcgccgccggccgcaccgcgatggtggaggtcaacgtctcctgcccgaacacgcacgtcggcgaaccgttcaccgcgactccggaagcgctcgaccgtctgtttacggcgctcgacaagatcgaccgcccgcagcccacgctggtcaagatgccgttgaacaagccgtggggcgagtacaaggagctgctcgatgtgctggccgagcacaatgtgcaggggctgtccatcgccaatctgcagaaggaccgcaccggcctcgagattccgcgcgattgggagggcggcctgtccggcggcccgtgcaccaacgccagcaccgagctgattcgcaaggtgtataaggagtatggcgaccggttcgccatcgccggcatcggtggcgtctttacccccgagcaagcctatgcgaagattcgttccggctccagcctggtcatgttcatcagctcgctgatgtaccgaggcccgcagcagatcaccgtgttgaagcgcggtctggcccagctgctgcgccgcgacggattcgagcacgtctccgacgccgtcggcgtggacgtggagtgaactcacatattgccctattacccatggggcggtaaaaccctcatggggcggtgattgtcccatggggcggttagccaaatttcacattccgcagaataccgccgttttgggttaccgccccatgagggttttaccgccccatgagggttttaccgccccatgagggttttaccgccccatgggaaagtcaccgccccatgaggattcagtacgcaccggccacgtattgcggggcgtaggggacctctgtggacggtatgcccagcttgttggccgcacgcaacggccagtacggatcgcgcaatgcggcgcggccaatttccacggcatcggcttcgccacgggccaaaatcttggccgcctgcttcggcttggtgataagacccaccgcggtcaccggaatatcggccttggacttgacctgctcggcgaacggcacctgatagttcggcttgaccggaatcgacactcccgacatgatgccgccagtggacacgtccatcacatcgacgccatgctccttcagcaccttggatagtgcgatggtctggtccaaatcccaaccgccagcggcccaatccgtggccgaaatgcgcaccagaaccggcacgccctcggggacggccccgcgcacggcatccacaacctcgaccaggaaacgagagcgaccggtcaaatcgccaccatattggtcatcacgctcattgctcagcgggtcaaggaactgagaaatcagatagccatgcgcagcatgaatctgaatagcctggaagccggcggccaccgcacggcccgccgccgcggcgaacgcaccgaccagaccatgaatctcatccacggacagcgcgcgcggcgtacgcagcccgccgaacgcgatttcagacggtgccatggtgggccagccgcccgcctcctccggcacactctgaccgtcgtaaccaacggcgaagcaaccggtcgaagccttacgccccgcatggttgagctggatggcaggcaccgcacccgcctcgcgaataccgtccacgatccagcgccaagcatcaatctgcccgtcttcccacaggcccagatcgcacggcgtgatacgcccttcaggagccacggcggtggattcgacgatcaccatgccgaatccgccgaacgcacgagacacgtaatgctggtagtggaacggcgtgggcctaccatcgcaggcgaacgacgaatacgtgcacatcggcggcaaccaaatacgattacgcacggtcacttcgcgcagcgtcattggcgcaaacagtcccggacggtccttgctggctttcttatctgccttgctcacagcttccctttcctcataatcctcataatcatcgaacgattcgctcgtcttgcccgcgccggcccgcttcttggaccgtgcgtcggattttgacttcttcttaccgtgcctacggttcctcgatgcatcctcgtgcttggtcttcggctgcttggactgttcgccgtccgaagacgaagccagcgtcaccgctttgagatccggcacgtcgaatccacgaaaatcaaaattctcatgcgtcagatcgtcgtcgctcatcgttcccctttccaatgcgcgttcatggcgaatattcgatgaacgcgctggcgttgtcattaagtattgtaaaacgggcgtcacctgaaacaggtaacgcccgcaaactacgtaatttgggtatcgcagtcgactatgttacgtagactcagccggcctgcaatcaccaaatgtcaaacgccaatcaccaatcactggccatcattcgaccgctctgaattggtgccctgggtttgggtgttgttttgcccagtgttctgcgactgagactgcgactgggattgaccattggtggtcgtctgcgattggctgttgccattcgtagtggtctgcggcacgctgaacgttcgtccgccaatgcccaggtacttgccagtcgtggtgtacttcgagacgggctggccgtaatcgttgtcaatcggtattttcttcttggaaatgtagctattgaagaagttggtaacggccggagctgcgattgtcgaaccatcccaatagctgttgtaccggccgttgatggcaatgttggaaatacggttggtgtacgggttctgtgcatcgccgaccacagcgaacgccgcaatctgattaggaatgaacgatccaccggacaccgcaagatcctcactggtaccggtcttaccaaacgacttacgcccgtcagccaatctgaatgaccaaccggcaccatccggccgcaccgtaccttggttcagggtataagcgagtgtttggatgatgtccttatccaccgcctgatggcagttcgcggatggaaccttgagatcgttgccgtccttatcggtcaccttgctgatggcaatcgggttgcattgcacaccattcgaggcgtatacggcgaagatgctcgccatggtcagcggggacacattcaccgagccgatcatcatggatggtgtatacacctgggttttgtcgatggtctcacccgtggcggcgtcatggtatcccagtttggtcgcggtgtccgccaccttgcacagtttgaggatggcgcccatggaggcctgggtggtgttgtgcgatcgcaccagaccgaggaacgggctttccgggttcaccgtgccggcgcccatggcgttcgacacgttccacgaatcggcaccgcccttgtagttgttgcaggcgaagtcggtcgtggggtacgtcgtggtggtctgtaggttgtcgttgatcgaatgacccgcctccatccacgcaatcaggttgatcggcttccaagacgaaccaatggtccaaccggagccgccgccgtccaccagatcgacggcatagttctggcccgacttggtcggatcgttcgcggctgccggagtggcgtcatagtaacgattcaggccaaagctcagcacctcgccggttcccggtttgactgcggccatggctatttccatgccgctgggatcgtccggtggaatggtattacgcgcggtctccatcatcgtggaattcgcttccacatccaacgtggtgacgatcttcaggccaccctcctgcagcagcttgttacgctccgcacgagtcttgccgaattcttcggagttctggatgcgatgcaccacgaaatcacagaagtatgcgtagtcgccggtgtcctggcagccgacgttcacggcctgcaccttcagcgtgtccttcagcggcgtgttcacggcttcggtgtactgcttctgggtgatgtacccctcctgcagcatcagcttgagcacgatgttgcgctggttctcgctttccttctggttctcctcgaccagcggatcgtactggctcgggttcttggtgatagccgcgatggtggcggactgcaccacgttcaaatcggcggcggacacgctgaagtagcgctgggctgcggtttccacgccatacaggttgttgccgaactgggcgatgttcagatagccctgcagaatctcggccttggaatacttcttctccatctgcacggagatcagcatctcgcgaatcttacgggcgacggtgtcttcggtggcatggtactgggcgatcgggtcgtcgtcctcgatcgcctgcatgagcagcacgttcttgacgtactgctgggtcagcgacgaaccaccctgctgggagcctttgacgaggtaggtctgcacgaacgcacgcatcacgccttgcacgtcgacgccggcgtgagtccagaatcgacggtcctcgcgcgccaccactgcctgctgcatggttttggaaatcttcttcagcggcacgacgatacggttttggttgtagaacgtcgcgataacggtggaaccgtctcgcgcgtacatcgtcgacttctggggcagaccggtcacgtcgaagtccacgttttctaccttgagcgacggaatcaccgctttggcggctttattggcaccgaccacacccggtacaaacaacacgctggccgccacgccaccgcagacggcaagcatgatataggccaagaggagaacaagcacacgttggagagtgagggacttctttttgggcatgggccccattctaaatggggtgccctaccaaccgggctcgcagtcagcttccgtgaacatatcatcacaagaaccgcactagcgtaacattggctggaagtcagccgaacggtcagcgccgcgagcgtcgaatcagcatgcctggctggaagatgatgatcgatcgaccgtcacgtgcgatccatccgcggttggaaaagtccatcaacgccttgttcacggtctcacgactggagcccaccagttgggccagctcttcctgagtcaggtcatgcggcactttgaggccctgttccaccggctcgccgaaacgtgagcccaagttgagcaatgtcttggccagacgcgccggcacatccatgaataccaagtcggagatgcgttcgttgttgccgcgctggcggttggccatgacctgcaacatgtcgatggccacacgcggatgctcatcaagccatgcgaacagggcatcatgctccagccagaccacgcgcgtgccatggctcatggacaccgcggacgcggtgcgcgggccaccatgagggtcgaataccggaatctcgccaagcacttcgcccggcgcgtggatggacagcagctgcacgcggtcatcggaagaagtgcgaatcagcttgacgcgcccctgctccagtagatacatgcgctgatcggtatcgccttcggagaagatatagtcgcccttatcgaaggtcgcacgcttcaaatgcggcagcagctcctcggcttcggctggcgatacctgcttgaacaatgccgtatgcagcaggatgttctcctcgtcagcaaaagcgtttggcgtttccaagctcatcgcaccatccttattgtcctacgaccgtcgtcggccatccgtcatattgtaacgcgccccacaggtttcgtcagaagcatgccatcattcgtcacttcatgtgtggcgcgatccgatagccgtacgacatgctgacgaatgtgttaccgcgaaaaacggcactgtcgcggttaccgcgctcgcccatgacaaaaccacgcacggccaccggcaaaatcgtatacggccatcggtgaaatcacgccgcaaaccagtcaataaggtgttcgacgatgtgttcgcggctgagacccgtctggcttttcatcgggtccacgcgtttgactgctgatttcaccgctttgtctgacatcttctcgcgactggtgttgagcacacggctcatcttggccgcatcgatgtcatatgccatggtcacatggtgcagcaccgcgccgcctgagcctacggggaagcgccgttgcgccgctcccccgatcttgccgtactgcgaggcgatatcattgaggcccgcgaaccgcacatccaagccaagttcgcgcagcgcttcgaccagccaccagtcacagagccggtaggattcttcgatgcttacgccctgaacgaaatcgagcggtgcatacagagaataggtaatggtgttgcccggttcgataaacatcgcgccaccacccgtgcaacggcgcaccacgtcgaaaccgagctgctcggcaatgtccagattcacctcgtcctgggccgattggaaacggccgatgaccacagccgggcccacccactcccataatcggatggtcggctgtcgtgttcctgctgcgacttcacgcgcccaggtctcgtcaatggccatttgctcgtccggagtacgcggatggtcgtggatcacggtgagttgaggtctgagggcgttccagcgctcccggtattcagagcttttgtcgggctgcttggtttgtgtattgatggatgccggggtgttcggcgcatcggggccgaccgcccccacccgctgcgcgggagcccccaccagcgggggcaagttgctgcttacggctcggctatatgcggttttgatggcaacttcatctgtgccgataatttggcaactagggtgagcgtccaatacggaccgcaatgaatcatcactaattagagcctgttccaagtcacgcaacaaagcatgagattcggcatccgaaactgattcaataaagaaatcaccgctgatatggcatgactgtgcggtgccgtcatcatcgacggatacggtcacggcgactagtttgccgccaacggttttgcattccccatgtcgcatttgcatgcaactcagtataaacttggctcccctctggaggggagccaagtgggacatcacatgcgggccagaatgtccttgccgacctggtcggtggagcgcacggtggagccgagctcctcgatgtccgcttcgacggcggtgtgaatcttcttggccgcatcatcaaagccgagatgctcgagcagcatggcggcggagaggatggcggcggtcgggttggccttgttctgaccggcgatgtccggagcggaaccgtgaatcggctcgaacatggacgggaactcgtcggaggcgttgatgcagccggaggcggagtagcccacgccgcccaccacggagccggcctcatcggtcagaatgtcgccgaagaggttgtctgtgagaatcacatcgaaacggctcgggtcggagaccaggaagatggtggccgcatcgatgtgctggtagtcgtgggtgacctcagggtattcctcgccgaccttgtcgacgatgcgttgccacatatcaccggcgttgacgagcacgttcttcttgtgcaccagggtgacgtgcttcttgcgcttcatagcgagcttgaaggcgtaacgcaccacacgctccacaccgtatgcggtgttgatggacacctcggtggccacctcctgcggggtgttgcggcgcaccgcgccgccggcgccgcagtacagaccttcggtgccttcacgcaccaccacgaagtcgatgtcgccggggttggcgagcggcgaggtgacgcccttgtacagcttggaggggcgcaggttcacgtactggtcgaggtcgaagcgcagcttcagcagcaggccgcgttccagaatgccggccttgatgcgcggatcgcccacggcgccgagcagaatcgcgtcgttggccttgatgcgctcctcttcgtcctcgggcagaatcgcaccatcgcgcagatagcgctcggcacccaagtcgaagttctcatactcgaagtcagctacgccttcagcggccttttccaaagccttctgagcccacggagtgacttccttgccaataccgtcgccgggaataacggcgattttatatgtctttgccatagttcaaggagcctactcgcgcgaccacctgccggcccgaacccgctcagctagtggacacaaccaacatgcgtatcgtgtcgagacattcattaggtcattttagtgttcattaggtcggtgtgggttcatttcagggactgaaatggcggcatttcagtctcacatagaagaggacaccgacctaatgaacgacgaaatgacctaatgagcgagccccatcacatccatgcaccaagcgttctcataggaaacctcttcccattgtttgtaacgcccggatagaccgccgtgaccggcctcgacctcgatcttggccaccgcgtccacgccggcggactgcagacgagccagccatttgagcggctcgacgtacagcacgcgggtgtcgttcatcgaggtggtgatgaagattctcgggaattgcgcggcggcgagcgcgccggcggcagccccatcagcactgccgtcaccggcagcctcgtcgtcgccgccctcgagcacggtgaccggcacattctcgtatggcgtgtacgacttcatgtactgatacacctcagggtcatgcaacgggtctccccattcgtcccattcggtgacggtcaacggcaagtccgggtcaagaatggaggtcaacgcgtccacgaacggcacatccgcctcaacaccggcgtagcattcgggcgccatattggcaatcgcgcccatcagcaggccgccagcggatccgccattggccacggtgcgccaagcatcagccaaatgcgccttctgcagcgcgcgcgtggcgtccacgaagtcctcaaaggaatgcttcttgttcagtctgcgcccctgttcataccaggcgcgtcccatttcgccgccaccgcgaatgtgcggcacggcgtacagcacaccgcgatccaacatgctcagacgagagaccgagaaccccggatcggaggaaatctcgtatgcaccatatccggtaatgaacatcggcgaatcctgcgccgggcaatcgcggtgccagacgagggaaacaggaatgcgttcgccgtcgcgcgcggtaatccacacacggcgttccatgtaatcgcgtggattgaagtcgcccagcacggtggctcgtttcagcagcgcatcttcgccggtggcgggatcgatttcgtgcagctcgcccgggcgggtgtagctggcgaacgagtagcgcatgcgcggcgcctcatacgaggggttgccgccgacgccgatggtgtacaagcgccgggtctcaccgggcaggtggtcgtcgctggcaccatcggaagatgacgtgtgatccgtgggggcctcatcttcggtccacaagatttcgccatgatcgccggtgaagttttcgcgatcggcggcgaccatgtcccagtcgtcctccagggcaggcggcagcagttccgtaaaccgccacggccgtccggccaggaagtcggcggcggccgcgctcttggtcatgtatgccacgtgcggctggccgtcggcacggtagctcagggacacaaagttgcgatgcaacgcgatgccttcgatgcccagaccgtgggcaccctgcaatatcgccggattggcggcgttgaagtatgcctcggtaatcggcttatccggctcaccatgttcgcagccgtacggcgacccggcggcgatgcacacgccttcgccgagtcggtacggcggctcatggccacgcatgtcaatgacgtcgatttcgaaattcggattggcggcgttgtggtagaccacggcgagcggcacatccgcaccgttctcccccgcgccttcaaaacaggcaaagctcacatcatattcaatatcgttctgacgtggaatgaaggcttggaattcgccttcaggcgtggccaccggcagcatcagcacttcggtggtggttttggaaccggtgccgatcacgatattgcgctcatcaaaactgatgccgacgcccacccagaaccgttcatcggtttctcggtacacgcacacatccgattcgaccgccgtgccaacacgatgccgccacacggcgagcggccgccaggaatcgtccaattccacccagaacacccattggccgtccggcgtgaagcatgcgctgccaatgccggtgaactgttcgggcagttcgctgaccggctccccggtctccagcccggcaaggtcgcgaatgcggaaatcatatcgttcgtctcccgcaacatccacgccgtacagcatccaacggccgtccttgctcagatccaagccgccgagccggaagaagtcatgcccctcggattccttgttcgcatcaaaaacgacctgttcaccgggcatggagccgggcgcgccttgcggatccacgaccggcgggtcccagtcatcggcatcgcgcacggggatgcggcattgcacgccatactgtttgccctgctgcgtgcgggtgaagtaccagtaatcattgacgcgcgtgggaacagacatatcggtctcttccacatgcgatttcagctcttcaaacaacgtatgccggaaatccgccagatgcgccatgcgacgctcgcagtactggttttcggcagctacgtagctgcgcacatcatcggagtctttgtctcgcatccactcgtaatcgtcgtcgaaaacgtcaccgtggaattcgcggcgcttcggctcgcgcttggcgtaaggcggcatcgcggccgcggcgtttgtgctctcgtcagtcataccacgcgattataggcgaggcaccacaccgggacgcattcggcgttcatcacgccgcgcttatcgcaacaccgtcttcagatacggcagcatggtcttcagaatgttcgagccggtggtgccggtgaatactggtacatcggttaccggagtcggctgggtcgaggtgagccccgtcaccgacgccaatccggttgattcgcgcgggctcaactcacgaatgacgatcgccagtacacgtccgggatatctgcgggcgatggtggcgtacgtggtcgggtccttctgcccgtcatcgcccaccagaatgaacttcatgtccgggaagtcggccataagttgttcagcaaactcaagtttgtgctgggggccggtgggcacgaaggtcttgggcctcgggtcgaggtcgcgcagcagcagcgggccttcgggaaaaccatggtcagtgatgaagttgcgaatcgaactctccacattccaaggcgatgtcgaaagatagaagaacggtgcgccggggaacaagtcggcgatgcgggtgaacagcacgctcatgcccggcacggaggctttcttcttggggtcgaggaacagcaggttgtacgcggccttccatggcaccggggcctgtgtgatcatgatggtgtcgtccacatcggagatgatgccgactttggcactggcggggatggtgtacaggttggcgctcacgggtttgcggttggccacgctgtaggagacgcgatggatgccgggcaccagacgatgctcggccacgaggtcgaggtatccggcggaatcggagatggcgtattcgctgccgagatcgcgcgtgcggtccaccttgtcatagacctcggagacgccgatctgcacggtgttgagcggcgtgtcatcaatgctggcctgcacgtgggtgcgcggcgcgggcacggcaagcatgccgcggatgccgcggatcagttcgccggattgcgcatgcttgggggcgtataccgtgcggcagatcaggcgcgagtaatcgccggtgccataacccacatagggttccactcgcggataccagccccattggcgcaccacctgagtggagatgtgtgaccatacgccgaacacgcgggtgatggcacgacgtatgaatcgggtgatcggcggcttgacctcgatgcgctcacgcttggagggggtgtcgaacgtcgtggcagccttgcgtgcgggaatcggcacggtgggcatgtcatcggaatgttcagcattgctggcattgctggcattgtcggcgccattggcggatgccttgacgtcagagactggcgcggtggcggacagcgctgcattgcgagcagcagcatcccaaggcagtcgcttgcctgccgcctcaaaatcctcgcgtgggcttctcatagacaccaatataggccatacgcctcattttcttggctcccctccataagaggcacgatgcatataggtttgatgccacatactggctcccctcagggaggggagccatgggtggaactaccgcacgaccttcgcgtattcgtcggcgctcagcagctccggctcatcgtcgtcaagctcgaccttcagcagccagccttcgccgtacggatcgccgttgaccacggacgggtcgtccgccacgtcacggttcacatacttgaccgtacccgccacggggctgatcaacggctggacggccttggaggattcaagctccacgatctcgtcgccggcctccacacgggcgccaggctcaggcaaatccacgaacacaagttcgccaagctggtcggcggcgtattcggttatgccgatgattgcggggtcgaccgaacggtccacccaagcatgctcctcggagtattcgaggtggtcgggaatgtcgaggttcagcggctgttcgttttcgttgtcatcactcatagtcataagcctaacctatcttcgcggtccgtcacagctcgcgaccgagccattcctcaatcatgtagcgggcgatggtggcgcggcccggcgccgccatacggccggcgatgagctcggccgtgtattcgtcgcgtgtgacccatcgcgcggtcatggtctcctcgccgtccacatgcacgtcggtggtgatcgcatgtgccttgaacgccatcatcagcgaagccgggaacggccacggctgcgagcccaggtaccgtacctcgccgagcttgatgccggtctcttccatggcctcgcggcggcaggcgtgttcaaggttctcccccgcctccacaaatccggcggacaccgaatacagcctcgaatccttccatgccgcgttgtgttgcagcagcagacgatcgcgcccgtccacgatggcggtgatgaccgccggctccacgcgtgggaacagcacacggttgccgtccgcctcgttggtgcatcgctgcgcccatccggcgagcgccggccggaccgccgcgccacaggtggggcagaaccgctggcggctgtgccagatgcttaaggtgatggcactggtggcttgcccagcctcgcgcgcgttggcgtgaggggcgaatccgcgcaggtccacccagtcgaaccgggtcacggcctgttgcagcagcgtgggcttcggggccaagggctgtacgggcgcgccgaccgaatcatcgaaggcatcgtccgcaccttgccctgccgaatccggcacaccgagcggcccggaaatcttggctgtggttacgccaccattgcccttggcgtttcccggctgccgtattccggcggcagcacctccgctgatgccgttcttgcccagcgcgccgtccacggtgccggaatcctgggtgccgagcacgccgccggcagcaccggaaacatcagcaatcccgccaacaccgggaacgccggcttccggcacgcgcgtgatatccacggcgaccacggattcgccgcgcgccccgacataggagccaaggaacatggcgaccgcttcggggtagcgtgccagttcggcggacacataggagcccggcaacgtggcgagccgcattttcacgttctcatagtccacgagctcaccttggccgcgcggtacggcgacaagtccgccgcgcgtaagcacgactttggtggccggctcggccaacagctcgtcgatcaggccgggttcaccgcgccggtccacctgatagtcgatgtcaccttgcgcgagcggcaggaacggcagcgcatgggtcagcgccaggggcgaaaaatgaatgtcagtgcccatcgaggtctcctatgcgttcttctgcgcgttctgcacgcgcctgacgagcgagagcagtgctcgcgccacggtatccggatgttcgacggcactgaaatggccgcagtccggaatgtcgatgaattcggcgccggcgattcgctcggcgagcggacgcatcacactcggattgctggaggggtccagttcgccggacaccaccaggctcggtgcgctgatcgtttccggcaccgcccccagttcgggccggccataggtcatgcgctgacgccaagccagaccagccgggttctgttcgttgatccagccggtcatggtcgcgatgaattcaggagtcttcttgacggtggaatcgccatcggccggttgcgcgaagtgcatgaccggttcgaccgagttcgtctgttcggcggcgtccgccatcttcagtcggttctctccgcccacgccgtcggacgcggccatcgtgtcacacaaggccagtccggccaccgtttcggggtacaggcgctggatgtccatcgccacgtagccgcccatcgacagtccgacccagatcgcctgctcgtagccggcggccttgatcaggtccacgtaggctccggccaggcgatccagcgcctcgctgtacgcgccgttggccatacgcgggccggaatcggcatcgctcggcaccggggatgcgccggagccggccatatccggcgcccaaatcgggaagtccggcacatcgttcaggtcggcgaagtcggcgagcgccttcgcgcacacgtcccacatgcggtggtccaccgggtaggcgttcatcagcaccaccggcacgccttcgccatcgcgatagatatgattggccaattcgattgccatgaattactccttcacattcacaccccactggcggagctgtcggctcagtcggctgggagcggtttcaacgcggaccgccctccgtcgccacgcgccatccccaccagcgggaagcagaacaactgtcagattccggcccaagccaacgcctgccgcacgatgcgaccatgaccgttgaccatctgcgccacgaacgtgttcattacgtcgctcttgggatccacccattccacatccagcgtctcgtcctgtggcttgcagtcgccggcgatgggcaccacgtagcacagtgcgatggcgtgctggcgcggatcgtagtattcgctcagtcccggcgtagggaagaattcggccacggtgaacggctggagcccgaccggcagcagcggcagggcgatatcgcccaaatccttggccacattgcgggcgatggcctcgcgcagcgtctcgtggtacagcacacggccggtgatcagcgtacgctcgatcgacccgtcttcggcgacgcgcagcagcgagcccacctgggagatgcggcccatctcatcggtgcgcacgggcacgatctccacgtatgcgatgggcatctgatgacgcgcccggttgatgtcggccggtcccagccagcccggcgggttgccgtggccggaaccgcccccgtggatgaagtcctcgggcgtgatgttgtcgaattcgccgcggccacggccggcatcataatcgccctcgtcgggcacttcatcattcatgactggcatggtctcattatcgcgcgcattgatgaacatgggcacaattcaccgaaaaattgtctgtgaattctcagcaaagcgcctcatcgcctccatgcgcccgcaatccattcagcttggggcacaaacttttgccgaaatgttgggtgttgctgggaaactggtacacagcatcaagcactgtgtttgaggaaggaacttcaatggccaccaccgccatcacttcagctgagtttgagaagaccattaccgacaacgaaatcgtgttcgttgacttctgggccacctggtgcggcccgtgccgcgcgttcggcccgattttcgaggcggcctccaacgagccggagaacgcgaacatcgccttcgtcaaggtggatatcgacgccaaccaggatctggcccaggccgccggcattcaagctgtgcctacgctgatgattgccaagcagggcgaggtcatcttccagcaggccggcgcgctgcaggcctccgatctggacgacctcatcgcccaggccaaggcgctggatctggccgccgccaaagcacagcaggcagcgcaggagcagcagtaagccttatcacactgcggcaacggaagcgcggaaaagcccatatatagcgcttccttgcactgctaactactacatatgccatccgtggcgggtcgaacacccaccacggtttttttattcatccactcaacgtcctatgatggaaagcagtgtgtacccaaccaaggagcgcaatgtcgaagcacgctgagcggacctcattcgtcaaaaccctgtctcggggccagtgggcgaagatcgcggcggccgtggccgcagtgggtctcattgccactgcaggcgttatatctcgcgacttctatcagtcgagcaccgctacaccttccatcaccccaacctcattctccgccactgatggtgcggcttcccgttcggcatcccgcggcgcgctcaagagcaccacctacgtgacagtcaaggtcaatggcaagtctcgcgtggttctcggcgaaaaagccaacatgaccaccgtcaaggatgtgctggaaaccggcgatatcgtcctcgatccggaagacagcgtgactccgagcctggatgccaaggtcagcgagtccacagtcatttccatcaaccgcgccaacaccacggtggagaccaccgacaccgaaatcgccttcaatgaagtgcgcaaggagacctcgagcctgcccaagggccaggagaaggtcgagaccgaaggcgagaagggcgtgctggagaccacgtctctggtaacccgctccggagatcaggtcgtttcctccaatgtgttcacctcctgggtcaagaaggctccggtcgataaggtgattctggtgggcaccgccaccgtgtcttcgcccagcgccgccagcctcggcaccaccacgccggccggcgagattcagtcctgggcgcatgactacctgatttccaacggctactccgaggccgacttcaccgccgccaacttcatcatcagccacgaatccggctggagccccaccgccacgaacccgtcttcaggtgcttatggcctgccgcaggcgctgccgggcagcaagatggcttccgcaggtgcagactggcagaccaactaccagacccagttcaagtggtttgtgaattattgcaacggccattatggctcgatttccggcgcgtacgcgtattggcaggcgcacaagagctactaagccagccaaatcaacacgtacacaacaagttccgcgccgcaaggagacttcaccttggcggaatcccccgaaggcgaagtctcctatcagtccgtgaacggcaccgcctacccagacagcaagaccgtgatcttcgacgccgccaacgccactgcaggcaccatgaagcgccgcggccgtaagaaggctgagtgaaacccggcccaaacgccgagcgaactcatacgcatgatgccggttcccaatcatcggggaccggcatcagcatttctgcgccttatcagccgaatccttgcattatgcaacgccctagagatcacttttaccgtgtcatacgaagtgccctccacaactgattatgcgaatccgtgacggcatagcggcacaaagcacgcgtatattgagctggtttgcaacagcaaatggtggaaatgcgcactactgttattcgcggttcctttgacaatttaggctagagcacgataacttactacttcgactcatctttcggttccggatcatctttcggttccggatcatctttcggtttcgtcccctgatcagccgcctggccacctgtccccggatcgtctgtaccgtctggctgtgtttgctgtcgctgctgcaacaactgctgctgccttaatcgtgcataataatcattcagagctttctgccgcgctgcttcttgctgagcctcaacagctgcgctgtagttggccatggacgtgttgactgcatccatggacgcagtcagcgtgttgacggcatcctgcatggcctttacgtcagtgccctgctgggacagcacggtattggcgttggcgatgtcgctttccagtgtcatgcgcgttgaattatcgtcgacggcatacaggctgttgtccagcaaagtctgagcctcggctatcttgccctgcaacgcctgctgagcgttagcctgatccttagcgttcttgctgtccgtcacggcctttgccgcggcagtaatcgcagtggcgttcttcttggcggtcttggtctggctagtggccgtcttggcatattccttgaggtccgacgtggaagctgaagtcttgcactccaccgcttccacgttctttaccgcggcgattgccttcttcagcgcatccacggtcgcaccgtcagccacttgatcagctgtaatgctttgagcactcttggtatcaaccaacgccttggtcagcgccttctgagcggtggaattctggtccacggcctcagtacatgctgtcaacgcatcctgatgcagctgatggctttcctgacgctgctcgctgaaacgccagtaccatacaccaccaatgatcgctgcaatcaccaccagcgcaacaatcaccgaaatgataatgcccttggtcctcttcttgccgcccttaccgccgcgaggagtccctgccacacggtcttcttccggctcctccaccggctcggggttctgttcaatggcactgaagtcgatgttcaaatcgtctatggcactatcacgttgcggcttggcttcaggaaccggcgcaaaaagcggcagcgtcgcattgtcatcccgctgaggcgactgagcgctttccgcagtatcaggcgccgcaaaagtcatcggggcagtagccacagcatcggaaggggaagaggcatcgccagcagtattcgccgcactcgcagtaggccattccaatacttcgtcaaagctggggaatgcagattgagagccatccgcaacagcaccagtactgttgccgtcactcggcgcagcgctgtctgcgttcccgtcaaatgagataggcggtatgtcccagaaggtatcgacgatatcaccgcgagccggcgacgtagaggaaccagattccgcgttcggttcagggcgttcgtctgctcccatgctcttctcattcctttgcatcattgaagtcattccaaactgtcagtttatccagccctatgccgagcgtgccagctggtattcaagaatgtcacaattctttactattcgatatacagccagcaccataaatccaacaactcagtcttataacagtaaaccgtgcggcacagaagtaccgcacggttcatattgcaagacgatcggcaaacgccaaactattacttgcgggctttcttctcgcccttgctcttggcacccttatgagagctgcgcttgttgccgtcctcgtaatagtagtagtaatagttcttcgagtgtatcttcttcggatcagcgaagttgaagatgaagccgagaatcggcacttcagcggcctgcagagccgtagcggtgttctccagctccttcttctccactacgcccttaccagtcacgagcaccagaccgccggccatacggccgaacacggtggcttcgctggcaacggacagcggagcagtatcgatgatcacgtaatcgtactgggtgagggcctgctcgaccatttccttcatgagatcggagttcagcaagatgctggcgttagccgggcgcttgccggcaggcatgatgtgcaggttcggcttccaatacttctgaatgacatcggccggggacgcctggcgagacagcacgtgagacagacccacgtggccttcaatgccgagcttgtgagccacggacgggtggcgcagatcggcgtcgataagcagcacactcttgccttcctcggcgagagccacggcaacattggcggaaaccgtagttttaccttcggacggatcggtagagctgatgaccagcagtcggccatgaccctgtgtggcggtggtggtaaggaacgaaaggttcgtgcggatgcggcggaattcctcagcctcgctaccggccggctgagcgactacgaccggacggctgtcgtcaagaatcgaagcctgaggcacagtacccagcgaagaggcgtgggtcagttcgcgcacgtcatcggtggagtccaccttggtgttgaggatgtccctcagcagggcaacgccgacgcccacgatgatgccgagaatcaggcccacggccaggtacagcggaatgttcggggagctctgcccggtaggagtctgagccttctgcactaccgtgagcttgatgggagagccgctggaagaggagttgttgtacaggtcggaagaaatctgatcggagaggttcttcgccacgctgttggcgatgtcggccgcttgctgcggatcgccgacttccgccgagatatccaccatgaacgtgttcgtggggttcgtagcggtcaccacgccggcaagatcggtcgtggtcatgtccaagccgagatccttaatgacgggctggagcacggcttcggtcttcaccagttccggatacgtcttgatctgggtgttcaaataattggcacccgagctcatatcgttggtggtctgcgtctcgccggactgaccggcatacgtggcgaacacttcagccgtagccgtgtacttcggcggcatgatgaacgtgacagctgcgactgcagcaaacaccaccacgaacgagataatcgcagacgcgagatgcttgcgaacgatctgcagcaaatcagcgatggtcaatgttcttccttacctcttcgggaaattctcacagatggtctataatttagcacctaccggggaacttctcgagcttttgtatccttgtgaacaatgaccaaaacccttgatacgactgcagaataactgtacacaatcgcaatcacgatgtattctcactcaatattttgcgacagcactacctttcccattccatattatgaattgaaattgagaatgtgatatataaaattgtaattcaaattatcattcattacaatcaaaattgtcaatactatttatgcagtgtgaaggagtatattatggcatccttgcttcaaggattcgaagaagttcagctagttaagcccgttggcaaaacggtaatgaccgttaccgattccgttgtacgttttaataaggccaccgcagaagtgctgaattttccagcacaagttaagatccttattaacgataaaaccagacaaattgccgtaacgccgactaccgctaaggcggataatgccgtgaaattcagcaagggtgagggcaagcagactacgtctgtaagtatcaaaaatgctgtgcttgttgaagcaatttccaagtacttcacgcttgtcgaagctccagaaggcgaggtctctttcgcctccgtcaacggcactgcttacccggaagacaagaccgtgatttttgatgtcgcaaacgccactgccggcaccatgaagcgccgcggccgcaagaaggctgagtgatttctgcttaattcgcgattatacgaatactgtaaaagcctggatttcgaattaatgataattcaggcttttaatttccaaaaaaccagcatggcttgggttgaacaatacatgcaccagccccacggagaggatctaaacggctgattggcccatagattattcagtttttgtaagcgactgccaattacttggtgggagtttaacccccaatgctttataggcgtcatcgatctcacgaagaacacctgtggcatctctcaaccaagagagacctcgaacatcagtaaatgtaattgctgattcgattctgatatgcattccagatcccggatatggaacccgagtcttatatcgtcccggcggcacggtaccaatcgaagacgtaaactcatttcctttcaagaatggttgtccagccccttggtatgtacctgttgtcaaaacgacattgtaaatgggctgcttggaatcattattgactatgacatctactgtttttgagtcatttgatacgagcaactcaccattggcatcagatactaaccatgtcgaaatcatatttgcttggtcaaacttcaaatcattagaatctttttcctccgtatgcttgtaagtatcgacagcaatttggttagccctttgcgcctgatcagcagcaatcagcgctaccgaaatcgaagctatagcaataattattgttgcaatttctattgcagcttgccaaattgagaaatcattcggaaatgcgcgaaggtacatcacaaacaaatccttcctctatctatatgtataaatatgatatctgtgaatactcagtgaagcccccatcaatatctttccaacctcaatcacaagcgagggccaacgccgcaaggcattggcccccttctgctaacggtgtccacccgcttcaaaccctatgctcagaggaagaatggcagacgacaaatcataccgtcgcaattgcacaactagctccggacggacatacggccaaagatcagcaagcatttccggggtcaacttatccgacaccttttcgccactaaaagcaactgcatagcatacatccgcagaaaatactggctcagaatcattcggagctttttcgggacgaatctccacatgtaccgtcagttcatgaggccaaggacgcccttccggagtctgcatgttaaataaaaaatcaatatttgactcccctgagccatcatcggcataagctagatctctcatgctccgttctgaaatcaacgcaatcttactaatcatgctggcaccgcctccccttgcgcaacagtttcgggagcgagggcatcgttatctacatatagaagggagaatcccagcatatcgtttccgttagtcccagatgcgtgcgattcaacgcgcaatcgtcctatctgccgttcaaacgtgaattcaccactctcccaagaagctactccattcaccacggctcgaatttcctcacgcaaataatgacgactgccatcgggcttctcctccgcaggctccaccacatattcaatacgagcgccaacttccaaagcatagtcagttagcaaagacaccatatttgtcttgccgttttcaatttgagaaatatatccctgagaaacgttcatctcatcagccaactgcgtctgagtcatgccacgtcgcctacgcatctcaatgagctgatctagcaactcgtcaccgctatggtacaaatcataagccaattcgcgatagtcgtactcagctcgccccatcattctcaccgccattccaaaatattactatatctaatatatatcgccgattatctctcacgaaacagtctctcgcccatcggacgcctgctgctcatatactgcaatcgctctatcgatttccttattttgggctttttgtattagctcatcatcgccactccgcacatccttgagatgcatatgcagcccccacaccacatcaattaaatccaacggcccagcatcgtaatgccgtatttgttcgcgcttgccaactctcagttcacgcgcatcgcgatgccagcgaaactcgaacattggcgcgtccccacgcttcgaacgagcgagaaaaatgacttcagtgcctggagtcaggctgccggccacggcacgatccaatttctcctcaacaaaagcctctaatcgcatcttgtatttgttataacgccttgaatccagcaatccccaggcaaatttgattagctgccatagcagcgaaccatctagcaacggcacgttgagcggactcaccatctacatgttcaataggcttcccccgccactgataattcacggcacgccctctcacacaacgaccgtccacaatcacccctcctcggtcacgaaacacaaaccgcaacatcgcagtttcgactattgtacaggtacgtttcaagtgccacagccttctaaatagacagcgggaagagaataatttacttctttgccggtaaaatggtatgtcgatatctcgttgttttccggttgagcgaggctctacgatgttggaggtgattggagttgcggtttgatgataggagacagctcgatgttgaaaacgctgctctgatcgcattgattgagtgctgcgaacggcctgatacgtggtcttcattggccaacgagtgtctagttgaaggcagtgctgtgcgtgtgctcaggcatcggatggatccgttgcataatccgcttcgtgaacacgaatatgtgccgacgaatgaacagggctcactgtttgaggtggaggacatgccatccgtcgaatacacggcgaaagcgaatgccgcgtggaatcaagccaaccagaaggtgacgcagtggcgagagcaaagtcttgacttggtcaccgtgttcgacgaccggttcccctcgcggctgcgatcggtcgtagacgtgccgccattcctgttcgccaagggttctctgctctcgaacgatttaggtgttagcgtcgtgggatcgcgcaaatgctcgccggagggtgccacgttcgcccatgacacggcttgcatgctgtgcgaacgtggattgactgtaatcgcaggactggctgaaggcgtcgactcgttcgcccaccgtgcaacattggaagcaggcggacgaacggtcgcattcattggcacgggcattaaccgttgctatcccgcatccaaccgtgaactgcagaaaagcatcgaaaagcggggactggtgctatcccagttctggcctgacagtccgccaaccaaacagacattcccgatgcgcaacgcgctgatgtcgggatatggtctggccactgtggtggttgaggcatcggaacattccggcacacgtattcaggcccgtcaggcgcaacgtcacggacgcccgttgattttccgtgacgtcgtactggaacgcaccgaatgggcgcaggaatatcgcaacaagccaggcgtgttcgtcgtgcacagtgtcgaagaggtcggtaaagcacttgataggatctcattcctcgacaacgatgtagacacattgctgggaaacattctcgacgcgaaggcgcaatatgcttgactctacgctgaatctaaatctgctggctgcatacgcccgctttgaacagagtatggggtggaggttgggcagctatgccaaaacagtgatataccgcagtgctaagcatcatgtctgtcctacctgcggcggccccaagcgggacagcacatcgctttgctacagctgcactagtctgcgccaacaggctgaggctctcggcgtcgcacatctgatggcggatcgggtcaggatgccaactacgctattaaattcgatcagatgtaccgcgtcatggatggatacaagcgcaaccgccctgaatccaagaaggattactgcgagacgctgaaatatgtgcttggtgatgcgcttgtcgtccattggagttgtctaactcatacgtctgatggagtgatgccgagcgcatgggctaccataccgtcgaccacaaccagcgaacgctatggtcagccacacccactcaacggattggtctcgccgacgctgaataaaaccatcccggaggtgaaattgctggctaatgagcagaaacatcgagcgattgcaccatccacgttctcgctggatggctcgtattcggatgagacactaggacatgtactgctcatcgacgatacatggacgtcgggaggcaccgccgaatcagcctccatcatgcttaaacagtctggagcgcaacgagtgaccatctattgtctggcgagaatcatcgatctggattattgctcacgcatgatcgggcagagcgtctctgacggttataagcagttgacctatcgtaatggatgcccgtgggattatgaccagtgcccgatgcggaacaagtgatgattttttactttttcaaattccagctgtctttacacggttcgtgttgcctttgcagtccacgatggcggtccagtctctccatcggggcttgaaacgatggataggtcatcgttgtaacgttggctttcggattcatataatgaacatgcacctgcatacgacggatacggcgtcaagctggtaaagcaagtacgagtcgtgccctgaccgatcgccattggcacacgactcattcgctatgcgtctgtcagtttccggccagttccagttcgccttgagtgggcggaagcatgggcgggttgcatgcgatgatatcggtctggccttgctcgcgggcctgctgcaccgtgcggatgaatttgtcgtcccaagtgtagacatgggtggcgtgggcgtacttcgcgctggcaagaatcgccgcgtcacccggccggaggttctgaaccgccggtgtttcgctgaaccagccagcggcgtcggccgtcagatcgaccatgggcaattcacagtcatagcaccatttgatcagccgttgcttgtggtcacgtgcccgactgcgtgtctgtccggattggccggagcggatgacgaagttgcaggacagttcgatcatcaccatcgagggcagcagcaattccagctccccggcgatgccgtcgttgagcagtcgttcggatcggggcaggaatgacgggtcggtggtgtcgtccttgccgagcgccacgttgacgatgacgttggtgtctaccacggcgcgttcgggatagcgccgtgaagattcgctctcattgattttcatcgcccgcctcccgtggtggtgccgtggtcatgggtctcgcgcagcgtggagacgaaattgacggagccgagagcgccagtgaagtcgaggctgatgatcccttccaggtcttcggcagtagccggggcgcggtggccgtcggcgatgatctccaggtcctcggcgtccacggacaccagttcgccgtcgtcggcgcgtacgaagccgcgcgcatcgacctccatgcccacttggatgcgtttgacgatcgggtcgagttcggggccgaatctcacgtcgacgcggctgcgggtgacgtggtcgaccagcccgagcgtgcggtgcgtgcgctgcaggatgaccttatccaccatgccgcgcacatgaccgaacgagcggcgtgatccacggatcagcagacggttgatgccggtgagcacgccgggcgtgaacgtgccctccgcctcgtgcgaggagacggtgatgttcgcgttggtctccttggccagatcactcaacgcggaaaatacgccggagaaccggaatgcctcgtcccgattcacgtcgtctcgtgtggccaggcgggtgatggtgtccagtgtggcgaacgagcgttccgttctctcgtccaccaccacgggtttcgcggcaaggtcgatgctgtgcagttccatgcgggagatgcgccagtcggacgcatccgctgcggacagtatccttgcgaatgcggacacagcctggctcaacgccttcggggtcacgtcccgcggggcgcaatccagtttgaatctgaagtctctgtcgcccatggcacacctccttcccgtatacgcagtatcgtcccgtcgtctgcgggcgggtcgccgtgcccagtattcctgtgctactgggtatcagtgtacgtggagtggatttcagtgtaaagcacgagcatgtctgacggtaatatgcccatggtccattcccgtacgcctcgtcgcaatagcacacaggcatacgcaacagagtgagcctctggaaaaagacaggatgcatcggctcgcatatcgcaggcagttatgcccatcatcggagagttccgacacccgttttacctaatattcggctatggatacgtggcttaccagtccgtcaacggtgctgcctatccggaaagcaaaaccgtgattttcgatgccgccaatgccacctccgaaactatgaagcgccgcggccgcaaaaaggcagaataaccaccaaggtacaggaattcgcgttattgcacgctatagggggctgctgcatactgcaatgcagcagccccttttactattgatgaacaatgtcgtcatatacatcggcaaatgcgtaatctgctatcgcactcagcattaatctcaaaatactatggcgtttccgcattcgtccgagtcaatcagtcgttaggaacaatcacgactttgccttcggccacatccttgagatgcttgccataggggctcttgccgtaacgttcggccgattcgaggagctcctccttggaaatccacccattttcgtaggcgatttcctccacgatggcgatgggcaggccctgggcgcgctgtacggtgcgcacgaactcgcccgcctcgtacagggaatccatcgtgcccgtatccagccacgcgtacccgcggcccagcgtacgcacgttcagggagccgtcctccaaatacatcttgttcaggtccgtgatctccagttcgccacgagccgacggcctgacccgcttggcgaactcgaccacacgctcgtcgtagaagtacagacccgtcaccgcgtaatgcgacttcggcttcttcggcttctcctcgatggacacggccttcttgtgctcgtcgaactcgaccacaccatagcgttccggatcgtcgacatagtagccgaacacacttgcgcccccgccgccttcggccttggcgacggccttgcgcaatgtggtgcccagaccgttgccgtagaagatgttgtcgcccagcacgagcgcgcacggctcgccgtcgatgaactcctctcccaagaggaatgcctgcgccaaaccatccgggctgggctgcaccttataggaaaagtgcacgccgtaatgcgaaccgtcgccgaggagcttttcgaagttcggtaggtccttcggcgtggagatgatcaggatgtcacggatacccgcaagcatgagcacgctgagcggatagtagatcatcggcttgtcatacaccggcagcaactgcttcgacgtcaccgtcgtcaacggatacagacgcgtaccggaaccaccagccaagataatgcctttcatggtgttttccttcacttcctgtttcaccgcttgttaagttcgcgggtgacgtattctttgagggtttcctcccagtcggcgggcgtgtatccggccgcctcgatcttcgctaggtcgagcgcgctgtgcacggggcgcgggctgaccgggctggtcgcgttcgcgaaatactcggccgtcgagatgggcttgaccttgtcgccgttaccgttcgtcaaatcgaacacctcacgggcgatctccgcccacgacttgaccgcaccg

SEQ ID NO: 1242 - DNA, 16686 bp, Unknown
  R81_24m  MAG No. k141_28955
gttacgtgaagaacgacggtgagcggttcatgttgacgattcttaccgacaacagatccacggacgagaccctgtgggtgttcgcacgtaaggacctgccgtagcggaaggctcgagaccctcaggggcatggccctgggcttccgcaacctcgacgccaccatcaccagaagcctgctgcacgccggcggcttcagacacgccatccaaacccacctctgacacatgcccttacacgccaaaatcggaagagccggaaatactacaacacgctgattgttgtatgtacaactgttgtatatgggtctcttgattatgaatttgaacatcaaacactccctcagtcacctgtggtgatggctcccgatcaagacggagcggaggttgctaacacgaaggaggagaacgaatgagcgataccgcagaggcaatcgcgcaggcgcgcaaagccgtcgaacccggtagacctaagcatgtactgcgcacgctgggtcattcgattcgtgaatacaagaaagccagcatcctggctccggtgttcgtggcggtcgaaggtattctggaaatcctgattccgaccatcatggcttcgctgatcgatgagggtatcaccggtggcagcatgccggccaccgtcaagttcggcgtgattctgctgatgtgcgcgatggtttcgctgggtgccggcttcctgtccggaaagtacgcggccgtggccggcgcgggcttcgccaagaacctgcgcaaggaccagttcgagaaggtgcagggcttcagcttcaccaacatcgaccggttctccaccggttcgatcgtgacccgactgaccaccgacgtgacgaacctgcagaacgcctacatgatgatcattcgtctgggcgtgcgtgccccgatcatggtggtcgtggcctggctgttctcgttccgtatctccccgtcgatttccatggtgttcctggcctgcatcccgattctggccatcggcctgtgcggtctggtcgtgctcgtgcaccccgtgttcgagcgcgtgtttcacacctacgatgcgttgaacaacgtggtcgacgagaacctgcagggcatccgcgtggtcaagtcctataaccgcgaatccttcgaggtctccaagttcggccgcatctcccagcgcatcttcaaggacttcaccaaggctgagcgcatcatgagcttcaacatgccgatcatgatggtgtgcgtctacgcctcgatgattctcatcgcatggatgggcgcgcagcagatcgtcgcttccggcaataatgcggcgttgggcctgtccaccggcgagctgacttcgctggtcacctatgccatgcagattcttatggccatgatgatgctgtccatgattttcgtcatggtgattatttctcaggcttctgccgagcgtatctgccaggtgctgcaggaggaaagcacggtgcagaacccggcacagccggtgactgacatggccgacggctccatcgaattcgaccacgtcaccttccgctactccgacagttccgaaaagcccgtgcttgacgacatcaacctgaagattcgctccggcatgaccatcggcatcgtcggcggtactggttcggcaaagtcgtctttggtgcagctggtgccgcgactgtacgacgtgagctctggctcgctcaaggtcggcggcgtggacgtgcgcgactatgacatcgaggcgctgcgcgatcaggtggccatggtgttgcagaagaacgtgctgttctccggcactattgccgaaaacctgcgctggggcaacccgaacgccaccgatgaggagattcgccatgccgcgcagctcgcgcaggccgatggattcgttcaggaattccccgacaagtacgacacgtacatcgagcagggcggtaccaatgtgtccggcggacagcgccagcgcctgtgcatcgcccgtgcgctgctgaagaagccgaagattctgatcctcgacgattcgaccagcgccgtcgataccaagacggacaagctgatccgcgccgcattccacaacgagatcccggacaccacgaagatcatcattgcccagcgcgtggcctccgtgcaggaatccgacatgattctggtgatggattccggccgtatcatggcctccggcacgcacgaggaactgctcaccacttgcgacgaataccgttccatttacgaatcccagaccaagagccaggctaagcccgaagaactggccgctgccggacaggctgctgagtcatctaccgctgagccgtccgaaaccgtgacggtgacagtgaccatgcccacggccgataccagcgcagctgataccaatgcagccgataccaaggaaggagaagtacgatgagcaacgaccagagttccaagaatcgcaagcctgacatgggcaaagccgaccccggaaccatcaagcgcatcttcagctacatcttccaatacaaattgcgcgttatcgccatcgtagtgtgcatcctgatcggtgccgccgcgcaggccggatccgcgctgttcctccaatcgctgattgacacctacatcctgccgatggtgggggaatcgaaccccgactgggctccgttgctgcgcgccatcagtctgatgggctgcctgtatgtggccggtatcgtggcatcctgggcttggcagtggctgatcatcaccgttgaacagggcacgctcaagaagattcgtgacgatatgttcgcccaccaacagaagctgccgatccgctacttcgacagccacgagcacggcgacatcatgagccactacaccaacgacaccgatacgctgcgccaggccatctcgcagtcgttcccgcagatgttctcctcgattatctccgcgattgcggcattgctgtccatgctgtggctgtcaatcccgttcactgcgttcgtgattgtgttcaccgttctgctgtatttcatcgtgcgcaagatcgtgagccgttccggccgctacttcgtcaagcagcagcagtggatcggcgacgtgaacgccttcgtggaggagtccgtcaatggtcagaaggtcatcaaggtcttcaaccatgaggacgccactcagaagaccttcgatgagaagaacgaggaactctttgaggcgtccgccgaggcgaacacttggggcaatgtgaccatgccggtcgtcggcaatatgggctatctgctctacatcctgctcgccatcgtcggtgccgccgtttcgctggccggcgtcaatgacatcggtctgaccggtgtcaagccgctcaccctcggcacgctcgtctccctgctgaccttgtcccgctcgttcatcaacccgatcggccaggtctcccagcagctgaccatggtgatgatggcgctcgccggcgcctcccgcatcttcaagttgatggacgaacccatcgaggaagacaagggcaccgtgacgctcgtgaacgtggaacttgggccggacggccgcaccatgaccgaagtcgaccatgagaccggccactgggcgtggaagcgtgagatcggcgacgatggtacgaggtctctgaaggccgccgaaaagctgcgcggttccgcctgcgaggtggcgatgaaggccaaggagcaggcgatcacctcgcctgatgggcgttatacgctgctgcgcggcgacgtgcgcttcaccaacgtgaccttcggctacaacccggacaagccggtgctgcacgacatcacctggttcgccaagcccggccagaagatcgcgctcgtcggcgccaccggtgccggcaagaccaccgtgaccaacctcatcaaccggttctacgatatccagcaaggtcagattctgtatgatggcatctccgtggccggcatcaagaagcctgatttgcgcaggtctttgggcattgtgttgcaggacgtgaacctgttcaccggtaccgtgatggacaacattcgttatggccgtctgaacgccactgatgaggaatgcattgaggccgcgcgtctggtcaatgcggacagcttcatccgtatgctgcccgagggatacaacacggtgcttgagggtgatggatccggcctgtcccaaggtcagcgccagctgatttccatcgcccgcgctgcggtggccgatccgcccgcgctgattctcgatgaggccacgtcttccatcgatacccgtaccgaggaagtcgtgcaggccggcatggataacctgatgaagggccgtacggtcttcgtcatcgcccatcgtctgtccaccgtacgcaactccgacgtgatcatggtgctcgaccacggcaacatcatcgagcgtggcccgcatgacgagctgatcgcgcaaaagggcgagtactatcagctctacaccggcgcggtggagctggagtagtcggtacgcctgcaaaaaccgcacctcgattatcgggttgaagtaattcttatccggtagttgggggcgcggttttctatgttgagagccgtgtgttggcgcaggattgcgaatattggcggtgaaaagggtacatttgaattgttgttttgacgatgtatcggccgcaaggaggggactatggcgttcgtgacgttgaaggatgtcgctcaacgtgccggtgtgtcggctgctgccgtctcccaaatacttcacaataaaggccgcttttctagtgatacgcgacagttggtgctgaaaactgttgaggaaatggggtatgtgcccgatcaacgtgctcgctccatgcgctcgtcggatactaagactgttggtttgctggttcctgatttgcgcaatccgtatttcgccgatttggtctcgtcaatggaggatgagttgtatgcccggggctattccacgctgattggtacttcagcagaaacagtggaacgccaggatgcgtttattggcaatctgctcgggcagcgtattgatggtgcgatcgtggtgccgcaaggtgtggagtcacccggggtgcagtcgttgattaaacgtaatttgccattggtgttcgtggatcggcgtgtgccgggcgtcgaatcggtgccgtttgtggtttccaatccgtatacgggcattcgcgaggcggtagaggaattggtacgtttgggacaccgttgcgtgggatatgtgtcgcatccctcattagggtcgttcagcgtcaacgaacgagagaccgcattccgtgcggttgcgtcggatatgcttatcgagggtaacggcgtggtagtcgcttgcgactccacttatgaatcgcgtacggcagcggttgagtcgttgcttgatgccggcgtaagcgcgatgctgtgcgcatactcgccggatgcgctcacgatgattggtgtgctgcacgaccgtggggtttcgataggtgaggatatgtcgctggtgtcgttcgatgacattgcggcgttcaccttgatgacaccgcgtatcgcggtggtttcccaacaggccgagctgatggggcggcagggcgtggatttgctgctgtgccgtattcgctctggtgcttcggatgagggcgtcacccattccgtgcccacgatgttcatcaaccgcgggtctgtgaagcagggcccctccgcagccgtcgccggctgattgtttcagtattttcctgcttctactacttctttgtccgtatgcgtgacacgcagaagactatattttgacaacgatgatttaacgttttatcattactcccatcacttgataaaacgttaaatcttgtgacggcgacaaggcctcggcttggtcgtgaggagatggtcatggaagacgtctccgatttttcggcaaggaagctgatggaaaggaacatcatgaagaagatcattctcgatttggataccggcattgacgacaccttggcattgtcatacatccttggatccgaagacgcggaactgattggtattaccggtacctatggcaatgtgttgttggaaacgggtatccgtaatgatttgaatttgctggaaatgtacggacggccagatatcccggtgtttaagggtgtgccgcatcccagtgatgcggattctttcgaggtgcctgacagttcaggcatttttcacggtcgcaatggcaccggcaatgttgaggtgcctgcaacggcaacacgtcaggcgtctgataagtcggcagtcgatttcattatcgaatccactcgcaagtacagcaaagaagagcttgtctatgtgccaactggtccctcgaccaatattgacgccgcattcgtcaaagcacccgatattgttgacaagctcaccatcgtcatgatgggaggggcgctgacgcagccgggcaactgcaacccctacatggaagctaatatttccatggatcccaaggcctctaatcgcatgttctccacttcggccgacatcacgatgattggtcttgatgtgaccatgcaggcattgatgaccaagaaagatacgcaggctctacgcgatgtcggcactaaggccggtgcatttcttgccgacatgactgattactacatcgatatcagtgaggaaactgatcctgcattccagggcggatgcaacctgcatgacccattggctgctgctgtggcccttgatccgacactagttacgactttcccgattgaccttatggtcgagactgaaggcccgagcattgggcgtaccatcggcgatccgacaagattattgagccagccgaagaacaccaaagtagctcttggcgtagatgctgaacgatttacttcgcaattcatggaacgactgctgaagcttgccgccaccgtcgattgaatcactaaggaaaataaggagaattgtaatgacggaacaaatacagtcggttgcttccattgatgattttgaagccaaccgagcaaagaccaaaaaagcactgcctgcactgctgattgttttcactttgggaacactgatgattcaggcattcaatctggtgttccaaaacattggtgattcactcggcatgtcatcaagtgcctcactgatcagcacactaccaggcatcgttcttggtgtggtgtgcatgctgtatggcacattgtgcgacttcatatccccgaagcgtatgacgctatttggcgtagttgcattagttgccggtagctttttggggttctttggctcgttcaacttctgggtcgtgctcatcgcacgtatgattcaggttgctggtgcacaagttgctggttctgtgttcctggtgatgacagtcaaatatctgaatgacaaggaaaaggccatctacattggcatttacaatgctgtgtattatttggccgctgctatcggtgtgtttgcgggaggcttcatcacctcttttgattggaagtacctgttccttgtgccggcgttatctgtgttctttattcctctgctgattaagaacactccagacatcagtgccaagggcgagaagatagattccattggcgttctgttgtttgcggtatttgctgcgctcattgccatttacttctcgttccccggagtcggcatgattattgcctcgattgtattcgctgtactgtttgtgctgtggatttggaaaggcaagaatccgttcctgggtcgttctttcgtgaccaatggtgcgtatatgtccattctgctgctgcaatttgtgctgtacttcttcaactttgcttgtgtgccgatttacaacgtgattggtgagcagatctacaacgtgccgttgaccacggtttcgctgtgtctaacattggtctacattgtggccacaattgttggatgcgtttctggtccagtaatcaacagactcggacgcatgcgcacactggttatcgctatcgtgctcatgattgtcggcttcgcaggatctgccatattcattaagagtgggttcggagtgctgacttttcttgcctgcttgttcattgctggtgttaccgctgtatatacgccaatctacgacgctgcgtcagatgcgttgccggtcgaggagaatggtcgtggcgtaggaattctcgatctgatgatgaacacttcggcctctatcggagtcggcgtatactccagtctcatggccagtgacaccatgggcaagggtggtctgttcggtgttggcagtggtgtggaagcgcagacctccaacatgttctggattatgtgtgcggtttcggtgttgtcgatgattgtactgttcgtatttcgcaagagttttacggcaaaacgcaatgtctgattgcgccagctggtgcggagcatgttgatcgaacagactaccgcaccagcagcatctatcattcagaaagggaatatcatgcctgctatggatgaaacgcttgtttctcttgattgcattcatggggccgtgtccgtcgttggctcgatgaatgccgattataccgtcaccaccgagcgtctgcccaaaccgggggagacagtgctaggagggccgttgcgggtgcttcctggtggcaagtcggggaatcaggctgtttcggccgctcgtcttggagccaaagtccgattgtttggtgtgctcggttccgacgctaatgcggattttttgcttgaagcattgaacgataccggtgtggacaccagttatattcggcacgtggatggggccagcgggaccacggtcatcaccgtagacgcggcaggagagaacacgattgtttattctcccggctctaacgcttacgtcagtgttgagtatattcaatcgatgcgggataatctgacctcagccgatgtactgggactgtgtttggagagtccgatggaaacggtcacggcatgcgctcgcctctgccatgatgccgggctcaaggtattgctcaacgattcgccattcgttgctgaactacccgctgaacttatcgaggcttcggacattctgctggtcaatgaacatgaaatggcacagctgctggacatcgccgagcctgacgatgacgattgggatggactggactggtctgatgtggcgcggcagatgcatgacttcggctttaatcaggcggtaattacgcttggcggggatgggtcggtggtcatcgatggtgatgatatctatcgtattgcgccagttgcggttgcggccatcgacactaccgggtgcggagatgcctttatgggcacggttctggccggacttgcctcgggtcatgcgttggcggacagtgcgcagttggcctcgtacgtttccgcgtacgccgcgactggggtcggtgcgcaagcctcttatggtactgctgctcagattcgtgagcggtttggtacgaattgattactgagaagtgtggagtattgccggccgtgaattggtgcagacctaacacgttcatttaggcgctatgcagtgtcgaatgttctcggcgcggattttacgaagtattgtcagcaaatgcatcaaggcaatggcggcggtctgggcgggactacggccacgcataacagtatcgagtactcgaatgagtcctatgacgcgaaaactcggaccgtgacgatgcatgccgttatcgaccggagtgatccgtaccgattcggggattcgaccggcagttttactgcgccggacatcaccgttgtctttgacaagtccgggaaaatccagcgcattgactccacggtctggggattcccgcctgcccgataattatcggagggcctgaaacatgcacgttctcatcagcgctgcgggtcgacgatgctgcaaccatacggcgtcatacccgcatgacgtgagttacactatgtagtaaagttatttactgaaatactgcgtattgttacgtactgaggcgtggaaggctcaactatggtcacgatgaaggaaatcgcacagaaatcaggcttctcgcaggccacggtatcccggctgctcaatggggacccgacattgtctgtcaaagaggagacgcgacgtcgcatcatcgaggtcagcgagcagcttggctacgctaccggatcacgccgtatcgcattgccacgccgtgtggccgtactcgacaacgccacccgcgaggaagaactggcagacgcctatttcgatgaactacggtccgtgctcggcgacaatgccagagcccagcacatggaactcacgtcgttttcccatatcgacgatctgattgccgacgccggtgatttcgacggcttcatctccatcggaccgtccgtactctcttcggatagactgttgaagctccatctggtattgccctatggcgtattcatcgacaccaatcctgcgcccagcctgttcgattcggtacaaccggatttaagccaaaccattttggacgcattggatatgttggtgtcctcgggcaaacgacgcatcggctatatcggcggtactggcttcacgatgggtttgcacgaatatccggaagacggccgattaaccgcattccgcaattggaccgagcgtttggggctggatgcggaaggcctgatttacgcgcaaggcgcgttcactgtggacaccgggcgcactctaggggaggaagcggttaacgatcatcgagatgacatgccggatgcgttcatcgtggctgcggactcgattgcagtcggcgtactgcaggcgtttaccgctgcgggagtgctggtgcctcgcgataccagtgtgatcagtatcaataaccaggccatcgcccagtacacttcgccgacattgaccagttacgatatcgaccagaatgagctggccgatactgcgattacgatgcttgccgaggccatctccagtcggcgcacgctgcaccaccataccttcatctccaccaccctagtggtgcgtgacagtttcgtaccagcacgataaagaagctccctctgtgcgataaagaagctccctcgtcagagggagcttctttatcgctgttagaacagttccagattcacgtcgagcgtgtaggcgcgatcggcgggcagctggtactgctcatggacgggcgcgccccatgaatcgtctccgcccacgcccatttgcgcggccaacaggcgcaggaacgtgtgacggaccggcggcaactcgttctggtgggtcgcctcttccagcatgagcgagctgtacggcaacaggctcgccgcgaaatgttcgctgccggcctggctgatacgcatgccgtgtccttgggcgtcaagcacttcggcccaacgccagtcttcatggttgccggtctcctgcggcaccagatacggtgcattgtcttcggccgcggtgcgctcgaaaatgccgagcttgccaccgtgcagacggtcgtgataggtttcctcggggccaaggccgtagaagcgcaggttctcgtactgcttgggaagtgtccattccaatccgaatgccggcagcgtcggcgcatcggtggcaccggcatatcgggcggtcagatgtacacgtccgctggcggcatccacctcatagcgcacggcaacttgggtttcgcccggttcggccaacgtatgacgaatgccgccaacgggcaccaacctcgttgacggcattcgtctttccaggacaccgcaatcgcggatgcatgccgtttacgcgttgaatacgtattggtcaaggcggcgcatggcctccttgacgcggctcaagggcaatgcgagattgacgcggatgctgtagggagcctggaacatgctgccgtcctgccatgcgacgcccacatcccagccgcgtttctccaactcgggcaggctcaggccgtggcgttcgcaccactgctcgcagtcgagcagcagcatgtaggtgccttccggtttggccaaactcactccttggaaatgcttggtgatgtagtcgtaggcgtaatcgacgttgccggtgagcaccgccttcagttcgtcgagccactcatggccttcgggccggtaggcgccgatcagcgcgtgcatggaaagcacgttcatgtcgttgtagtggcatttcgagcttttggccacgatgcggtcccggagtgtgggattgtagatgatgtggtagcttcccaccagtccggcgagattgaaggtcttgctgggcgcgtagaacgccacggtcctgttgcgtgcgtcctcgctgaccgattgggtggggatgtgctggtggttccccagagtcaaatcggaccaaatctcgtcggaaatgaccacgcaatcgttggccttgtacacttccatggccttctcgatttcccagcgttcccacacgcgcccgcaaggattgtgagggctgcagaacacggccacgtggatgtgatgctccttgagcttcctgtccatatcctcgtaatccatgcgccatacgccgcgctcgtccagcgtgagcggactgtggacgatgcggtagccgttgttttcgatgctccgggtgaacccgatgtaggtcgggctgtgcagcagcacgccgtcgccgggggcggcgaacgcggtcagcgcactgatcacaccgcccaggaccccgttctcgtagccgatcgcctcccgggtcaatccggtgaccccgttgcgcgtggactgccagtcgatgatggagctgtaatagtcgtcggtgggggagaagtacccgtaggcgggatgcttcgcccgttcgatgatggcctgcgggatcgtgggcacggtcgggaagttcatgtccgccacccacatggggatgacgtcgaaaccctcgcgtggcgggtccggcgcgaatcccgggtcggtgcccagtccgtcgaccgcgatcgaatccatgccatgcctgttcatgatggacgtgaaatcatacgtcattgtccgacaatcctttctcggtccgtggtggccggtcccaatctaaatcgggctcctgacggtgccgtggccgtgggcggcgatttgaccgcgtggcgtgttaggatatgcaccgttgtgaggcagtgatccgttatcagcggggagtcttcggaagaacggcggcaatcgcccagtagaaccgacgggatcggcccgagacagccgaacacaagcggtcgcgcaggctcgcggctccgagtgcaacagttcggagcggcgcaaccggtgcgataagcgaggtggtaccgcggtgcggagcgcataccagcgctcgtcatcgtcctcgtaggcaggaacggcagacatggctgttccgggcggaacacagtcggttccggctgcgaggcgattgactaatcggcccacggttcggtacgtgacattcgtgaaaccagccggcacacgtcggcgcccggcaatcgccatcaatgacgctcctgtaggaccagtgcacagtactaacaggagatttacggtgagcgaaaacgtatatcccaaggcgagcgagggcggcgagaccgcgcacgtcgcgccgaaccccagcttccccgacatggaggagaccgttctcgactactgggacaaggacgacaccttccagcagtccgttgaacgcaacccttccggcgaccacagccagaacgaattcgtgttcttcgatggcccgccgttcgccaatggcctgccgcactacggccacctgctgaccggctacgccaaggacgtgatcccgcgctaccagaccatgaagggccgcaaggtcaaccgcgtgttcggctgggacacccacggcctgcccgccgagcttgaggcgcagaaggagctcggcatcgactcggtcgaccagatcgagaagatgggcatcgacaagttcaacgacgcctgccgcgcttctgtgctgaagtacaccaacgaatggcagaactacgtgcatcgtcaggcccgttgggtggacttcgagcacggctacaagaccctgaacatcccgtacatggaatccgtgatgtgggccttcaagcagctctacgacaagggtttggcctaccagggctaccgtgtgctgccgtactgcccgaaggaccgcacgccgttgagtgcgcacgagctgcgcatggacgccgacgtgtaccaggaccgccaggacaccaccgtatccgtggccgtcaagatgcgcgatgaggacgacgcctacgccgtcttctggaccaccaccccgtggaccgtgcccaccaacttcgccatcgtggtcggcgccgacatcgactacgtcgaggtccgcccgaccgaaggcaagttcgcgggcaagaagttctacctcggcaaggatttgctgccgcattacgagaaggaactcggcgagaattacgaggtcgtgcgcgaactcaagggcaacgagctggcaggccgacgctactacccggtcttcccgtacttcgcgggtgacgaggccgaatccgaaggccacgtgcccggcccgaacggctacacgatcttcaccgccgactacgtcgacaccgtcgaaggtaccggcctggttcaccaggctccctacggtgaggacgatatgaatacgctgaacgcgcacggcatcaagagcaccgacgtgctcgacgatggctgccgcttcaccgcgcagtgccctgactacgagggcgatttcgtgttcgacgccaacctgccgatcctgcgcaacctgcgcgccggcgacggcccgctcgccgagattccggaagagcgccgcgcgatcctcttccaggagaagagctacgtgcactcctacccgcactgctggcgctgcgccaccccgctgatctacaagccggtctcctcctggttcgtgtccgtgaccaagatcaagccgcgtctactggaattgaaccagcagatcaactggatcccgggcaatgtcaaggacggtcagttcggcaagtggctcgccaacgcgcgcgactggtccatctcccgcaaccgcttctggggttccccgatcccggtgtgggtgagcgacgatccgaagtacccgcgtgtggacgtctacggttcgctcgaagagctcaaggccgacttcggcgactatccgcgcgacaaggacggcaacatcaacatgcaccgtccgtggatcgacaacctggtccgcgtcaacccggacgacccgaccggcaagtcgcacatgcaccgtatttccgatgtgctcgactgctggttcgagtccggttccatgtcgttcgcgcagttccactacccgttcgagaacaaggagaagttcgaacagcacttcccggccgactacatcgtggaatacatcggccagacccgcggctggttctacctgctgcacgtgatggcgaccgccctgttcgatcgcccggcgttcaagaacgtgatctgccacggcatcgtgctcggctccgacggccagaagatgtccaagcacctgcgcaactacccggacgtgaacggcgtgttcgacaagtacggttccgacgccatgcgctggttcctcatgtcttcgccgatcctgcgtggcggcaacctgatcgtcaccgccgaaggcattcgcgacaccgtgcgccaggtcatgctgccggtgtggagctcctactacttcttcaccctgtacgccaatgcggccaacggtggggctggcttcgacgctcgccagctgcgcgcggacgaggtcgccgatctgccggagatggaccgctacctgctggcccgtacccgtcgtctggtgctggccgccgagaagtcgctgaacgagttcgcaatctccgacgcctgcgatgcggtctccgacttcatcgacgtgctcaccaactggtatatccgcaacacccgtgaccgtttctggaatgaggacgcttccgcgttcaacacgctgtacaccgtgcttgaggcgttcatgcgcgtgcttgcgccgctggccccgatggaagccgagtccgtgtggcgtggtctgaccggtggcgagtccgtgcacctggccgattggccgttcgtggtggacgagaagaccggtgaagacaccgaactcggccgcgtgctggtcgacgatccggccttggtggacgcgatggagaaggtgcgtgaggtcgtctccggcaccctgtccctgcgcaaggccgccaagatccgcgtgcgccagccgctttccaagctcaccgtggtggtcgagaacgtggacgccgtcaaggcgtacgacgatctgctgaagtccgaacttaatatcaagaatattgagttctcgactctggaggacgcctccgcccacggtctgaagatcgtgcacgagctgcgtgtgaatgcccgtgcggcgggtccgcgcctcggcaagcaggtgcagttcgccatcaaggcctccaagtccggcgactggcatgtcgatactgcgtccggtgcgccggtggtctccacgccgtccggcgaccttgcgctggtcgaaggcgagtacgagctgatcaaccgcgtggaggaggagaacgccaccgaggccgccgcttcggtctccgccgctctgccgaccggtggcttcgtgatcctcgacaccgcgctggatgccgatttgctggccgaaggctacgcccgcgacgtgattcgttctgtgcaggacgcacgtaaggctgccgatctggacatcgccgatcgcatcgccctggtgctgaccgtgccggccgccaatgtggccgatgtcgagcagttcaaggatctgatcgcccacgagacgctggctacctccttcgaagtgaaggaaggcgccgagctgggtgtggaggtcgccaaggcgtgatgccatggcggactgaccgcgcctgaggcgcggtgcacgggcgcgtgtaatccatgaagtggtcccgccgtttagcggcgggaccacttttttgtttcgtggtatgcttgcgctgcgacgatggcgttgcga

SEQ ID NO: 1243 - DNA, 2619 bp, Unknown
  R81_24m  MAG No. k141_29199
gaacgttcacgtgtggacgtcgaagacgattacacgatgatcatcgtcgacattcccaccgtggaggagcgtggcggacgcgactggtacgagaccatcccgctgtcgatcatcgtcaccgaaaacctcatcatcaccgtctgcatgcaggacacgcccgtgctccacccattcatggaaggcacgatccgaggcttcaacaccttcatgcgttcgcgcttcatcctgcagatcctgtaccgcaacgccacgatgtacctgcgttacctgcgcatcatcgaccgcgaaagcgacaagcttgaactgaagctgcgccactccatgcagaaccgcgagatcgtgatgctcatggagctgagcaagaccttggtgtatttcaccacatcgctgaaatcgaacgaaatcgtgatggagaagctcaccaccctgcaacgcatcaagcagtatccggacgatgaggatctgctcgacgacgtcatcaccgaaaacaagcaggccatcgagatggccaacatctacagcggcgttcttgcgaacatgaccgacgccttcgcctcgatcgtgtccaacaacctgaacaacgtgatgcgcatcttcaccatcatctccatcaccctgtccatcccgacgctgattttctcgatgtacggcatgaacttcgacggcggcatgatgggcatgccgttcaccgacaagccttggggcttcctgctcatcatcgtgatctccatggtgctttccggtgtggttgcctggttcctcacacgttcgcgcatgttcaagtaaggcgtttgacggttatgcaccattggtcatcgttcgtcagccgtagcatgctccgcgcccgccgcccgatgcggcgcggatttcgctcccgactgatggcaggattcgccgcggcctttggcatgatattgccattgtccggtctggccggttgcggccaaattcaagtcaccaccgtctccggagcgccggaggggcccaccatcgccattggggtcgcagccgacgagccatcggtgggagcatggcatgacggcacataccagggcttcgacatcaccatcgccaaatacgtggccgccaaactcggctatgcgaacaagcagatcgtcttcaagcaggttcgccccgaaaaccggcgctccatgctggacaatggacaggtcgacatggtcgtcgcctcttggcctatcaccgatgggtccagcgcgatcgttgattttgccggaccatacctcacgaccagcgtcggtttgctggtcaggtcggatgagcgtggccgattcaccaatgacgcaggttcggtgggcgacgtaggcgacggcacggtgtgcgcagtgaaaggtgacgagacagtcggcatcttccgcggcaaccacccgcaggctcggattcaggagcgtagcagttatgcgcagtgcgtcacggccgtgcaagtagggtcggcggatgccatagcctccgatatggcggtgctttccggtcttcaagcggccaacgggccccagtatatggacgtgattgcggacaagggcgaggtcagttatggcatcgccgtgagtcaaggcaccagccaattggcgcagaaaatcgcggaagcattggaagacatggttgaggatggcagctggacggccgccaaggatacgttcacaagccaaacaaagctcatggtttcgctgaacggtgaccccacagccatcgtctcggatgctgaataacgattgacgacgtgtccagttgcgaggctaccttgctgatttatgagtgacaacgagaagagcacgcaaaccgaagagcccaacttccgctacaacgccgcactggcgcaggacatcgaaaacaagtggcagaagatttgggacgagcaaggcaccttctgggcggccaacgtcaacggcgatttgaaggacggcaagggccgcaacgccgaggggcgcaccgcctacttcgccatggacatgttcccgtacccctccggcaagggtctgcatgtgggccacccgctgggctacctggcctccgacgtggtgagccgctaccaccgcatgaagggcgagaacgtcctgcacgccatgggctatgacgccttcggcctgcccgcggaacagtacgcagtccagaccggccagcatcctcgcgtgaccaccgaggcgaacatcgccaacatgagccgccagctgcaccgcatgggcctgagcttcgacaaacgccgcacgttcgccaccatcgaccctggctacgtgcgttggacccaatggatcttctcgcgcatctacgattcctggtacgacgaggacgccaccaacccgtccggctccaagggctccgcacgcccgatcgccgagctcgtggccaagttcgaatccggcgaaaaggccattccgggccacgagtccgatggcaagcagtggtccgacctcactgacgccgagcagcaggatatcttgaacgacttccgcctggcctacatctccaagtccccggtcaactggtgcccgggtctgggcaccgtgctggccaacgaggaggtcaccgccgaagtcaagtccgagcgaggcaacttcccggttttccagcgtgagctgcgccagtggtccatgcgcatcacca

SEQ ID NO: 1244 - DNA, 6627 bp, Unknown
  R81_24m  MAG No. k141_29584
atgatgcctcaacagccatcgcccacacacatcacagctatcaaccgcaaatatcaagaggccgaaaatctatgagacaagcaaccccggaaagcctcagaccctacaaatggctttattgcaagggtatatgccggttcaaactccactaatagaacaaatagaacagccggcttaggtacggcgcggcaaatggcgcaaaccggccgcgatagtagtagcgtggtgcataccagtacaaccatgcgaggagaacagccatgatcaatgaggactacaaggccatgcttggcggcaagtccgtgattcgcgggctgagcgagtacgccacgagccgcggtgctgaaatcggctaccagaacgtgttcgattacagccttggcaatccctcggtgccggctccgaaatccttcaccgacgccatggtcgacctctacgaaaacggcgatccggcggccatccacggctactccccctcgctcggcatcccgtccgtcaaggacgcgatcgccgaaaacctcaacgaacgtttcggcatggcatacaccggcaaccatatcttcccgaccacgggcgcggcgggcgcgctgtcccacgcgatgcgcgcggtgaccaagccgggcgacgagatcatcaccttcgccccctacttccccgaataccagccgtacgtcaagggcatcggcgccaagctgaccatcgtgccggccgacaccgagaacttccagatcaacttcgaggcgttcgaggccgcgctcaacccgaacgtgcaggccgcgctcatcaacaccccgaacaacccgtccggcgcggtgtattcggcggacacgctcaagcgtctggccgcgatcctgaccgccaagcaggccgagtacggccacgacatcttcctgatcagcgacgaaccttaccgcgaaatcgtgttcgacggagccacccagccctacccggccagcttctatgcgaactcgctgacctgctactcgtggtcgaagtcgctgagcctgccgggcgaacgcatcggctacgtcgcggtgaaccccgcagccaccgacgccgacctgctcgtgccgatgatgggccaaatctcgcgcggcaccggccacaactgcccgccgagctcgatccagttgggcgtagccaaagtcatcgaccagaccgccgacctcaacgtctacgagacgaacatgaacctgctctacgatgcgctcaccggcatcggcttcgacgtggtgcgccccggcggcacgttctacatcttccccaaggcgttagaggacgacgccgtggcgttctgcatgaaggccaaggaatacgacctgatcctcgtgccgtccgacagcttcggcgtgcccggatacttccgcatggcctactgcatcgacaccgagaaagtcaagcgttcgatccccgtgctcgaaaagttcgcccacgaggtgtacggcctgtaaacacgggccgcaagtaacaaacacaagaaaggggttgccatggaatacaccgaagacgccgatcatcgcgaactgctgctgcacagcgcctatgactccgatacggtccgggccatggagcgacccctgctggacaaaggcgtgccgctgatgcgcatggccgcccaggccgcggcccacatggcggccggcatgctggacgacgaggatctggcgctggaggacacgtcgatcgtgctgctggccggggccggagacaatggtggcgatggtctgttcgcggccgccgcgctggcccaggagggcgcgaacgtcactgccatcgccgtgggccggtcgctgcatgaggccggattcgccgcgctcgtgcgcgccggcggcaaggtgctggtgcttgacccggcagccgatattcccggctgcgcgtccgggttttccgccggtgaggccggcgagcgactgcagaccgccatcgccgtggccaggaaatcgcatctgatcatcgacgcgatgaccggcatcggcattcaaggctcgctacgcggcattcccgccgcgctcgcctccgcccttggtctcgacggcgagtctcccgatgagcccgccctgccgaaccgtgagtcgtcaggcgattttccgctggtacttgctgtggatacgccatccggcgtcggtgtgaacgatggttctctgcccggcccgtacattccggccacggtcacggtcacgttcggcgcgatgaagccgtgcgcggtgctgccgcccgccacgttcgcctgcggccgtatcgagttgttcgatttcggattcgatatcgacgacaaggatccggacgtcgaggtggtggataattcgttcgcgtccgacgcggtccgtctcccccggttcgaggattccaaatattcccggggcgtggttggtctggtgaccggctcgcagcgctaccccggtgccgccgtgctcaccaccagcgccgccgcccgcgcgaacaccggcatggtccggtatctgggcccggagcgcgcgcagaacatggtgctcaccgcactgccggaagccgtgatcggcaagggacatgtgcagtcctgggtcgtggggtccggcgtgcccgaggctagcgtcgagggcgccgacggcgatatgcagcgggacaccatcgccgcattgctcaagcattacgcgctcggcagcgaggatgagaacaaggacgcctacgacatgccgccaatcgtggtggatgccggcgcactcgacctgctgccggagcgtgtgcccggccaggtggtgatcacgccacatgccggcgagatggcgaaactgctcaaccggttcgaaaccaccgccagcaccgcggagcatgccgattcgcacgagccgtacaccgccgacgacgtgcggctgaacccgttggccagcgcgaagcgcgcccacgagctcaccggtgccaccgtattgctgaagggcgcggtgaccatcgtggtggatgaggaccatgtctatgcgtcgggcagtgcgccggcctggctgggcaccgccggcgcgggcgacgtactggccggtctgaccggcgccctactcgcccagcaggatgacgtggccaccacgggcgagaccgtggcctcggccgcctacctgcatggcctggcggcggcgatcgcctccgaatccgagcagcagggctggcaggagccggaactgatcggccgcgagcatcgccagcgcttcatgacgctcggccacccgatcgtggccggcgacgtggtccacgccatccccgaagccatcgccgacgtcatctcataaccttgttgacctccctctgacgagggaggtgtctcggcaaaaccaagacggagggagagaaacataagcctcaaactccacataccccgacctatacacaaaccccgtacactaaatcgcagacctcacccaacgacccaaacacacaaggaaccatcatggccaactcccccatcaccgacgtgattttcgacttctgcggcgtgctgctggactggaacacccgcgcatgccttgaaggccgattccccgatgaaatcgtggaacgcatctgcgccgacgacgacccctgcggcttcttccactacgaggaccgcatggacgccggcgaggatttcgcggacatctacccggatgtggtacgcgaacaaggccaggaactcgccgacatcttcaagttctacatcggccactacgcggacgcgctgccccgcacgctgccgggcatggtcgaactgctggcggatttgaaggcccacggctacggcgtatggggtctgaccaactggtcgcatgagaccttccacctggccttcgagaagtacccgcgcctcgaacagctgctgcagggcaccgtggtctccggcgtggagaagatgcacaagccgaacgccgacatctacgagctggtcctgacccgcttcggtctcacggccgagcgctgcgtgttcttcgacgacaccgccaagaacatcgtcggcgccaacgaggtcggcatccacagcatcctcttcgagaacgcgtcgcaggcgcgcgaatcgctcgccgaactcggcgtacgcctgtaagtcgccaaatattgcgtcgcggcagttgaagtctatggacccgtccttgacgacggtgaccggccgtttggcgaccggcatgtcgcactgttcggtgagcacttcaacgacgcggcacgcggcaccatgcgcagaatcatcatgaaggcgttctggatgttcatcacgtcggcgccgagcctggtcatcaggctcggcgtggagaagcggtcgatactggagaaggagaaggtctggatggcatcgtactggtcctgcctcaggttaccaatgtggcgcatatcccgttacacagcgtccgcgatatgcgaggcatctcatattgtgtcgccatagtggattgatgaggttataaacccgtgtggcgaccatccctagcgatataaatagactttatgacactgctgcagctgaaatacatcgtcaagatcgtcgagtgcggctcgatgaacgaggcctcccatgccctgtacgtctcccagccggccctgagctcgtcggtcaaggaattggagaacgagctgggcatcgagattttcacccgctcctcgcagggcatcgccctgaccgtggacggcgcggaattcctgacctacgcccgccaggtgctcgaccaggccgacctgctcgaagagcgctacaagcacgccaaaccgcgcaagcagctgtgccaggtctccacccagcactacatgttcgccgtcgaggctttcgtggagatgatcaactccatcaagtccgacgaatacgagttcacgatccgtgagacccgtacacgtgacatcatcaaccaggtggcgaacatgcagtccgagatcggcatcatctacctgtccgacttcaataaggacgtgatcggcaaactcctgcgcgagaaacaccttgaattccatccgctcttccgcgcccccctgcacgtgttcatctcacgggacaacccattggccgccaaaaagatcatcaccatggaggatctgaagccctatccgttcatccagtacgaacagggcgaggaaggctcgttctacttctatgaggaggcggtctggccggaatactcccccaagcagatcaacgtgaccgaccgcgccacgattctgaacttcatcatcggcctcaacggctacacggtgtgcaccggcatcgacaacggcgacctcaacaatgagaagatcgtcaccgtgccgctcgacaccgatgagacgatgctggtcggctggatcaccaacgagcgctccaagctctccaaggccgccgaaacctacctcaccaagctcaagtccgtagtcgccgatcacggctacaagctcattgattaggagtaagtaaaacagtcatggtcagcagtgagatatactgcgattaagccaaccccgctggggaaatggaagtaagagccggcccctgagtatctcaggggccggctcttgcgctattgagactgactggcaaaaccagtttgatggcctccggctacttggccgagattaccgacgtggcggctgtcgtggcgaagcctttgagcacttcaatcatcacgtcgcgatcttcgacatcaatgttgcgggccgcggcgagcataatcggcagtgactgtgtcaaatgcgaagtgaggtcgccgaatgtgtcgtatccgccagcctcgaagatggcaaacaggttttcgatgaacttgcggcgatgctcgtcgtcgtattttgccatccatccgttgatcgtgcgtgccaggtatcgcgcgctacttgtcagtccatcagcctgtacgaattggccatgatcgacttgccagtgcaatgcgaaatgctgcatgatgctggcaccgtcgctgctgaccaccgtatagccgtcttccacatgctcgcgggtctcaaacagcatgccgatgatcgacgatcccggtaccgatttatggattttcggcgcaatgcgcgcgtacccatcctcatcgaagaacgcctcatcgaagcctggaccatcgtgcgaatacacggccgtgatacgtccctgaatttcgccgggcacattggccgccgcgtataccgccagattgccgcctttggaatggccgccgaccataatcggcccggcccagcggccggcaatatcagtcacataccgcacagcggcctcctgcgaggcgaccggacggcggaaggccatcgtgaaatcctccttccacccgacgatcgaactgtcggtgccacggaaagccacgtacagcgtgccgtcgcccagttcgaagacgcaggccgagaactgtttggtggtttcggcgtcgaattcatccacgtattcgccgacgcgcaggtcgcgccagcgcgggctctcccccatcgcacgcagcagatcgacgttcatctgcggcgaccacaccttgccgaacatggcgtcatagcattcggcgcgtagcaggtcgcggatggagaccgtgggaatcatgccgctgacgtccgccgaatcctcgtgatagcgcggcacgttatccggcatgcgcgcgtaggccagctgggacagggcgagactgtccgcctcggtgaacggcagtgcggcgaaggtgtcgaaatgttgccggatatcgtcggtga

SEQ ID NO: 1245 - DNA, 23966 bp, Unknown
  R81_24m  MAG No. k141_29625
cacacgctcaatacgcgatagggacttcatttcctctccactccttcgcgacggaaccggctcaacagcacataggcaaccaaaagcaccacgatcgggacgacgaccatcacggggccgacggacgctcgactcgccgcttccgccggcgacatcacggtgccgttcaggttcagcccgacggtccgtagggcgttcgcgacgtagggcgtcgcatagtcgggaaggtcgcccggcaggagaatccatgcatagcaaaggatggccgagacgattccggcggttctgggatcggcggcgatctcgacgatcgagtagatcagggaggtcgcaaggctctgcagcacgacgaagcacaggacagctgccagatgcgggtgcattccggtacccgtcaggaccatgatggcgtcgaagcacagtacgccaatcaggttcacggaggtcaggatcagggcccggaacacggccctgagcgagcatggcgtccacgcggaatacacgtggcgcggcaggccaccgtagtgcgccttcgcgaccctggcatcgcatgcgaagagcagcgaaagacagatcaacggctgggtggcggtgaaatagacgcaataccctccggttatcggggttccgttcgccgcgcttgagatccacgcacccagcagaagggacgagacggccccaaacaccgcggcgaggaaataccacgtgttccagtagtaggcgaccaacgcgcgaacaggggaaacggcgttcaagaccctacctcccctgatacagatccgcgaggttcaccccggtcagatccgtgacctgcacggcccggccgtgacgaatcatgatgcactcgtccgggacgccctggatctcatgaagcagatgcgtggagatgacgacgcagttccccttgtcccggtaggcgcgaagcgtttcggacaaggaggctatgccatcggggtccagaccgttctgcggctcgtcgaggaacaggaacctcggatgcggcacaagggcgaggcacagctccagacgctctttcatgcccgtcgagtagtccttcgccttccgcccatacaccgcgcgattgatgcccacaccgtccaacgccgcctccgggtccacatccagaccccagaacgcggagaccacctcgacgttctctctaccactcaggtaaggaaagaaactgggatggtctatcgccgcggacatctcattgatattcgtccctgtgtacgtgacctctccgctcacgggctttatccgtccgagtagcgtcttcatcaacgtggttttgcccgcgccgtttgccccaagcagacagataatcctacccgtgctcaaccgcaggttaatgttgctgacgattggggaacccttgtacccgatcgagagattcgtagccgatataactggcataatcacccttcacgaaaggcgggcctgaaggcaaaggcaggatgccttgcccagacccgcgcgttgcaatgtcgccgctattgcacccttcagcggccgcaaacgcaacaacatgtcaggccaatcgcatgacggtagctccatgctccctcgattcgccgaaactatccatcggccaaaggaatgaacctgcgcatcatccgcaaggacgatgcatccgactcccatcgcacacttgccgccaccggtctctccccccccccaaaaaaaatggcgaagggcgggttccagtgatcgtcgcaacgcctggctgactgatgggagggccaggtggacaggtgggtgttcgagggcgtggagtacgcgacgcgtggcgagatgtgcgcggcgcggcggcgccgctacgccgagctgctggaggcgggcatgaacttcacgcaggccgcgcgggcggtgggcgtgtccaaacgcaccggcaaggtgtggcgcaacggaaggacacgatcgaacggcaggaacgagaagccatcggtggactggtatcgttccaccgtggacattccccaaaagatcagttcgaggtatctgagccaggacgagcgcatcagcatcgccgactggcggaaggccggcatgagcgtgcgcgggatcgcgcgcacgctcaatcgtctcgcgtcgaccgccagccgcgagctggtgcgcaacacgaatcccgcgaccggcatgtacgagccgtaccggccccagcagatgagcgcggacggcccagacgacccaagcccgcgaagatccatacggtgcccggcctgctcgcatacattcgtgcaggattgcgggcgcattggagtcccgagcagatcgcggggcgcctgcgcgccgatttcccggataatgatgctatgcatgtgtgcgcggagacgatctaccaggccatctacgtccaggccaaaggcgaactgaaaaaggacgtcatcaaggccctgaggagcgggcgcgcccaacgccggccgcacgggcaggcgggttcgcgcaggcccgtttccgcgagctcatgatcatgatcagcgagcggcccgccgaagtcgaggaccgggcgatacccggtcattgggaaggcgacctgatctgcagcgcggccaacaaaagcgcgatcggcacgctcgtggaacgctcgacacggttcacgatcctcctgcacctgcccgacgggcacgacgccaaacacgtccggcaggccgtcatccggaaaatgcaatacctgcccaagctcctgaggaactcgctgacctgggaccagggaagcgagctcaccctgcacaaacgcatctcgaccacgctggacatgcaggtgtatttccgcgacccgcattcaccctggcagcgcggcaccaacgagaacaccaacgggctcctgcgccaatacttccccaagggcaccgacctgagcgcataccccgaggactacctcgacgcggtcgccgaggaactcaacgaccggccccgcaaaacactcggctacaggaaaccatccgagaaaatactcgaactcatcaacacagcatgatacgatcgcaccaatccaagaccgccatcaagagcggcaaaacacacaggtgttgcaaccaccactaaaatccgccaagcccaccttgccgaatggggtgtcgaacatggaatccgtcttgggggggggcgtgcggtagtcgcattcgtaacaacaatccgcttgaatgagctgctgagcaaatagcaggtctacatgcctgctttgaaccagccgatggcgatttgagtgcgattgcgcaggcccaaagttgcgaggatacgggtcacggcacgtttgacggaggcaggttcgacggtgagttgattggcgatttcctcgttgatgagcccttcggagatgagtgcgcagatttcacgctggcgaggggtgagtgcgtcgaaagctttgcgcatttcttgctggcgctggctgctggtgggatgcggaacgcctcgtttaagcacttgtctggtgattcgtggggtgagtattgcgtcaccgttggcgatggcgtgaaccgcgtcgatgaggttgtgcttggtgacgtccttgagcaggaagccgctggctccggcgtcgagaccgccaaaggcgtaatcgtcctcgtcgtacgtggtaaggatgagaatgctgatggtgggccagcgtctggtgatgcggcgagtggcttcgatgccgtccataccgggcatccgcacatccatgaggattacattcggcaatggacgatgctgaacggcgagctgttcgagcgtctcgatggcggatcggccgtcagcggactgggcagtgacgacgatgtcggaagcatcgtcaagcatgagttggaagccaagtcgcgcgaaacgctggtcgtctacgagcattatacgaatcatgcggtgtggtccttttcgttcactccgttggacgggatggtcgcctcgacgacccattcgccgtcttcgtttggaccgtattcgaagatgccgcttgccgattcgacgcggtggaatagacggacgagcccagtaccgtcatccttgcgcgcgtccttgcgcgcgggactgccgtcattgcggataatcacggcgacggtgccgttctcgctgtggttccaggcgatgctgatatgcaccacgttctgtccgtgacgtatggcgttggtgatggcttcgcgagtcacatcgaaacacaaatcagcctgagcttcgtcatcggcgcgcgtaccagtctcggtgaacaccgtgacgatgcccagccggcgtgcgtgcgcgagaatcggccgaatgtcatcccatgaatgctggtctgattcttgggtgtgcgtatcgtcaccgttcgccgctccattgaactcggtcagtgcgcggacggctttgcgcgtgtcgcccagactctctcgtgcgatttcgttgatgccgtgcagcgcatcctccacgcgtgggtcatcggttttgccggccagaccctcagacagtgcgatgattacggtcagatcctggcccacactgtcgtgcagttgaccggctatgcgcgaacggcgtattgcggcatcgcgttggaaggccagctcggctgcccgccggcattcctcggcagctttgtgttcggcttccttggcctgttgcctgccacgtactgcaagcgcgccgcctcccacggctgccaacgttaccactcgactcacccattcggtcgcgagaacgtccggatgcaccatgatggccgacgcggtcatcgacagcatcatgccgatgcctccaacgcacagcccgcgccccctcgctgtccgggcgaacgcatagcaggcgacgagcgtctgaatcatcacgattgagtccaaccgccagtacgaggcaactattaacaataccgcttcaagcgccaaggcaacggctggcagccagtaacggacaagcagtatcgcactgctggctatggtcatcgccagcagcagagccaatcccagcggatctttggcaaacgtatacatggtgtcggccggcgctccgatcgcatgctcccacagcatcgctgcacattcgaccacggcgatgaccagtggcacggccaggaccgtgaccttattggcctgcgcggattgcggtttcatggctcccattgtggctctttttgtatgatgttgcgtgcatgtcagcatgtgcgtatcgtgtcggccacgctgcggtgtagcgcggggcgaatctgcgtgaactggatgaggaacaatgccagccagcaggccgtgcccatgccgattacgcccggccatgggatttcggccacggggatgccgacgagcgccgcggatcttgcggcgaaaacgcttgcgctgacggcgaccgggatgagcgagagaatgaccgcgccggcggccagctgcaggctctgccagagatacatgcggatcacacgacgtggggacaggccgatgctgcgcagcaatgcctggtcggcgaccatgctgcggttcgacagggcgatgaccgccatgctggtggccagggacacgatgcacagcatcgttatgagcagcagcgagtccgcgtagttcaggctcttcggatggccgcccaaggcgagtatccggccataggatcgcgcgcaggtcagcagggtgaccgacagtcccatggcaagggcgagtggggcaatcgtgttcgtgttgctggcggccttcgcctcggcggaacgggcggcgagcacgccggtcgcggacccgcacaggcgacacacgacacgtccgatgcccaacagaatcggaatcagcatgctgacaaggatgtacatgccgaacgaggcgatgatgccggcccacagcgcgctgttgaatgtctgccccgcctcctggccgaacgcgagcgcccgtggcgtgcccatgccggagaacgccaatgccagcgccgccgccatgacaatcaaaccaagtgcccagtgcgcccaagaccgccaaccgtgccgtatcccgatggctcccgtgccgcgaatcacctcgatgggacggatcttcgctgcgcgcagcgaggggatggacgcgcccaacatgcacgtggccacacccaacagcagggatccgagccacgcggccatcgacggcgtgaacgcaggaggtgcgaacgagccgaatccatcggcgaagctttccgcagccatggcgttgaactcgggaaccgccagcaggctggccggcactgcagccagagagccgatcagggaaccgaacaggctcgccacacccacgagcatccacatgctggcaagcacctgactcgggctggcgcccataagccgccattgcgcgaacgtgctgtgaatacggttgaccgtggccgagccgaccaccgtcaacgagaagaacgcgagtaatgacaccaccacatagatcgtgaccgacaccatgccgaactcggccggatcaagacccgcctgccgcgcggccaatgtgaacgacggagacgaggtccacacgaattggttcatgcatatgcccaccagcgtggtcaccactgcgaccaccagaatcgtgggtacccatcccgtgacattgtcgcggaacacacgcagcacatacctagccacgatgagcctccttccgctgctgcggatacgccgcgcgctggaccggtcggcccggttggacggattggataggctgggcgttcaccatcatcgggccgacagaccgcgccgccgcaaccaacggcggcgacccggccggtacgaaagtgcggcgtatgccatcggcaatctgctcggcggtgagtctgccagcgatgtgggtgacctgaccgtcgcgcaggaagatcacgtggtcggccaaagcggcggcatccgtgtcatgcgtgaccatgaccacgctggagcccgcatccgccagctcgcgcagcacctgcagcacaagctcgctgttcgcggtgtcgagcgcgccggtcggctcgtcggcgaacaccaccgccggacgcatgagcagcgcacggcacagggcgacgcgctgctgttcgccaccggacagggcgcttaccgtcgtcttcgccctctggcgaagaccgaaccgggacagcagctgcgtgacctgcacgtagtcggccttgcgatgggcgagcgagagcggcaacatcacgttctcctcgaccgtcagatacggcacgagattgtattgctggaacacgaaaccgatatgcccgcgaatgaaccgcgaacgccgttcctcattcagtgcgtagacgtcggtaccgccgatggtcacccgcccggaatcgggcctgtccaatccggacagcacatacagcagcgaggtcttgcctgcgccggacggaccgacgatcgccgtcaagcccgctccatcgatatccaacgaaacattattgagaacagtctgcgtgtttgcgggtcgggaggcggttcgagcatcgaaccctgtccgtttcaccagtccgagcgcctgaatcggtgtgccggcattttgccaagtcatgaggtagccccctgtcgtgaaagttgacgccgtttttctcaaccttcgcgccaggggcatggcaggtcgaggtaaacacggaaagtgacaccctagggtgacagattccagtagcgttccatgaccggcacccaatatgccctcaaccagaccagcgacaacgaggacctgcccggcatcgtccaactgcccgcctatgccaagtatgatggacggctgctcgtcatacttggttcctccgggaagcgaatatccttctgtcgtttgcggaaacaagccctgccgatgcccaagaccgccagataaagcaggaacatcacgggcacgacccatgtcacgtaccgccacgggtcaatctggaacgtatcgaagacgatgaacatgacgccccacacgttgatggcgacgatcgccagaatctgggcggccgccgaatcgaacctggattcggccgggctggtatcgttcgcgtcggccggaacgtcaggcgtccgcccggcgcgacgcatgaagccgagcgccgcccacacgatggccgccaccaacgccacggccgccggcaccaccagcttccagaactccccgtcattccagccgtaccggatgacggcgcacgtgatggccgtgacggcggccacgcccaatgtggcggaagcgccgaaaaaccacagcagaccttgattccgacgcccaccatgggaggcccgcacctcatcgtccgcaaccatatcgtccccgcattccataaagtccgacgcgtacgcatgccatctcaattatggcactcaaagagtcaatcagacaacatgctgtcaagcgatcgcatgacaggaatcggctatccgtcaatgccttagggtgctgtcgatgcatatccgattgaccgatgcttctacatgcgtgccgacatgtgccggtccttcgcgtccgcgtacgcattcttacatcacgacctcaaactaatctacgaaaaactttaaacagatatctatttgattttaatattatttatggtatacttaattttattaaacccgccgtgaattgaaggaggcaggtatggatacgacgatgatcccgccgtggatgtcgaacctcgatgacgaggatatgacgttcatcaaacggtttctgctcgcatcaggctccatgaaggaggtcgccgcgcagtacgacgtctcctaccccaccgttcggcttcggctcgaccggctcatccagaaaatcaagttgggcgagcagatcgagaacgagccgtatatcgcgctcatcaaacggctcgcggtcgacgacaagctcgacttcgacaccgccaaaatcctcatcagtgaatatcgcaagcagctcaagcaaggagagtaatcatgattggcgccacaatatttgccgtagtgtttttcgtgtttctcatcgccatctgcatcggcttcatcatattgcagatcaggctttcgaagatggacagcaagtggcccggtctggtattgcccgccatcacattgctgctgtcgcttgtggcggcgattaccgtcttcgccagggcggacatcggtgcgtatggcaacatgtggaacgtcgtgctttccgcattcatcgcgttcctgtccaacaacgtatccaccatcgtgctggccggcatctacttgtatcagcgtgacaagatcaatcgtcgcgccgagctggcccgtatgaacgttcaggacctgtaactcactgtgcaaaacacgcagactgaaccctacgccgcttatgccgactcatcatcttttgcgccgcttcgcgcagcttggatgattaagccggtgacgtggtcgcagggttcgtcgcgcaatcggagccggacgccctgtcatttcggctgattccgtacatcctgttccgccgcgaaccgttcggcgatttgccgtgcgtggatgttcttggcttcgttgacgaagtcggcgcatgccttgctgccgtagagcgcctcaccacacgggtcggcgaaacgcggatcgccgaccagcgcggagcgaatggccccgaacgagccggacagcggcatggcgttcatcacggtcgcggtttgattctgtgccgcccgggtgcgggcggtcttgaccagaccggtctcgtcgcagtagcgcaacgtgcgcgtcgtcacgccgctgatcaatgccgcctgatcaatgggccacaaccggcccgtatccagcggattgccctccacatcgaacgcgccggaaccgttgacggcgttcgccgtgttgtcgttctcgttcatgatcgatcatcccccttgaagccgattatcctctacccgccgtgcgtgtttcgcggcgttgccgtcaggatagacgtttacgcaacgtcaaccgcaatcgataatgggatgtatcgttcaagctaggcaatatgccgtcaagcaatcgcatgacagcaccatgttcggcacataccagatggaagaattggcaaaccttaaaaaataccgcggttattgctgtgccgagaacgccaatatgaccatagacgtgctttcccgctacacgttattcacctgtcatgcgccgatatcaatcaaaagacacttgcataaccaccgctacgcatcgccaataacataccgatgagccagaatgaggcccaggccacgatgctaatccgtaaataatactggtcagagtggcaggtacattggtcctatggctaagcgcaaacatatcggcactgttgttattgcaatactggtcgctattctgctgacggtgggcgtttccggctggctattctggcagtcggtacaacgggtgatcggcgaggcgcagcaggcgggcgaatatgcggctgaagcacagcaatccgtcgggcagggcgacttcaagcaggcgcttgagcagatggacagcgctggcagtcacatcgtcacggcgcacgacgaaacccagggcgcgctatggcaggccgccgaatacgtgccatattacggttcggacgtgaaagcggtgcgcggcatgctgggcgcggccgccgacgccgcgaccaacgccctgcccaaaatcgacagtgccgcgcagggcacgttggtggacttcaatatcgaagagctgctgtccggcatgaacttctccgacggcacgctgtccattcccaaaatcgcctccatcaagcaggatctgtccgacgccggcgtggtcttgaagcgcgtcaagacgtcgatttatgcgctgccgcaaccccacacagaacagatcaccgaaatggtcaaccagggcaagcaggtagtggaccaaatcgatgaggctttcgacaccttgaacaccatcatcgagaagattccgggctgacgttggttcgttcttgtcgtatattggcgtaacctccgcataaggctagtccatacaaatttatgtttaaatttgggataggaggtgccaatatgccgacacgcacccaatcccggtcagtcgggcgatgcgtcagatatccgccaacctcgatttggcgcgcagacaacagcgcattcccgtagccttgctggccgagcgggctggattatccgtgccaacggtcaccaaaatgctgcgtacgggtaatggcagctttgagaacttcctccgcattgttcgtctgcttggactgctgggcggcgtacagcaagcgacggaccctcttaacacagatatcggcaaactacgcgccgacgaagacactccgaaacgtattcgatagcacagcaggaggcgcaacacatcatggaagcaatcgtcaccctgcagctcaacggcacagacgtcaccgtcgggaaattattcaccaatatcaagcgcggcatcaaatcggcaaatttcacatacgatacggcctatatgcgctcttcaaacgcagtatccctctgtccagagatgcccctctcccccggaacgttcccggccgagcataatgcgatgcatcgcatctttcaagactgcatgccggatcgttggggcaggaacctcatgcttcgtgcagaacgtcaagatgctcgttcggagcatcgcacagcacgcacactattccccatctttgagctgcgaaatttatccgtataggtcaattgcgttgtactccaatgtaatcagtcaatacacgccaagtgaaaaccattgaaaaacaatgtgacaacatcatgcgaccttagcaaaactcccctcagtcatctacggcgccagttcagccgtaatgaagacggtctggcgaccgcgctacatagctcggctgtcgcctcgccctcgcttacaaacagcttcgctgtttgcttaacggctcagcctccagaggggagccagtagacgagtagtgcgttaccgtttcacgattgagcgcttggcgaggtatggggttttgtgttgtttgcggttgcggctggcggccgacttttcgcgctcgcgtcgggctttcgcctcctcgcgggcggccatcgcacgctcctcctctagggatggcagaccggctgcggcacggcgacggttgtcctgctcgtagtcgcgcctgaccttgcgctcgcctgccgccgaaccgggcgtggggaaccatcgcaattgacagagcgtctggccgagattccacagattgttggtcaaccaatagagcagcacgccgaacggcaacgtggcgcccgacaccacgtaaatggcgggaaagacgaacacggtcatcttctgcacacggaattgcggcgagaccatagcatctttcgacgtattgcggtgaataagcatccactggatcacgaacaacgtcaggcacatcaacgccacggccacgccgatgatgatgcgtgactgcggcgaggcaaccgtgccgaacgagtcggcgatgcgtacgccgaatatggacgatgattcgatgtcgcccgccatggtgtggtcgatgccgcccaacggttccgcattcccatcggcgattgcgggcagggattgcagcgtgtagaacagcgagcacagaataggcgcttggatcagcgaagacaggcaggagccaagcggattggcgttatgtcgctgctgcaaggccatgatttcacgttgcatggcttctttggaacgcgggtccttgcgcgtggcgtacttgtgctggatgcgttgaatctgcggttggagcacctgtatccgctgcatcgcacgcatttgggaaaggaagagcggcagcagacagatgcggatgacgagcacgaggcacatgatcgcgatgccccacgcggggctggggccagcagtcatgccaaacgtgaccagggcgtggtgaaacagggtgagcagttgggcgacaacccattctaggggtcgcaggatgtggttgaggatattgatgaagttcattgggattcctgatgaattgacgaatctgggatgtgtttccgagttcaagcaactgcaatctggtacggcaacagctgggaactcccctcagtccgcttcgcggacagctcccctcagagaggggaaccaaattagggggaaacaagaacatcgcataaatgcgtatccacatgtcgcctaaacaacacaattgcgttagaccgtggggcgcaacgatgagagctgaaaagagaagctaaatcagattcgggaatcggggagcgtgtaacggggccagcgtggcatccattgcgggcgggcccatgagcggacggcgttcatcaccgtcgcatcgaagcggaagctggcgggcaacggtcggcggccggccgaacctacgaacgacaacagcacgaccgcgcagcacgcacatacagccgtcaccgtggcgacgaagaccatggcggccaaggcagtctgcgaatcaccgccggcaatccagcagccagtggcactcaacgacaacaacaacgtcatcaacacgatgatgtccgccatcggcatcggacgcgacagtacccgcccacgcgaggcagccatcgtccacgcaccgaccaaacgctgccgcaacgactccgcacaggccacgggcagaagaactggcatcatcagcagcacgcatacggcaaaccccagccgggtgccaagtgcaatgccgttcatgatgttctacccattccttctgaaccacatttccgcctggaagacggtcccagtatatacccgattcgacaccaattcggtattgtccaaaagcactgaccaattcgacgaaaatcacatctcatccaccatgacttgtagcgctgacttgtagcgctccgccactgacgtatcactgcatatcaaagtcgctcatcctcgaattactgtcctgcaacaccgaacgcgccgcgggctggaatgtattttgagtcctgagtagattaaccgttcacaagaccgatatcgcaacggcgcaacaaaggcaacagcacgcccaaaaagcccggaattccaccaatatgagatggtcgacaaaataaccaaaacgtcaacgaaaaccataggaggtcatcgaacatgtccgagaacatggaaaaacaaacaacattcgatttactgtcgggtttctggctttcggtcttctgtggagcagcggcctgtacgtggtggccaccgtgttgctccccagctgttcaaggacatcggcgtcgctaacccggatgcggcagtcggcacgttgaactcggtcaccgccatcgtgggcctggtttccaacctcgtgttcggcaacctctccgaccacacgcgttccaagatgggacgccgcaccccgtggatcatgccgagtgtcacgggcatgtacctgtacgcgggcatcgccggcttcggctatggcgtgtactcggccatcgaccaggcactcaacgtcgacgtgttgccgaacaaggaagaggccgacaaggacctcggcatcctcagcttggccaccacgctcggccaagcagtcggtcccaccatcacctccgtggtcaagaccacgaccggcacctacacgccggcgttcgccatctccatcgtcatggccgtgtgcgctgccgtgttcgtgctgcgtatccagaaggtgaagtagccgctgcgagtgcctatctccgtttcaaggggctgattttgactttgcggaacatctacttccgtttcaaggggctgatgccaaagtagccactggttaaaaacggcggaatagtgatagaacaatgccatttctatctgcgttccgccagttgaacagccccttgaaacggaagtagacctccggcaaacgccaaatcagccccttgaagctgattttgactcagcatcatgcagcgcagctatatcctcagtgcgggtatactattccgggccgtcacgacgacgcctatggaacgcacgcatggcaaagagagaaacatgagtcagcccgacaccgacacggcggcacagtcgccgtcctcgcagcaggaaccgcagattcagacggatggccgtcaaaaccagccggaacaggtgaaccaaccagcgcaaatcagccagtccgagtcgccacatgacggcaaaggcgagcacgcgctgcataccaacctgaagcgcggcatggaatcccgccacctgcagatgatctcgttgggcggcgtgatcggcaccggcctgttcctgagctccggatacaccatccagcaggcgggccccatcggcaccattctggcgtatggcatcggcgcgctgatcgtctacctggtcatgctcacgctcggcgaactgtccgtggccatgccggtgaccggctccttccatgtgtatgccgagaagttcatcggccctggcaccggcttcgtgatcgcgatccagtactggctcacatggacggtggcgctcggatccgagttcaccgccgccgggctgctcatgcagcgctggttcccgaacagtcccacatgggcgtggagcgcggcgtgcatcacgctcatcttcaccctgaacgccttgtcggtgcgtttcttcgccgaggcggagttctggttcgcctccatcaaggtgttcgccatctgcgcgttcatcgtcatcggatcgctcgccatcttcggcgtcatcccggtcgccggctaccaacatgccccgatgttcggcaatctcatcaaggatggcgtcttccccaacggcttcatgccggtgttcgccacgattctgaccgtcaacttcgcgttctccggcaccgaactcatcggcgtgaccgccggtgagacgagggacccgcaaaccgccgtgccgaaagccatccacaccaccctgtggcgtctggtgctcttcttcatcggctcaatcaccgtgatgtgcgcgctgatcccgtggcgccaggccggcgtgggcgaaagcccgttcgtgctcgtcttcaacagcatcggcatcccctatgcgggtgacatcatgaatttcgtggtgctgacggccgtgctttccgcctcgaattccggcctgtacgcctccacgcgcatggtgtggtcgatgggcaacgaaggcatgattccgcgctggttcgccaaaacgaaccgtcgcggcgtgccgatgctcgccttgtgcgccgcgatggccggtggcctgctggcgctcctgtcttccgtgatcgccgcctcgactgtgtacctggtgctggtggcgctttccggcctgtccgccgtggtggtgtggatcgccatcgcctactgccagatcgtgttccgtcgccgttggctggagtccggccattccaccagcgaactcaaataccgcacgcccggctatccgtacgtgtcttgggcggcgttcatcctgtgcaccgcatcgttcgtattggtgattttcgacgtggagcaacggttcgcgctcgtggccgagctcgtgttcatcgtggcctgctatggggcgtatttcctgcaacagtgggtacgcaagcgcaaaaaggcgaccgaggccgacgacctcgatacgctttgggtcgcgcgtgactgaacggctcgcgacctaccggcgcaccgctattcgcgccgtgaacgtgcactgatccaacgcaatgccagacccagcaaatccacaccgccacgattgcccatgatgtgggtttgagcgcggccggggagaacggcagcacctgcaggccaatgatgattaagccgacggccagcagcgaagctgagatgaccataccgaacttcttccagtcaaggccttcgcttgcctcttcggcactctgcggaatcgtgtcgaaaccggtgtagaagagcggcgtcatcaccagcactccgggcagaaacgacccgaccatggtaaccgcgccggacgtcgagccgatcggcagcagaaacacggcgcccagcacgaaggcaatcatcgcctcgaccgggccaccgccgacgatcatccagtcaccgaccagcagcacccatacggtgccgatgattgcgccgaatcccatggtgaagtagttccacaggctcagcgatctgaccatgccgccgtcgtcgccgctgccatcggcactactgtcgccgttgccgttgttaccatcctcgtgcacaggaatagcggcactgggcaggccagtcgattccaccaaactggccgtcatcgtgcttgacgggctgaatgccgtggatgcggcgaccatgaccgagcctcccttaattcggcctgactgtgatgataacgccgttcacgatatgccgtattatgaacgcagtgagagcccgcttcaccggccctattcggctcatgaataaacttcgcctatctgcggcactgaacacatgaccataatgtgatacacgtcacttcctgaaatacgtagtcgttatggaatcacccgcacgtttcccgtatcggagctgtgcgatagctgtgagacagggggggtcgtcagatttcggggggagggttccggaaacggtccgactgcaggatgcaccgggccgtgcgacacatgtcaacttgcgtattcacgccaaactcaattgagcaagccgattctcgtaaatggccagaagcggaacaacgccacaccttggatatcgtcgtatggcactagcccattgttgccgtcgtcaagatggtatcgagaatctctggaattggagcgattatcaccaagcacgaacacgttgccgtcagtaacggttacggaaaaaggactgtcgcttggattcacgccggacttaagataagcgctttcatcaatgggtttgccgttgaccgtgatgggctccccggatcccttgcaggcgacggtatcgccgggcagaccgatgacacgtttgattaggtaacgattgctgtcgattatcgacatcagattggtgggaagctgctccccctccatccagtctgcgggatctttgaacacgatgatgtcgccacggtgcagtgcaaagagtctcggagtcaatcgcgaggcaaatacgcggtcgccgatttgcaacgtgtcttccatgctacgggatggaatcacatagacgttgaacacgaaggtgcgtcccagcaacacgaccagcatcaccgcgatcaccgtcagcagatagccgcgaatttcactccaaacggagggctttcgcgcatgtctcctcgactgtccacgcgcttttttgctatgacgccccaccatcatatcctttccgaccggtaacgcaacaccatagtcctcaaaccatgccgttacctacgcccatgtttgagctcagctgtcacaccagcggttcgcgcacgtctagttcacaggcgatgccggtttccttgcgggcccattcggccgcctgcagtgcggcgatgttccataatgcgcacggcactccgccaaggtccggatgcgatgcccagaatgtgaggtcatcagcgtatgcggtgatgaccgattcttccgtgactggcatgatcgtgtggtacagacggtccgcaagcgtggccacgaattcgttggccgcggcgaacgtgtcgataagatgctgttcggcggtcaccggcgggccgaccagctcccaggattcgacgtccgtggcgctccaatgcgcggcttcgccgtccacatcgcgttgcaaagagacgaacagcctggcgaactcatccgaagtcagtcccgtaacccggcgtcgggttgacaattcaatcggagtcatcagataccgttcctttcgcttcgttcattccgttgtctcgctggtttgatttgctgccaaccggtacaaagcctatctcgcacacctcacgatagcccaaaccaccggcatggccatgattgccagccctacgaccagtggccatgaggagccggcgattccggtcagattggtcatggcggcggagacgtcatacatgccatgagccacgatcagcggtgtaatcatgcccatacggcggtacagcagcacggcgagcactgcaatcagcacacgcggtggcgtgccgccggcacaatggccctatcgagcatcgccacatgattcgtgcggtccacaatcgaggcagcatcggtttccattcggttcatgcggccagactatcgcccgttcttgccgattgcctgtaagcaggttcggatagactggcgcgagaacaatgcgagaaagaggcaagaatgacccggaaacggtcacaacagcacgacgcacaacgcaaaccgtcctggcgcgtacgctggaagaccatgagccgagccgtaggcatggaaatccgcgaacacaaaagctcattcgcggtctatgtggtgctgcgcatgctggtgctcgccatggcaatactccagttctttaacggcgactacgaaaatgtgttcctgtgcatcctgacgttgctgttgctgttggcgccggcgttcatccaggtgcagttccgcatcgagctgccttcggtgctggaagtcatcgtgctggtgttcgtgttctcgtccgagattcttggcgagatcagttcgttctatgagatcttcccgttctgggacacggtgctgcataccatgaacggcttcctcgccgcggcgatcggcttctcgctggtcgacctgctcaaccggtccgaccgggtgaagttcgagctttcgcccctgtatctggcgatcgtctccttctgcttctccatgaccatcggcgtgatctgggagttcttcgaattcggcatggaccagttgttcggattcgacatgcagaaagacgccatcgtgcattccatcagctcggtgatgctcgaccccacgcacaccaaccatgcgattcgcatcaacgacatcacccaggtcacggtcaatggccaagacttgggcctcggcggctacctcgacatcggtctgatcgacacgatggaggatcttatcgtcaacttcatcggcgcggtcgtgttctccgtgttcggcttcctgtacgtgaagaaccgcggcaagaaaaactccatcatcagtcggttcgtgccgcgccgcaagtccgccgaccgcgattatctgcgactggtgatcgatggcgggagcgcggctgatgccaaggccaaagccggcggtgccaacgctgacgatagtgctaacgccagtgcggccggcaccgattcagctgatgcagccggagccaaagccggcaatggcgacgccgctccgaccgtcaccgccaagccctgagtacgctctacagcactttcgaagcgtcgaaacggtagtgcccggtgaccgtcatgtgcttcttgaaggcgaagtagtcgttttcgcgctgccgctgcgccatgttgtgaatcacgtacggtgcacgccccgcgatcggccggcggatagccgccctgatagtagccggaatcgtaagccggatggttttcggcgtccttgcgcgcacccgccacgatatccgcgtaatcgtccacaccattgtcattgaaatcgaccgaactggcgactctcgaatacttgcggtccgcctcgccttgtgattcgatgattcatgaacgtattcggctcacactgtaatcgtccgacccaccgctcgcgcctcccaatccgcccggtgcttgaacttgtgggactttggccgtaccgcgaccgcaggcccgccggtttctcgttcagcatgaaacagcgtcttgcgttggtcatcgcgctggtcaatgatccggagttcctgattctcgacgaaccgttcgtggacctcgacccggacggcgtgctccagctcatcgccgtgctcagacagtgggcttccgaccgcagcatcgccatgctcatctccagctgcaggagttgtgcgagcgattcctgttcatcaaaggcggccggcttgcggacgaaaacgagtatttcacggaggcgtgatgccggcgatgcacccggcatctcccctgcctctatctcaatctcccttctattcgcccgccgcagccacggataacgcccgagattttgctcttcgccgttggtgaatccggtgacctgcttgccggcaatcagataactgccatccgacaacgtcatatccaccaatgccgcaggcccatggcacaatgccgccgcgctcccagatgttccggccgacggcgttcaccacagaattgttggggaaatcccacatcacaccgtgaccgccaacgaatagcaccgcatcatatcggttcgcgtttacttgagccaaggcgcgcgtattcactagctggcgtgatatatccgcatcatgcagaaattgctcttgcacagggtcaccgggatgacggccagcctgcggcggtacgccaccagcgatggatgcaaggcccacagtgaagcccattcgtctgaacacctgccaaggatgtgcggcctcatcaacataaaagccagtaggtctcacacctcccaaatcggagtgactgatcaacaccaacagcacgtgtttggcatcattgttttcgctcatacaatttgctctttcatttgataattgcaattcaacgccatcgcaaatccggaacatccgtcgaacggataagccgcgcaatggcccaattatcatggccgaagcccaacggcttggtccaatagcttttttcaatacggggcataggtttttgcatgatggaaatgcccatcatcagcattacccccgtgcccattacctccgtcatagccaatacgtcgtcgggaaagtcatacaaagatgcgagatacagtaatcgaacaaatgttcgactgtcctgataaactggatgcataatttggcgacgccaacgacatgatttacagacagccgaaaaagagaggcaatctcatgactggcgaggaactgaagcagcagattgctttgtacgaaagcgcggaccacaccgtgcacctcgatgtgaaggtggacgaggatacggtgtggcttaacagaaagcaattggccttgctgtttggccgcgatatcaaaacaatcggcaagcatgtcggcaatgcattgagggacgagctcaatggattttcagttgtcgcagaatttgcgacaactgcatctgacggtaagacataccaagtcgagcattacaacttggatatgatcctgtcggtcggataccgcgtcaaatccaaggaaggcgtctattcccggcgatgggccaactcagttctgaagcagcatctcgttgatggttatatcatcaatcgcaagcggcttgacgcacttcacgccgtcgtcaaggtgctatcgaggtccaccgaaccggaaattgctggcaccgcagagatcttggaacgatatttgccgagtcttgtgctgcttaacgactatgacacaggcaatgtccctatacccaagggcgacgagtcccagtgggtcttgacctatgaggacgcgatgctgttcatccggtcgatgccgttctacacgcaatccgatctgttcgggagggaacgcaacggttcgttccaaggaatcgtcgcaggactctaccagacgttcggaggcgaagaactgtaccgttccacccgggagaaagccgcgaacctgctgtatcaagttgtcaaggatcacccgttctccgacggcaataaacgttgtgccgccgcactgttcgtgtatttcctgaacggcaacagtataccgggcgacgatgactcccctgcttgtggagggtaacgccttggcggcgatgacactgatgattgcgctgtccgcacctgcggggaaggacacgatgatcgccttggtcgagaacttccttatacggcatgaatcgcaggagatcaattgagagaccgtcaatgaagggtgcacatcaatcacgttctagcattgcgcgactatctgtacgagtcgtctgaacgatctgctgggagtgctcttcgcggaaaaccaacagcagaccggaggccgcatccactatgtgttgttcaacccttgggccgtgcgcagcaatgaggcattgaacagtttcgattcgccactgatgaagctgctggcgcgtgccatttacgccattgtgggcgtcagcgtcgaggaggcgattgcccccatcacccacttgatcgacaacccgccgcacaccgcgctgtcagcgttcatcaagaccaaacccgtcgatctcactatgaacaccttcgacaggggaacggcggttcggttggacgatatcaccaaaaagctgctgaatcgctagctgtcatagcacaaggccttaggcagaacacccggaaatcgaatgggtagatggatcgtgtctccccttgacttccggcaagcgcacgccaatcatggggcgtatgggtattgcaatcaaacgtatatatgaagagccgactgcgtcagacgggtatcgggtgctggtggatcgcctgtggcctcgcggcatgacgaaagagcgtgcggcgttggacctgtggctgaaggacgtcgctccctctcccctcctgcgcaaatggttcggccatgaccccgccaaattcgcggaattccgcatgcgttacatcgccgagctcgacgccaatgccgccgtggacaatctgcgccacatctgcgcggagcatcccgacgtgaccctgctctatgccgccaaggacccgcatatcaatcacgccctcgtactgcgcgattatcttaactgaatattgactcaggacgaccgtcgtttcagtccatctgctagattctcgccgattttcgtatctttgaatcgaagtgcacagtcgtcactccttggattgccaagtaaagggatgcctccaaaccaaatcaatccgtcatcgattatggcaaaatcggaacacgattcgacggtccggacaatgcacccaatagcacgcagccgattaatattccgttctattcgtgttctggttgccaccgcagcagtcgccggcaaacggacataaacttcgatgagcgctttcctgtcggccagtcggagcaattcatcgtcaattgcgctgagtccctgttgtgatacatattcagccgagataatcagggaacgtgcgcaaccggcaatatccttgcggagtatctctgcataattcgtggctgtaacgatgctgccttcgaataatccgtcagaccgggtgtcgagcaacgcatccgcagcatcttcgccctgcgtcgcggccgtcatgcaagcgcgcaacgcttccgcctttgcactgagcatgtccattttgatgctcctatacattgtcaagcgtttgggtgtgttgttttgggttggttgtcga

SEQ ID NO: 1246 - DNA, 42725 bp, Unknown
  R81_24m  MAG No. k141_29811
gatggcccatatcgcgccggaccgcggcccacgagctggactccggatcgccattcgcgaattcgatgaggtccaggtagtcctgaatcacattgttgcggaaagtggccgaattgatatccatgtggcgcggatcgcggccgggcgactggcatgcgatgccggcgaacagagtgggcagcggcttggccttgaggtcctcgcacaggcagaaatactcgtagaagccgatctgatagctctgcgaatagctggaaccatccggcatcttgaacgaccacatcgaatactgttggcgtcgcgcggccagggagccgacggtatccttccagcgatattcattgccgggcgtcacaccttcgacgatgcagccgccggggaatcgcagaaacgctggatgcaacgcctgaatggtttccaccagatcgcggcgcagcttgccgtaacgccatttcgggtcgcccgcgccccaatagtccgcatccatgaactgcaccagatccagatcgaacgtggtgcgttcgccggcgtcaatggtgatacgcagcttgccgtaatcggtgttcaggccggttacgtcggcgttgaaccggtaccagccgtcacggccgatggcgatggcaccatccgacgaatccggactgatcgaaacgccggaatcctgcgcattggcaccatcgtcctgcctcagaccggtctcttccgtatcgtcaagcggatctgcgtccacgatatacgacaatcgagtggtgctggtgagcggcagaccgtacctatcgaccacgccgacggacagcttcgcccgcccatgaaccggacgtaccgcgagactgacggaataggtgtggtcggcgacgatggagaacgcgggctcgcccccgttgtcgccgcctccgttatagccgaggttttccagatatgcagggccggtttcggaaggaacatcggacgtgatgcgagcgtatcggctatgtgcgtgaattggcggggcggggcagtcggtggtcacccgctggccgtgaatcccgcgtatctcactgccgaggctggcggcggagcagttgatgaaatcccagaaacgcagggaatcggcctgtgtacgccatcgttcggcgccggccatacgccacgtgtgatggtcgagatagacgccgtcaaaactgtagttgttcaccatgttggcgttcagcccgccatccgcaccatggttgatgtcctcgaagaacacgccgtacagccgcccgcttgtgtgatgggtggggcttcccacgctaatccgcaccatggttttgattgtagagggaatggagcggaaaggtaaacggaagagttcgctcaccgttcatgttgcggtcaatccaagtcgactgttcgccggtatacagccggtaccctcgaaacaggaatggaaaatacggacgactaggagcgcggctgtgcaatcctcggtgggaatacgtgagcgcattgaccacgtgtatccgtcgctgcgtccggcggagcgcgccgtggcccagtatattcgggatcatatcgaggaggcggccgacctgaccgtcggccagatggccgacatcgcccacgtcagccagccgacggtgattcgtttcgcccgcaagctcggtttcggcggttaccgtgaactgcggtacgtgttgcgccatccggccgccgagcacaaagtgaccttcaatccgttggctggattcgatctgaatccgtgggatggcgaagatgagattcccggcaaagcggcctatggcgcgaaggcgctgatcgatgagctgcacagtgcgttggaccccaaggcctatcgcaaggcggtcgccctactcgccgaatcggagttcatcgatattttcggcgtggagaactcgttgacaccggcgatggatctgttcaccaagctcggctatctgggactgacatgccgtctcaataccgacgcttacctgcagcagatcggtgccgggcacctgccccacggcgctgtggccgtcgccttctcccattcgggcagttcggcggatacggtcaaagcgttgcgattggcgaaatcgcatggcgcgaaaaccatcgccataaccaatgccatcggcgcgccgctggccagctgggccgacgtgacgttgctgacgggtcgtgactcgcacacgatctatggcaatgcgattttctcgcgcgtggccgataccgcgctcgtggacatgctgtacatgggcgtgattctgtccgactacggccgtttctccaccgcgctcgacgaatccggtcgcatgattcgcgatcgcgtattcgagaactgagctgctgctttatcgtgccttgggctgtattgctctggtcgttgccgcttcgttgtcgccctggtcgctaccgtcctgaggcatgtgccagcgaatacgtagtggacttggcgtgcgtatgacgttcgatcttgccgctcaactccagctggtccaagagctgcgtcatctgatccttgttcaggccaagcgctttctgcatggttttacggctgagcttcacgccgcggaacgcgaggaaattgagcgtgaactgctccaacgtttgaggcgacggttccagcgttgccgtatcgagcgggcgggtactgacctggtcgtcaccgtccgggcgctcgccaaatccactgccgagaatcagcgtctgcaatggcgcgcagccgatgatgcgtgcgccggccaaagcatctgcggcgttatccgtcatgcgctgaatcgtggggaatgagtacattttggcgcgctgcgcttcgtcagtggtgctgggcgcggcggaagcatcggtatcggtccgatgcaaggatgcagcctcggccgagaccgggatgggcagcaccatcgccaccgaagtggggcccacgcgcagttgcggactgaccgcgctctgcgcgtaggcgtccataatgcgttgaatgccggtaccgcagttctcgcagaggcccaaatcggcgaacaattcagccaaacgcggggtgcgtggctggcatacgccgttgagcagatcgttgatttccaaaccatcggtcaggccgccgagcgagacgatttccaggcgggaatcgaagatattgatcagtgtggggccggagtatgtgtaatcgcgatgttccagtgcgttgaccaatgcttcgcgcagggctatggccgggtattggccggattcgttgatgccgttcagcagggcgctggcttggtcgagctggcgcagcaccgagccggtgaatgtgtgacgttcgcgaatggcgtttttgccattgccctcgaaaatggtggccttgataacgaacgggcattggttggacagcagggtggcaagcgacgattcggtggcgctggtgaaggtgttgttggtgccggtgttggtgatgctgccggcgggggcattgccggcatcggcagagacggatgcagccatgttggtcacaaccgggctttcccaatccctgccttcactggcaaaacgaccctgtgcgtatgtgaaagtgagctcaccactatcgcctgcgacggtctggcccgatgcggcgtgatctacgttgctctccgttgtccccatatcgccgatggtaccggtgcaagccgacgttacgccgaggtgttttacacccctacggctagacttacatgagtttggccccgtagctcagctggatagagcatgtgacttctaatctcaaggtcgacggttcgagcccgtccggggtcacgatgcaataaacccttggtccctcatcgtctgtgggggccaggggcttttgagtattatgccggtctgggtccgtctggagcctgaactgtcgaccttgagatcagcggttatatgcttatcactgccatccgggaacacccttaaggggtgcggctcctgcataacggttatacactgacttgagatgtgctggataataaccagctatcgcgcgtccgccaatggcgacgaacgaaggaagaagggcccgtgccgcgagcaatcatcgaggtaagaaacctacgcaaggaataccccgtcgaggatgagacggtggtggcgcttgaccgtgtcaatctcagtatcccgcaaggccagatctgctgcattttcggcgaatccggctccggcaaatccacgctgctcaaccagttggccggcatggaaaaaccgacgcgcggcggcgtgcgcatcggcggcgtacccgtcagcaaactcgacgagcgtgagctggcggccttccgccagaagcatctcggcttcgtattccagtcgtacaacctgctgcccaatctgaccgcgctcgaaaacgtggcaatgccgctgatgttccgcggcgtgcccaaggaacagcgcgaacgtgcggcgcgtggcgtactcaaacgagtcgggctcggccatcgtctcagccattacccgcgccagatgtcgggcggccaacagcagcgcgtcggcatcgcccgggcgtttgtgaccaagcccgaggtggtgttcgccgatgagccgaccggcaaccttgactccaaaaccaaaaccgaggtcatgacgatgatctgcgcattcgcccatgacttcaaccagaccatcgtgctggtcacacacgatccgcagatggcctcatacgccgaccgcattgtcaccttgctcgatggccgcatcaccagcgatcggctcaacaccgacctttcccgcccaactgttccgtccacgccgtccgccccaaccacaccaactacaccgtccacgccgtccgcccatagaacccaaggaactgaccgatgaagcacctctcccaccacaccatcgccatcatcgtcgcgttgctttccacgctgtcactggcacttgccgtcatctcccttccgcatcaggcgtacgcggtcgacggcacagacggcacaagcggcacgaacagtacgtctcagggaagcgacggcgattccgcgccgatcgccggaccggtgcccaacatcatcatcaccaacttcgcgtatggaggtgattccgtggccgccggatccaaattcaatctcgacttcaccttccagaacaaggggcaggtggcggtgacgaacatggtcgtcaccgtggacggcggcgagagcttcgccatcgcgggaggcacgaacacgttctacgtcgacgcgctgtgggccggttacgccatgacgcaaagcgtgccgatgcaggcgctcgcctccgcgaaaagcggtgcccagtccgtgaccgtgaacttccgatacgagtatgtggacgccagcgcccgctcctcaagccagtctgacgtcaagatttccgtgccgatcagtcagcctgaccggttcgaaatcagtgatcccgtagtgcccgaccaggtgatcgccggccaggaaaacacggtcacgatggaatatgtgaacaagggcaaaggcgatatcgccaacgtcgaggccacgatggagggcgaaggtttcgatgccacgatgaaaacccagtacgtgggcaatgtggcttccggcgccaccggcacgattggttacgccttcacaccgcacgcgtcaggcgagctgaagaccacgctcaaagtcacgtacgaggattccgacggacagaccaagaccaaggaattcccgctcaccatacccgtaaccgatatgcagccgatggatgattccggcatggccgatccgaacatggaccagaacgccaatcagggattgccggtgctggtgtatgtggtcatcgtcgtgatcgccgtggtcattatcgtggtgattgtgctgctggtgcgtcgcaggcgcaagcagaaggccaagaagaacgatattgatgaggactgggatgattggtccgaaggcaaggatgataagaccgataccggcgtgacggatggtgctgcggcagacaccgctcctatcacaccagtcaccccagcctcatcagtcgcaccagccggctcatcccacaaggcctgaaaggcccgaccatgcgattcggcgacatactgcggctctgcagacaaaacctatggcggcgtaaatcccgtacgattctgaccgtgctgggcgttatcgtcggctgctgctcgattgtgctcatggtctctttgggccaaggcattaacgagcagaacgagaagatgctcaaatcgatgggcgatctgtccatcgtcaccgtgtacaccaacggttatgccggtccgatggacgatggcggctcgtccaagatgggcgataccaagctcgacgacaaggccgtggaatccttccgcgcgatgagcggcgtatccggcgtgacgccgatgatgaacttcccttataacgtgacggccagagcaggcgcgggcggccgttacatctatgattacgtgcagatcatgggcatcgacatgacccagctcgaccagatgggctacaagctcgtcggtggcgagaaaccggtcaaaaaagaccaggtgcttgccggcgaatggttcgcctatggtttcatggacaccctgaagaacggcgaacaacgcaccagcacacgtggcggtcagtattcctcatgcacgtttaaccaggccaccggccagtgcgaggaagatcaggacgaagatccgttcttcgacccgctcaccacgcaaatcagtctgaccaccggcaccaattatcagggcgaccagtacagcatgaacatgtacggcggcggtggcggcggcacaggcggcgcgggcggcggtggcggcgcgggcggcgcaagcggcagcgccgcgggtcagtcggaaaacgtcaccctcgatgtgcgggcttccggcattgtggcgggcgactacaacaagggctatgccacctccgacggtctggtcatggatttgcaggcgttgaaggaactggccgccaaagtcgatccagccgccgccaaaaaagccaccgcctatgatcaagtgctggtcaaggccgccgacctcaagtccgtgcccgaagtcgaatcacagatcaaagcgttgggctacgagacctcctcctatgaagacatgcgtaagtcgttggaagaacagtcgcgcgcgattcagctgattctgggcggtatcggtgcggtttcgctgttggttgcggccatcggcatcgccaacacaatggttatgtccgtaaccgagcgcacgcgcgagatcggcattatgaaggcgcttggctgctacgttcgtgacattcgcgtcatgtttcttgcggaggccggcgcgatcggattcttcggcggattgatcggctgcgtgctgagcggactgatatcgctgggcatcaacgttgtcggcgcgttgtatgcgggcggcatgagcggcggcatgtctggcggtatggtcagcggtgccggcgggggctccggcgaccataccggtggcggaacatctatctggaccatactctggcaggcgatagttggtggcgagaatgtgacccgttattcggtgattccgtggtggctgttcctgttcgccgtgctgttttccgcgctgatcggcttgctattcggcttcggcccggccaataaagccgttaaaatcccggccctagacgccatcaaaaacaacgagtgatcgcctctgtcacctgctccaccgttagtccataacgttcgttcagttcgcccagcgacacgcggtcggtaaattccttggctgcgccgaagttcagcacacgaggattacggctgccgtccgagacatgatgattcgcatagtatgcggtcactttctcgccccagccgccttcaagctgcccgtcttcaagggtgatgacctgctggtggccatcacgcaacgactccagtacgtctgaatccagcgacgtgcactggcgcgggtcgataaccgttgccgtgatgccataatcgtcagacaatgcggcggccgtctgctccgccaacggatacgcattgcccagtccgatgatcgcgacttgcgagcccgtctgattgacccgccaatccagcatgggacgcgcaccggcatgctgagccgttacgctaacggtcccgcggactgttgcggcagatatgcccccgctggcggagctggcggagctggcggaggctggcagcgaagctgactgggggcggtcagcaatctgcccacccgtcaccggcagcagcgtcgcatcccgttccgccgccagaatcgcctcgcccggcacccgaatcaccgccggaccagcaggggcgtccgccgaaccggccggcgcggtagcccatgccaaatcagccagatagtcgcgagccgaagtcggcaccagcatcgtaacccctggaatattggagaacatcgtcacgtcatatgcgccggaatgcgtattgtccgaaccggacaagccgcccagaaaatcaagtaccgtgactcgcgaacggttcaggctcatctcctggaagaactggtcgtaggcgcgctggaagaaggacgccgtggtggccaccaccggcgtgccacccgcccgtgcgatgccggcggcatacgccacggcatgcgattcggtgatgcccgtgtccacgtaatgcgaacccgcgcgttcgcggaattcgtgggtgatgccgttggagcccggcgtggcgggggagatgaccacgagtcctggctcggcggcgaaacgcggttcgagcgcggccatcgccattttgccgtaatgcttgcgcggatcgtccggcttgccgattgcggcatccggattctgccaatgcgaggcctcgcactggccctcatgcggttcatggtcggacaggttgcagtgatccgaatgccacggctcgctgtgcagcacgttgctcgtggggcgcacgccggtgtcggagactgccggatccagctcatggacgttaccggccgaggccgagggtgcgccggccacgtgatcggcgccgtcatatcccgcgcccttcagcgtgtggatatggaccaccaccggatggtcgatatcgcgcacttcctcgaaagccgcgaccagcgcggaaacatcgttgccggcctccacataccgataatccaagccaaacgcgttgaacagattcggctgggcggtgccgccggacgcgcgcaggcgggcgagcggaccgtacatgccaccgaaatcgccggcaatcgacatctcattgtcgttgaacacaatgatgagattgccgccctgctcagccgcgttgttcagtccttcaaacgccacgcccgaactgagcgaaccgtcgccgatcacggcgatcacattgccgatgccgctgttcgggccttccatatcgcgggttttcgccaaaccgcaagccagtgaaatcgaggtaccggtgtggccgagcacgaactggtcgtgttcgctttcgtcggggttggtgaagccagtcacctcgctgaaacggtccgggtccagataggcgtcggcgcggcccgtgagcatcttatgcacgtagctttggtgggacacgtcgaacacgatacggtcgcacggcgagtcgaatacgcgatgcagggccaccgtggcctccaccatgcccagattggagccgatatgaccgccgtgttggtggccatatgccagcagcgtggcgcgaatctcacggcagagttcggcgagctcgtcgggggcaagggccttgacatcggccgggctggcaatgcggctcagcagatgggagtcgtcgccatgggaaggggtaatgctcggggggatgtcgtgaaggcgcgcggccccctcggcagcaccggagacggcgaaggaatcgcttgaatcaaatccgtttcctgacgcgttgcgcataccctcgaatctcccttcgctagtctttccgaagttgaatgctaacgcccggcattgtccgaggtccacatgacgaatcaatgcccccaacatctccgtaaatgggtgattcgttcgctgcgcgatgtgggacaatgaatgcggtaattccttttgataccaaggagcgcgcaatgaaggccgtatacgcatccaccgtcaaccatgacgatccgcttgccgcgttggcggtgggcgagcagcccgaacctcaggcccgcccgttctggtcgaccgtttcggtgcgcgcggtgaccgtaaaccatcacgacgtctggtcgctacagggtgtgggtctcgccgccgaacagacgccgatgatcctgggcaccgatgccgtgggcattctggacgaggacatccccggcaagcatgggctcaaggccggcagcgaagtggtgctgtacacgttcgtcggcaccgatggggcgggcgtggccccgggcgagcgccgtacgatcctctccgagaaataccccggcacgatggccgagaagacttccgtgccgtccgccaacgtgttcgccaagcccgcaaaccttaccacggccgaggcggccgcactcggcaccagctggctgaccgcctactcgctgttgttcgaggccgccggcatcaagccgggcgactccgtgctcatccagggcgcgggcggcggcgtatccactgcggccatccaactcgcccatgccgccggtctggaagtgttcgtcacctcgcgtgacgcggacaagcgcgccaaagcgctgaaacttggcgcgaacgccgcgctggagaccggtgcgcggttgccgcgcaaggtcgacgcggtgatcgagtccgtgggggcggccacatggggccattcggtgcggtcggtgcgccccggcggcaccatcgccatctgcggcgccaccaccggcgaccagcccggtgcggagctcacgcgactgttcttccaggacatccgcgtgcagggctgcaccatgggttcgcgcgaggatttcgcccggctgctgcgcttcgtggagcacgccgacctgcatccggtgatcgattccgtggtcagcgggttggacgccgcccccgaggcgttcgccagaatgatcgccggcgacatgttcggcaagatcgttattgagctgtaagcctcacagaattatgtattgagaacgattcgctgcgtggcttaactccgctatcaggagtacagtgggccttattctcaataactagggagtaaatgataatggcaaatgaatccaagcccgaagtcgcagtggtcatgggatcggccagcgactgggagaccatgaagcgcgcctgcgatattctcgaccagttcggcgtcgcctaccacaagcaggtcatctccgcgcaccgcacgcccgagctcatggccgagttcgcgcacaacgcccgcgccaatggcctgaaggtcattatcgccggtgccggcggtgccgcccacctgccgggcatgatcgccgcgcagaccacactgcccgtaatcggcgtgcccgtgcgctcccacgccctgtccggctgggattcgctgctgtccatcgtgcagatgcccggcggcattccggtggccaccaccgccgtcggcaactccggtgccaccaacgccggcctgctcgccgtgcagatgctctccgccttcgagcccgaactggccgacaagcttgaggattaccgtaacgaactgaaagaaaaggtggctgaatccaatgcccagcttgtctgaggaaacaggcggtcgtgtttcgatgctgatgccgggatcgaccatcggcatcatcggcggcggccagctcggccgcatgatggctttgtccgcccgctacatgggcttccgtgtcggcgtgcttgacccgacgccgaactgcccgaccggtcaggtggccgacttccagatcaccgccgaatacgatgacaaaaccgccatccatgatctggccgtgcagtccgacgtgctcacctacgagttcgagaacgtggacgccgatgccatcgacgaggtgcgcggcatcaccgccaccccgcagggcaccgacctgctgcgcgtgacccagcaccgcgtgcacgagaagcagttcatcaacgaccacggcaccgccaccgcaccgtggcgcgccgtcaacaacttcgatgagcttgacgccgcattggatgatattcattatccggccgtgctgaagaccgtgtccggcggctacgacggccacggtcagctcgtgctgcgttccgacgccgacttggagaagatccgctcccgttccgaccgtggtggcggcttcccgccgagcatcctggaaggcttcgtcgacttcgcattcgaggcttcgatcctggtctccggcaacggcaaggacttcgtcaccttccccatcgtgcgtaacgagcaccgcaacaacatcctgcacatgaccatcgcccccgccgaagtgtccgaacatgtggctcgcgaagcgcatgaactggcgattcgcttggccaagggcttcgaactggctggcacgctggccatcgaactgttcatcaccaaggacgatcaggtcatcgtcaacgagctcgccccgcgcccgcacaactccggccactacaccatcgaggcctgctcgatggaccagttcgacgcccacatccgcggcatcgccggctggcccatgcccaagcccaagctgctctcgccggccgtgatggtcaacgtactcggccagcatgtggagccgacgcgcgcgctgatcgccacccacccggagtggaatgtgcacgactacggcaaggccgaagtgcgccacgaccgcaagatgggccacatcaccgtgctcaccgacaaccctgatgccacggttgctgaccttgaggccaccggctgctgggacgacctgaaaaagaaggcgtgaccttatcgatggttgaacatatcgaacgccagaccaagcagaaggacgcgattcgcgccgccttggccgactgtgaggagttcatctccgctcaggacctgcaccgcaggctggaggacgaaggctcgaaaatcggcttggccaccgtgtaccgccagctcaacgccttggccgatgccggtgccgccgacacgatccgcctggacggccagcagctgttccgcctatgcggcgacgacggacatcaccaccacttggtgtgcaagcggtgcggcaaaaccgtggaaatcgacccgcccagcgaggcttggctgcgcaaagtggccgacggccacggcttcaccgtcgaatcccacaccctggaggtcttcggactatgccctgattgccaaaaggagcagaaagcgcagaaggctcagaaagcagtgagcgaataattgaatgggatcggcttcaaagccgatcccatttgctattccgctgctattccaccaacttcagggcgccgagcatgtcgaccgtcttcaaccgccggtagaccagcacgccgagtccgccgagcaccttgatggtcggcagttcgcggatacgttcggagacgttgagattcgtcagattgtagaggatcaccacggccagcagctcagccgcgagaatcagcacttccatgatctgatccggcaagtcgacgattgtggccacctgtttcttcgaagtcgtgttctgcacaatgcccttcgcgccgtccaactttatgagcttggcgctacgcgactccacattggaggtctcatggttcttgagcctcaccatataggcgttcgactggtactgttcgccgaacacgtgcttacagccacccgaagtcatgaacatgaaatgcccgatatgcatttcggtgatgccgtccacgcgcaccttgcgctcggtaccgctcgaatcggtgacggtaatcgtgtcgcctaccttggcgtccatcatccccgccatacgttcggagatgatcgcaccacggtcggtgagcacctgcggcttgtgcccggtgcgcgaacgcagtgatgtagtcgccgaaattgtaggcgtcatcagtggcgatcagggtaatcgactgtttgtcgttctccttgccggccactttcgacatctcctcgtagtagatcggcgcggactcggagacggccccgcccctcatcgccttggccacttcggcgcgctgcgaataatgttttcgtcagctttggtcaggccataatcgctgatgacggttatgtcagcgagattgttctgattaaagaagtcggtgccggttatttgcatgtccgggccggtgacgaacaggcctacgagcgcaaaggagccaagcgtcatcaggctcacgatggaggcgaatcgacccttggatttggccatggtgacgcgggtgtctttccatagcatgcgctatggaatgacccgttgcgtcggcggttgcgcttgaccttgtgcgcgtggggcgttctgccgggcgcggtataggagtcgtttgctgaatttgcggcggaatcggctgcggagtcggtcgcgggcgtaaggttggtcgtttcggtgaaatcattgagatcggtcatactgcttaccactccagatccttgatatccatcgggtgctcgttcacttcgatcgatttgacgcgcgcgtcatgcatgtggatcacacggtcggcaatcggcgcgatggcggaattgtgcgtcacaatgaccacggtcgcacccttcttacggctctgatcctgcagaatctgcagcacctgcttgccggtgttgtagtccagagcgccagtcggctcgtcgcacagcagaatcttcgggttcgtggccaccgctcgggcgatggccgcgcgccgctgtccgccgcccgaaagctgcgcggggaagttgttgatacggtcctgaagccccacgtcgataagcgcttgagtcggttcctgcgcgtctttcatgattttggaggcgagctccacgttctccttggccgtgaggttggccaccagattgtagaactggaacacgaagccgaggcgttgcgctatgtcaagcgtgagtatgcgttcttcgacgcactgtcccgttcgggcaacgatatgcagatgtatgaccgggtcaaggatgtgttgaagcagatgctgcttgggcaggcggcccgtgtgggtgccgagctgagctacggcggcattccgcgcgcctatgcgctggaaattctggtctccgccgtctcatcgattatctggctatgggtccggcgcggctgcaaggaggcgcccgagcaaatctgcgccatcatcgagaaaaacaaaaccaccgcgcccgtagacatcatacggtaagcgcggtggttcgtgtcggaatctggctcccctccctgagaggagtcaatccgcaggagaaatcggaaacctaaaactcagacagccagctcggccttgagttccttgaggtcggccaggatctcatcgtggcacttctcgttggtgtcgaaggcaaggtggcagaaggcgcactcgtggccttcgcggttctcgtggcaagcgtgcaggcaagccttgcccccgcactcttcggtgtggttgtgctcgcagccggtgtcgtcgcagcagtcgccggtgaagcagcagccgcagcggccacaggcggccacgccgtgctcgtgcttggtggcgtcgaacttggccagcgtgtccttgcagacggcgaaggtgccctcttcggtaacgatctcgtaagcatgctcatcgatggtcttgatagtcattgttgttcctttcagcgtttgttcgtctgcgactgtagggcggcagacggcagcggcgaaagtgggtgaaagtgattatcaggcccattgctgctattaagagcaatgagacctcatgcagttttgtgtcggtaacgggccgattgttggccgagtgtcgacgcctggtataggtggtggcggtaccaatccaaatattggtggaacgacgacgatgagcgtgtctggcgtcggtgctgcgccaagcgttggcaatctaacgatgcgagtggagcttatatcgtcgctattgcgccaaggattggaagggcaccgatgctgaaggccagtagcgtcgggactgcgccattatttgttcgagcgccgacggccagtatcgtctggcgtcgtcagtggtccatcctttggtgaggtgccgacgctgagaggcggttcgatggcatgcttcgccgcacacttggggcacaggtcgaaaatctccagttcgtgggcgatggtctggtacttcaactgcttggtggctttgtcgatccactgctcaagtccgggaatctcgatttcgatggtccgcccgcattcgtggcatacgatgtgatggtggtgatgctggtccgagcactcgcggtagagggcctcgccgttgacgtggattacgtcgagctcgccttgggaggccatcatctgcacattgcggtaggcggtggccgtgccgatgcgcgtgccgcgctcgcgcaggatgtcggtgatttcctgggccgtggcgaatcgggatagtttcgccaggacctgggtgatgaggagtcggggtcgcgtcacgcgtcgagtggtcgcggtttgctcgatgctcatgacgttctgcccctttctgttaacaaatgatattcattatcgttattaaagcaaattagatgcccggcatgttgtcacatgatttgaatcaactggcagaaatcccgcgtttcaacgaggcctgcgcgggatttctgccagttttgagccctataaaggcagagcccccgcgtacctttcgttgtaacgcgggatttctgccgatatggggcgagtcatggcgcagcgcagtgctttccatttcgggagacgcgtcatttactgccagtagaagtagccggtcggggcggctgcggctttgctggccgaccggacctgcagtatcaggccttggcgctcgtggccggcggagccgtaggcgccctgcttgatgacggcgtcgacggtgacccagtcgtgattgtgcggggtgccggccttgccggagctggctatgaacccgaatggggtcatgtcgagaatgcagcaggacatgaactggcgggacagctcgaactcgtccgcgtcgaacgtacgcgacttgctcacaaacccggtgacctgcacatggtaaccgacgtaacgctgcggattatggtcgatctgctcgaaccatgagccgaattcgtcgtcgctgatggtcagggtcttgttcgccgtgtcgagtccgtgcagctgcgaggcgccatcaggcttgtgcgaactgcggggaatggcgatagcgcggccgccggcgtactcgtcgaagccgccgctgccgctgctgggctggaacggcacgacgatcagcagcgccggaataatcaaggcgatcaggaaccgcaaaaccgaacgctccgtggcgtggaacagtccgagccatgctgcggtcgccagcacgaacagcagtaccgcaccgatgatgagatacggcagcgaacgcggcgtggtcagcgtggtgtatgatccgcccaccgccgcataggcgatggccgcgcccagcgccgcgaaacacagcgcctccacgcggtcggggagtgtgactttgcgcttcatggctacgctcccatcaccagatgggcggcaatcgcggcgaggaagcaggccgccgccacggtcgcgatgaaccggatgatgaaccgtggccggcattccgtggccagcatcagcgtgttcttgaggtcgagcatcgggccgaagaccaagaaggcaagcatggcggagaccggcagcgcgccaatcatgctggcggcgatcaccgcatcggaagtagagcacagcgaacacaggaacgccagtcccatcgccgccagaatcagtacgatggcaccagcgtcatcgagcgtgcttgaaccgttggtcaacgacgacaatgcggtgcgcatgatggaggcaatgatcgtgccgaacagcagaatcggcatcatccgcataaagtcgtcatgcgtatgccgaatgaaatgcgtgaaccgctccaatccgcgccccgtgcccccgccggcgggggctgtcggcaaagccgactgggggtggttctcaggcgaatcacccgtcgcccctgcacaatcctcgcaaatcaacgaccgcccaatcgtcagcggcctctcacgcaccgcaggggagcggagcggccacaccgcgaacgacacccccgcgactatcgccactaccatgcccaaccccatgcgggccgccactatccatggtttgtcggtgaatgcgaaccatgtggaccatatcgccatcgggttcatcaccggcaccgcgcacagaaacgtcaccgcacacggcagcggcaggcgtttgcgcatcagattcgcgaacgtgggcaccaccatgcaatcgcacaccggtaggcacaggccggccgccaatgccgcggccagtccgccggccaacgatttcggtatgtggcgggccagagaatcggtgctgacgaacgtgctgaccacggccgacatcatcgcgcccagcagcatgaacggaatcgcctgcaggataagccccgcggcaccggtgccgatacgcaccagcggaaccggaaacccacgcgactcgagcatcgcggaagccgcaatcaggaacgccaccagcggcgtgccgataatcagaaacagatagttcgccgaatggtcctgttgcgcggtgttcacctgttccgtgcgctgcgtgcgaggttctttcatgcgaatatcacctgccatatcgccgtcatattagcaccgtacgcatgatagtggtcgagataatatgcgagttccccgcataccgatggtacacatcgatatgcggggaactttgcacatggttgtctgggccgatggcgaatcggtgggccagcatctcggtggccacttcctccttgctcatggatgccgggtaatacgtgggccagttgtccatttccttgagggtttcttcctgtcgttgaagtgacgttgcacggtggcggcggtggcagaaccggccccggccttgtccgcgtagacggcgttgatggcttcggcggccttcagcacggcttccgggctgaaccacaggtgcgggttcgtagcaccatggtggtgatggcggccttcttcgccctcggcgtggtcgtgggaatgctcgtgctcgtcggtggcggtgacgcccatgaggccgcccacgttcacgatggtctggcgtttcttgtcaagctgcgccttttccgcccagccgtcgtagccggcgccgttgagcaccacgatgtctgccttggcgagcttggccagatcggatgcggtggcctcataaaacggcggttcgccccggcaggtgacggcatacggaaggaaatgggagaaagaacgtacgccgccggcctgtggagcggaccgtcgagttgttgttacgagacttgatggattgcggaatccacgatgttggttatggcttcatatacccctttcgtacggctgcggccagattctgcggaacctgaaccacttcgccttcaggcgttctgaccgtggccagctgaggcaccttggccttccagttggctcggcgcgaatgcgtgtttgctcgggacgccttgtacttgggcagtgccatcagccttgcctcgccttccagtgggggttcttcttgttgattacatacagatggccgcgccggcggacgacataggagccatccttgcgggccaatgagcggaccgatgccttgaccttcatgtccgttcctttcttcttgtcttacggtctttgcggaatgtgcggcgaatcacttgcgcccgtaacgagcgttgaacttctgcacctgaccggcggcgtcgatcaccacattcttgccggtgtagaacgggtggctgtagctggacacctccacattgacgagcgggtaggtgttgccgtcctcccagtcgatggtcggcaggtttacggccttggccaccagtgtggacttggtgaggaagtacttgtcggcggagcggtcatagaagaccacggggccgtattcggggtggatgccctcttgcatggttatggacctttggttgtgtggtgttgtgtggtgatatggatgagaatggcgtcggacgcgcgggtggaatccggtgaattgagatggcctgagacggcctgacggccggttgtgccggcccgatcaccagctggatttcaccacgccgggcagtttgcccttgtgcgccttctcacgcagattgatacgtgacaggccgaacttgcggttgtaggcgcgcgggcggccgtcgatggaatcgcggttgcgcagacgggtggggctggcgtcgcgggggagggcctgcagcttgcgcatcgcctcggcgcgttcttcggcggtcagatgagggttgacgctgtcgcgcttgtgttcggcgcggcgttcggcatacttggcgaccatgcgttcgcgctgcaattgtcggttgatcttactggttttggccatgtccggctccttgataaggctccggggcgcgggaatcgcgccggccggagctgggacgagtgcattcgttcattgggcgcatgccgcaaggttcggaagatgagttcatgaaatggtgatagaggaaaccgccggaatgccaacaaggaaacgatttcggcgggtgcttaagcctcttcctcgcctcgcgactggtgtccaatgaacgaacagatggattagcgggtctctcggaagagcacccgtttgcggactaccggatcgaacttggtgagctcaagacggtccggcgtattacgacgattcttggtggtggtgtaggtgaatccggtgccggccgtggacttcagggtgatgaccgggcggattgcggaggatttgcttgccatgagtggtgctttctatgtgtgggtgtcacgctgttatgtcacgtatgtcgcgtacgtcgcggtgccatgtgggtgatgcagctcgttagcgcggtttgttgcgcggttacgcgccggcacagtggcgggcctactgactgcccgagcatgggggtgatgccgtggccggttcagttgacgttctgatcgcggcggatgcgggcgatcgccgcctcgatgccgatgcggtcgatggtcttgatgcccttggcgctcacggtaagcgtgacgtgccgctgcaaggacggcacccagtaccgcttggactgcaggttcggggcgaaggttcggcgtgttttcctgtgcgagtgggagacgcggttgccgaccccggcgcgtgttcccagaatttgacatgttttggacatgcctgcaactatatcataatgataaccattatcaaatcagaaaggctgtcatgattcatccggcattgcaatcacagggaaacgcggaggggcgcacgcccgtggtgctgctcaccggcgccgaccgcctgagcctggactccgtggcgttctcgttggtcgattccttcccgtccgtatgctcgattgcttatgacgtgcgcccgaacgaagccgtggaatccggtctcgatatcgtgcgcaacgtcgcgaagccccaggcaagcggggtggtgttcggcgagtccgattcgttcgggctcgaggggtgctgcatgagctgcacggtcaaacatgaccttgaacggacgctcggatcgctgcaagggcgggccggcgcgtttctggtctcgctgcctgtgggccttgaggccacgccggtcgcgcagtatctggccgattccttccgtctcaacgagtggggtgagtcgatgttcgtgggtgcggtggccaatgccgtaggccttgacgaattcgaagagcgattctttgacgacgaccgtttgtgcctgtacggcatgggcgaggagaacggcgtctatgacgagcgttcgaccggcgtagtggtctcccgcctgatccgtgaggcctcgtgcgtgctcgaattgccggtcattggtgccggttgcctggcacgccatttggatacagacggggagtgcgcctgccgcgacatcatccgtgcaatcgccttgcgtgatgcgctggtctgtgaggatgcccacaccgtggggctcgtcgacctggtgcaggcgtcggtctgtgccgcgatgccgttgtgacatgtgcggcaaacggcagaacccccgcgtccgaacgaaggtggcgcgggatttctgtcgtttccgaggccttaaatggcagaacccccgcgcgggtatcgttcggacgcggggatactgccgtttcgtctgccgaaaacggcgggatcccgcgttgtcatcgtcggggcgcgggatttccgccggcagcgcgggtgtgcgcgtgcaacacgccgacgtaaatgcaaatgataataattctcaatacatgttattctgtcgtgttgggggccgggcgatgatgcagcaacagcagcatcgcccggccaagcagccgaattagagaggaaaatccaatcatgtccatcatgtccaacgccaagcgcgcgctcgccatcgcggccgccgcggcgaccctgttctcgatggccgcctgcggttccagcaatgccgccggcaacaagtccgattccagcagcgccgcgtcttccggcaagatcgaggtcgtcgcctccatcaaccagtggggttccgtggccgaagacctcggcggcagcaacgtcgaagtcaccaacatcatgaccaagaccaacgttgaggcgcacgattacgagcccaccagccaggatgttgccaagttcggcactgccaaggtggccgtggtcaacggcgccgattacgacccgtgggccaccaaggccgcccagtcgaccaaggccacgctggtcaccgccgccgaaaccgccggcatcaaggaaggcgacaacccgcacgtctggttctccgccaaggtgcgttccagcgctgccgacgccatcaccgccgcctaccagaaggccgacccgagtcacaaggacgactacgccaagctcaacaaagaatggcacgccaaggaagaccagcttgagtccaagatcaaggagacttccgccaagaccgagaacctgccgtacgccgccaccgaatccgtggcctggcacttggccgacgacctcaagatgaccgacgccaccccgaagggctacgcccaggcttccgccaacgagagcgagccgaccccggccgacatcaaggacttccaggacaccctgaagggcggctccatcaagatgctcgtcttcaacagccaggaagccaactccaccaccgaccagatcaccggtgccgccaaggacgtcaacgtgccgatcgtggagctcaccgagcagatgccgaagcagtacaccaacctgctcgactggatgagcgcactggtcgaccagttcgccgccgccgtgaagtaatgcggcggtagccggcaatccgcaacagcaataaggggaataatcaagtcagatagcgaggcgttgcctaggggagaacagaacgcttcgctatcagggaaggctccttatatatcagggtgcttcggggatgtcccgaggcaccctttgcgttagggtgaatagttaggaaacggtaagaaaaatagtggaactatggattttccaaggttcagcggcaacaatatgcccttgaaaagtcccatacggaaacaggcgaatgagcgagaacactagtagtatcaccacagtgaaaccccatttcaagctttgggtcaaaaaggccgaagccaatgaagtcacgccccagcacccccacaagcccttccccggctgggcgtacggcgtgctcttcgttatcttcgacattattgttgtgacggcgctcgaagtgggcgtttcgtccagctccacccgtgtgcaactgtccagtccgaccgtcggattcggcttcgtgagcaagatgtggaccgacggcaatttcgtattcgtactcaacgtgatacttgtcgcgttgctgtacctcatgttgctgatgctgttcaacagattctggacggcaagcatcgtgattcttgcggtcggaatcatcgtggccgccatcgaacatttcaaggtcgagatccgttacgaggccattctgcccgccgacctcggcttccttggctcgaacaccggcaatatgctcaccttcattccggccggcgcgcacgtgaccatcctcgtggcacttggcgcgttcgccgcgctgctcgccctgattctggtgctgcgccacttcgacgggcgcaaaggtcgcatgatccgtacggacaacctgagcctgaacctcacctcccgtctgattctgctgctgctgccgattctggtgttcgcgttgtactgcattcatgtgagcaccaccgattcgctggccaacaagttctcccgcgccttgggggacacgccatccatgtgggattccgtgtatgacgcgcagcgcaacggtccgctcgtggcctttacccgtcagctcaacccgaagatcatggacaagccgagcaactactccgaggagaccatgaagaaggtcgccgctcgctaccagaaggaagcggagacaatcaacgcctcccgcaccaacaacctcactgattcgacagtggtgtacgtgctgtccgaatccttctccgacccgagccgcgtgccgggactgaagaccaataaggattcgatgcccaacatccgcaagatcaaggcgggcaccacctccggcctgatgctctcctccggctacggcggcggtacggccaacctcgaatacatgggactttccggtctgagcatggccaatttcgattcctccctgtccagcccgtaccagcagctggtcccgagccagcattggacccccaccatcaaccagatgtggggtgcgcccgccaactcgctcggctaccatccgtacgagtccagcatgtactcgcgcgctacgaactacaagaagttcgggttctcgcacttctacacgctgaccggtccggacgtgatcaagtatcaggacaagattgacgagtcgccgtacgtctctgataagtcttcctatgattctgcgctggaaggcatcaggtccggcaagacgaacaagttcattcagatcatcaccatgcagaaccacatgccctaccacgagtggtatgagaacaacgactacaccgctgaatctaccacgggtacgccgctgggtgatgatgaacagcagtcgattgagacctatcaaaagggtgtggagattaccgatcaggccactcaggagttcctgaacgaactggatgcgctggataagcccgtcaccgtagtgttctacggcgatcacttgccgggcatctactcgtccgccagcgaggatggcaacaactccttggccctgcacctgaccgattacttcatctggtcgaataaggcttccagctcccaaggcaataaggcaagcgatgcagcctactcttcgccgaacttcttcgtggcacaggccgccgatcacatgaacgccaaggtcagcccgtatctggcgttcctgaccgaaatgcattccaagattgccgctatggaaccgcctgtggtcaacaaggtccaaggctgggatcgtattcccgaaggccagaacatctatctcgaccaaaacggcaacccgatgtccaccgatgacttcgacaaggaaaccaagcagttgcttgccgactacaagctcatccaatacgacatcaccgccggcaaaaactacctcaaagacacagattttatgacgttgccgtaaagcagacagcccggccgaaccgtaatgcggatagctcagtgggctatccgtaggtgaggggagcggctgtgccgcgacggagaatccggaggattttcggtctgtaggcaacgtgcgagccgacaggcgagccagcaaaacgcgggcgaagcccgtccaaaattgctgtaccgttgccatagtgctgtgagctccctctgatgagggagctgtcgaacgaagtgagactgagggagagatcccacagaccaatcactcccgccttacaataaagccatgaagcgcatcgatgtgaatcatggctggcggttccgttcaattggcaaggaccgcgatacggcagcgcggcagccagtcacgctcccgcacgatgcgatgattcacgagtcgcgcgaccctcgcgggccgcacctcgcgattcatcgaacgaggacatgacggcgtggccagctggtcatgggcgggctatgagggccgcgacgccatcgtgcatgtcaccgatgaccgccgcattgtggttgatgcaggcgggcatatcgccgtcggaccttctgccgaagctgtggatgtggaggtacaagtgaactctgtggccgcacaacacgacctgcctgccaatgccgaactgctcggcgtggccagcgccaatcccatcaccgtcgatgaactcgccgacaatacctgcaccacctacttcggccgagcccaagctatttggcgaataccagccgaaacgtctggtattgcctgcagcacaaacgccctcatgccatcgtcatgacggtacgataggtacagtcgatgcccggaaaaccgacccgggcatcctgcgggaaggatgtgccatggtcaatgcggatttcgctcagttgcgtcacgcctacgaatccgggtgtacgcggccattggcttggcgacgggcgcaattggatgcgctatgccgtctggtagcggacaatcgtgatgctttcgtggctgcggccatggccgatttgggcaaacccgcggcggaaaccatactgatggagctgaatctggtggccggcgaggcgcagttcgtccgcaaccggctcggactgtgggccgcgcgccatcccaaggcgatgcattggatgctgcaacccgccgccggctggacgatcgccgagcccaagggcgtggtactcatcatctcgccatggaattacccggtgctgttggctctggagccaatggccgacgcgctcgccgcaggcaacgccatctgcctgaagccctccgagctttcgcccaacacctcgcgcctcatcgccgaactcgtgccgcaatatcttgaccccgagtccgtgtgcgtggtcggaggcgggcccaaggaaaccggcgaactgctgaaatgtccgttcaaccatatcttctacaccggcggcgggcacgtcggcaaaatcgtcatgcgtgcggcggccgagcacctgacaccggtcacgttggaactcggcggcaaatcaccgtgcttcgtggaccgtacggtggatatcaatgtggccgcacgacgtatcgcatggggcaagttcaccaatgccggacagacctgcgtggcacccgattatgtgctcgccacgccggatgtggccgaggctctggccgagcgcatcgccgtagccatcaccgaattctatggcgaagatccgaaggcctcgcctgattttggtcgtattatcaacgatcgtcattttgaacgactgtgcaagctattgccggtcggcaccgtgccgtctgaggagccgagctcgccgctggtacaggtggcatcggcggtaggcgcggccatggatatggtcgggcggcgcttcaatgtcgtggctgccggacgcggaagcgcgggggagacagccggtggtggcaccggtagcgcgaacaatgcggcgaagccggcggccggttcgaatacggcagccgctgatagtgatgcgactgcctcggccgctgttgagccgagcgagattcacaaggtgcccggcgtattcgatccggccgggcgaatcgtttgcggaggcaaggtcgatcgcgccgcccgatatatcgcgcctaccgtgctatacggcacgtcaccggatgcgccggtaatgaaggaggagatcttcggcccgattctgccgatcctggtggttgaggatgccgagtccgcaatccgattcatcaacaagcggtcccggccgttggctgcatatgtgttctcgcgcgatcacgaggttcggctgactttcgaacgtcagaccagctccggagctttgggatattcgttgccgttgggtcacctgctgtccagccgactgccgttcggtggcgtgggcgcgtccggcatcgacgcctaccacggcaaagcaggcttcctcaccttcagccacgtcaaaaccgtggttaccaagccgcagttccccgacactctgcgcctcgtgtacccgcccttcaatgaagccaaggccaaactgttcaacatcatcgccaaattcagctagcgtgatatcgctcgctgatattgggtgatggcgttgtcatagtgacgttcgctgtcccggcagccacgtcaatcgattgattcgtgtaccgggccagatttttctgtcctggtatttgatttcgagtcattttctgcttaccgggacaaaactgacgccgaaagtatcgtccgcgtattacgaaaatggcggaatagtgcggttttgcatggaatggaattccaaatattcctatattcgaggtgttcaactgtcctggtttgcgaaaaagagccgaaatcagctaccgggacagaaaaatctggcccggtagccacgtcaatcgattgacatggccaccgggccaaaaatatgcggcagatgcgccgcttctgttacttcagggctttgaagccgatgtcgtggcggtagaacagtccgcgcagctcgagcttgtcgatgatcgcgtagaccttgtcctgagcggacttgatgtccggggcggaggtttcgacgagcaggacacggccggagttggcaatcagaccacccttgtcgtcggaggcgacgccggcatagtagacatgcgaatcctcgtcgacctcgatctcgggcacacgggcacccttgatgacgttctccgggtagccgttggaggcgatgaccacgccgagggtggcgttggactcatcccagatgaattcgggggtttcgccgtcgagaatggcggagatgccggcaccgaggtcggaggtgagcttcgggagcacgacttcggtttccgggtcgccgaaacgagcgttgaattcgatgaccttcggtccgtcggcggtggcgatcaggccggcgtacaggatgccggtgaacggcgtgccttcctcggccatgccttcgacggtggggcgcacgattttctcgatggcctcgtcgaccacggactgcggaatctgcggcaccgggctgtaggcacccatgccaccggtgttcgggccttcgtcgccatcgtgggcgcgcttgtgatcctgggagatcggcatcggccagaaatcagtgccgttgacgaagctcatcagggagaattcctggccgtcaaggaagtcctcgataacgaccttggcaccggcggagccgaagcgatgatcgatgaagatgtcttcaagcgcacgctgggcggtgtgctcgtccatggccacggtcacgcccttgccggcggccagaccatcggccttgatgacgatcggcgcgccatgctcgtgtacgtaagcctgagccatgtccaagtctccgaacgtcttatatttggcggtcggaatgttgtgacggtccatgagctgcttggcgaagtccttggaaccctcgatctgggcggcggccttggacgggccgaacgccttgatgccggcggcggcgaaatcgtccacgatgccttcgatcagcgggacttccgggcccacgaacacccagtcatagccattgttcttcacgaattcgataagtgcggcgtggttcgactggctcagctgcgtggtgtggataccgtccttgagcatgcccgggttgccgggagccacggtgacttcgtcaatgctcggtgccttgagcagcgtgtaggcaatggtatgctcacgcgcaccggagccgatgaccaatactttctgacccatgtttttccttcctaaagtctttggctcccctctttgaggggagccggtatctggagctacttcagtacgatttgcgtgtcggtggtgtcggtggtgatctggccgagcacgtaggcgggttcgttgttgtcggcgagcagcttcagcgcctcgtccttgcgggcggggtcgatggccagcaccatgccgatacccatgttgaagatgttgtacatctccttgtgatcgatgttgccggccttctcaagcacgtcgaagatcgggagcacaggccaggtgccaagctcgatctcggcggccagaccgtccggaatcatgcgcgggatgttctcgatgaagccaccaccggtgatgtgggccacgcccttgaccacgcccgccttgaacagcggggagagggccttgacgtagatcttggtgggggtgagcagcacgtcgccgagctttgcgccgcccagctcggcgagctcagtgtccacggtatagccagcctgctcgaacagggccttgcgcaccagggagaagccgttggagtgcacgccggtggaaggcagaccgataagcacgtcgccctcagtgatggtggaaccgtccacaatggcggacttttcggcaacgccgaccgagaaaccggccagatcgtactcgtcctcgtcgtacatgcccggcatttcagcggtctcaccgccgaccagtgcggaaccggcctgcacgcagccgtcggccacaccggccacgacctgctcaagcagggccgggtcgttcttgccgcaagcgatgtagtcaaggaagaacagcggctcggcaccctgggcggcgatgtcgttgacgcacatggccacgcagtcgatgccgatggtgtcgtgcttgttggccagcttggcgaccatgagcttggtgcctacgccgtcggtgccggagatgaggaccggctccttgtagcccagggaggctaggtcgaacaggccgccgaagccaccgatgccgccgaccacgccgggacggttcgtgcgggccacgtgcgacttgatgcgcttgacgacttcgtacccggcttcgacgctcacgccggcgttctcatatgcttttggcatttggtggggcctttctgttctattttcaagctcccttgccggggagccacctgcaaaaagcggattttcgtttgtactaagctccccttgtcaggggagctgtcagcgaagctgactgaggggtagtcgtaaagaccaatgactgaggtgtagtcgaaggaccggccgaacctactgcacgtccggctgcacggtgttgtactcgttgccgatgtacttgctcttgtacagcgcgaattcaggcagacgcacacggtcctcgggcgtgagggacttcaggaagtcggcctcgtagtcgtcgagcgcagtggggtagtcgccgttgaagtaggcgacgcacaggccaccgtatggggcgtcggcgttcagtccgatggattcgaccagaccgtcgagcgaaaggtaggccaaggaatccgcgccgatgtattcgcggatttcctccacgctcatcttggctgcgatgagttccttggtggtggagatatcaatgccatagaagcaagggtacttcagcggcggggagctgatgcgcatatgcacttcagcggcgccggcttccttgagcagctgcacgatgcgcttggacgtggtgccgcgcacgatggaatcatcgataacgataacgcgcttgcctttaaccacgctgcgcacagcagagagcttcatacgcacaccctgctcgcgcagttcctgcgtgggctgaatgaaggtgcgggccacatactggtttttgattaggcccatttcgttgggcaggcctgctgcttccgcatagccggatgcggcggacaatgaggagttcggcacgccgataaccatatcggcctccaccggggattcggcggcgagacgtgcgcccatgcgcttgcgggcggagtgcacgttgacgccatagatatcggaatccgggcgtgcgaagtagatgtattccatcgagcagatggccagctgcgtgttgttggtgtactgcacgatcttgtagccgtgatcgttgaccaccacgatttcgcccgggcgaatgttgcgcaccagctcggcgccgacgacatccagtgcgcaggtttcggaggcgagcacgtaggcgccgttcttcatcttgccgagggagagcgggcggaagccgttcgggtcgagtgcgccgatcatggcgtcttcggtcatcagcaggtaggcgaaaccgccatgcaccgtgttgagcgcttccttgagcttgtccataaaggtgcgctgcatcgaacggcgaatcaagtgcatcagcacttcggtgtcggagttcgaatggaagatggcgccttcgtcttcaagcttgcggcgcagtgacgggcagttcgtcaggttgccgttatggcacagagccacgtcgccgccatggaagcggaagatgaacggctggatgttgtccgtggtgcccgagccggccgttgcgtaacgcacgtggccgatggcgcaattgcccttcagtcgttcgatttcgcgctcatcgccgaacacctgggtgagcaggccgagtccgcgatgaccgatgagatgaccgttatcgttggagacgatgccggcaccttcctgaccgcgatgctgcagcgcgtgcaggccaaaataggtgagtcgtgaggcgtcggggtggccccatacgccgaagatgccacattcctcatgaatgtcttcgagttcagccgacaagccaaagctcctttttcaaacaggggattaactatctgccaaccctaccaatcggcggctacatcgcgtgttgtggggtggtgggggcatggggctgcccatggtcttgcccctggccgcatgagcagagccgtcaggtcggaccctgttcgccgatggcgccggaatatggactgttgcttaaatcctgttgtcttatagtccgatgttttgtattctcaactgaaatgaaggatagttttttacccggctgggggcactgttgattactgaggaagtcggcaagagaatcagagaattacggaataagacgggcctgagccaggaaaagttcgctgcaaaaatcggtatggatcgcacatatttcgccagtatcgaactaggcaagcgtaatgtagccttgaaaaacattgaaaagatagcgaatgggttggatgtgcccctttccgatctgttcaaagggatctaagactagtgcgtcgagtaaaaaggtgatgggggataagcgagaatgggattcaagggtaaattgtataaaacaacgttgattaacaatcgcagatacctgggcaacaaatacaagctcctgccttttatcaccaaggtggtcgatgaggagtgcacggggatcgatgtcgtcgccgatatctttgccggcactggcgcggtttcttccgctttccccgggaagacggtaatcacgaacgacataatgtacagcaattacgtgtgcaattacgcctggttcggtgcggagacttatgatccgcaaaagatcgtgaattatgtagtcgaatataatgccatctcgcaatatgacgacaactacatgaccgataatttcgcggatacctacttcagctataacgattgttccaaaatcggtttcatcaggcaggatatcgaggacaactatcaagctggcgacctcaacgacagggaacatgcgatacttatcgcctccctgctctatgcgatggacaaaatcgcaaagacctgcgggcattacgatgcctatcgtaaaggagccaagttcgataaaccgcttgagcttcgtgttccgcttgccgaggtgcataacaatgccgggaaccaatgtttcaatgaggatgccaatgaactggtcaaggacattcatgcggatctgatatatatagacccaccgtataactcccgccaatattccgatgcctatcatctgctcgaaaacgtcgcccactgggagaagcccgaagtattcggagtcgccaggaagatggagcgaaaggccatcaaaagcaagtattgcactcgcagtgcgacggagacgttcgaggatctgatcggcaacatcaacgcgaggtatatcctgttgtcctacaacaatatggccactaaaggagacggccgttcgaacgccaagatagctgatgaggatatcgtaagaatattgcggaataaaggcgagttgaagattttctcggaagactacaagccattttccgcgggcaagtcaagtattaccggcaatgccgaaagactgttcctatgcacctgcaatgagggataagaaaaccatgattcaatcccctctgaattacactggtggcaagtttaaactactcccacagatattgcctctcttccccgggaagattgatcagttcgttgatttgttttgtggtggctgcaatgttggcctcaatgtcacagcaaataaggtgatctataacgatttagatgagaatgtaattaatctgtacaagaccttattgcgtttagggcatgacatgacgttcgagtacattcatcagataatcgatgattatgagctgtctcttgcaagccagaaggggtatgcatattacggctgcgatagcagcaaaggactaagtaggtataataaaccccattttttgcaacttcgtagcgatttcaatgcaaggcagaagaaagatagctacaactacataatgctctatgtactcatagtctatgccttcaataatcaaatacgattcaacagcaaaggtgaatacaatcttcctgccgggaaaagggatttcaatgagagcatgtcccacaagttatctgcctttatagagaaaatccaatcccagaattgccttttcacttgcagtgatttcaaggattttgatattgctcaacttacgagtggagatttcgtttatgccgatcctccatatcttattacttgtgcaacctataatgagcaaggcggatggaacgaagacgacgaatgtgccttactgtcttttctagaccgtctggatgaaagtgatatacgattcgccctctccaatgttctacgaagtaaaggcagagaaaatcaagtcctcattcaatggttgaaggaacgaaaagacaaatatcaagttattccattgaataaaagctattcaaactcaaattaccaagttaaagacagagtttccaatagtgaagaagtactgatagtaaactattaatgaaaagtggcaattccagctgcggagagttttgcgactgcatatcgctgattgtaagggaggatcctcatgaaagtatccaaggggcatattttcaacctttttgacaccaatggtcgtagaaatgatgtgattgctgccatgcgggggtatctcagtatcctaaacaccattcgtgccaatcaggatttgccgtggagagcaatgccaaacagtccggcacaggtcttgttctatcgtcatgcgattggcatgtttccggatgttttcaaggaccaccccaaatatgatgagctcatatccacgatacacgaatatcctgcattggaagcagcaattgatagagccgatatggaatggctcgaatctcacggtgacgagtatgcgaatgtggatatcaactttgacgaaggcgtggaggatcgcgcacgtcactataccagtaatcttgtcaaactagggtttgcggatgggcggcggaacatctcgccggttggcaatattttgctcgatcgtattcctctacatgaagacggtttggaacgattgctatcgttgaataaggagaatatcctctatctgcggcagttgctcaagttgcgaatttttgataaggccggggaacgatactatgccccattcgttatgggcgtctacgcgttgctgcgcaagtctcgcctatcagaagatgattttttcggcatggtgcaaggaagcagtccgtacagcaacattgacgacgtcgatcggtatattgataatttttcggtagaggggcagctccacaaccatgctgtctccactcccgatgaaatcaatattgatcagcagttaacgtatgacgtgtttaaacaatattttctgaaccggaaatcagcaagaacggtaaatatctattatgggttttatcagtgtatattcgaatttaccgttgaccggactcctgaaaaattagaccttctacttacgtattatgagtcaaatcgttctgtgctgaacaaggcattcggattcgggcgaaatgtatttgatactcgaaccggtgatcgtccagatgtccaggatttccttgatgagaacgaggacatgttttcctccgatatcaacgactatttataccgacaatttgcgatttcaaaattctgggatacgttgcgcgaatattcagataccacgaagcgtattttcaaagcctcgggtctcatcagctttgaaaacggatacgtcgaactggcttatcacgaactgtgcgcatgtattttcaacgcagccgatttgaagcccaaaatcttcggtagcatggatgacgaggttgttccgtactacgaaagttatgatgaatacgaagagggagtgagtagttacttttgtagtaatttcagtctttgcgacattcttggtctgcaggagtcgcttgacgagattaaagagcacatcagtgaagcatttggcggagctgcgcctgaggacatccctgatattacccgtcgtagacggtgggaggaattcgaagttttcgttgcgaaccaatatcctgtcgaaagagtgaaagagctgcttgccctatttggcgacagaaataatgacaagcgcatcaagcaggaggtctgtgaagatgcaactgtcccgaccatttacgagttcatcgttgggctggcttggtattacttctcaggcaaacgtttcaatctcctttccagctataatctcacgttatcggctgacttcgagccgctcaaccatgcgggaggcggacagggcgatatcgtgattgaaagtaagcatgatgtcaccatgcttgaagctacgctaatgaatgtaaacagccaaaagcgaggcgagtgggaaccggtattacggcattccgtgaacctgaaggtggatgaggaggctcgtaagacggaccggcgggtcacgacattcttcatcgccgatgtatttgatgccaataccattaacatctggaaggccgttgcctcggtgccgctgcaatcgaccactgctggcgcggcatatacagacaacgtggtgatcatgcccattagcagtctggaactctgtggcttgatggatagaagttcgcaatatgacacggtaatgcagcgtgtccacgatctgttcgaggtcgacaaaagcaatttcgaccttcaatggagggacaagttcattgatgaaatagtgtgaacccgctattgcgcctttcgcgcatgaaacgagagggcatcggtctcgccggctatcgctatggccggtgagaccgactttgagcgagtcatccgggtttagcgctgccgagccttgtgtcggagatctgagacgggatgtctgagcttcgctgaagtttatatcgaacaaatgttcgactgttctggtatgctggtcgggctggtttcgatagggaggtgatggcgatggctggcgagagggcatcggcgcaacgtgaacatacctatatcgccattgacctcaagtccttctatgcctcggtggagtgcgcggcgcgtgggcttgacccgctgaccacgcatctggtggtggccgatgaaacccgcaccgataagacaatctgtctggcggtctcaccttcgctgaagagctatggcattcctggccgtgcgcggctcttcgaggtgaagcagcgcctgaatggagtcaatgccgagcgcgcggtccatgctcccggcggccgattaatcggggagtcctgcgatgcgcgcgacctggaacactcgccgagactcaaagcctcgatggtcatcgccaagccgcgcatggcgcactatctggaaatcagcgggcggatctacggcatctatctcaggtatgccgctcccgaacacattcatgtgtattcgattgatgaggtgttcatcgacgccacgccgtatctgcgctcgctgggtatgggggcgcatgcgatggcgcgaaccatcgtgcgcgaaatccttgccgaaaccggcatcaccgccactgccggcatcggctccaacatgtatctggccaaagtcgccatggatatcgtcgccaagcacatgcccgccgacaaggacggcgtgcgcgtggccgaactgaatgaaatgtcatatcgtcggctgctttgggatcatcgtccgctcaccgatttttggcgggttgggcgcggctatgccaagaagctcgagcatgccggactgatgaccatgggcgatatcgcccgatgctcggtgggtcgtgcttcggattactacaacgaagacctgctgtatcgcatgttcggcgtgaatgccgaactgctcatcgaccatgcgtggggctgggagccgtgcgagatcgcggacatccaatcctatgagccggatgcgcacagcatcagcagcggtcaggtactcaccggtcccgccgactatgccacggcccgcctgattaccaaggagatggctgatgcactggccctcgatttggttgataaaggcgtgctgacgaatcgactcacgcttgccgtcggctatgacatcggcagtttggacgcgtcgaagctcgattcatgcgccgattatgcgatgaaacgtgccgctgagcgtgcggcgaaaagttatcaggggccggtggccgtcgaccggtttgggcgtaaagtgcccaagagcgcggtcgggtcgattggtttgggtgatttcacgtcatcttcggcgcgtatccgtgaggccatgacgatgctgtacgagcgcattgtggattcacgcctgctcgtgagacgcctgaccgtcatcgccgatgatgtggctacgccggaggagcttgccgccggcaaacgctatgagcagctcgacctgttcggtgatgacgaggctcaatcgtatgggtccgagcccgctgatgacagagatggtgagcatgatatccagcgtgcgttgctggatgtgaaacgtaaattcggccgcaacgccgtcatcaaagccatggatatggaagacggtgccaccggtcagggccgcaaccgtcagattggaggtcatcgcgcatgactctacaagaaacccatgcatacgacgacatcatcaacctgccccatcaccagtcgcgcaagcatccgcacatgtctcgccaccagcgggctgcccaattcatgccgttcgcggctctgaccggttacggccaagtcatcgagcagacagcaaaaaacgccgaaaccgctattgctcaggccgaggcccaaggcgataccgatttcggcgcttaacaatcgctccggttggaggaagccgcagatccgtcagcccacgtgacgctcaaagtggtggaagccagtgatcttgtcgatttcggccatcgcgtcagccggaatcacaaagcccgcggccttcatgttgttctccagctggctgggcttggaggcgccggcgatcacacagctgatctccgggtgctgcaggatccacgccatggaaagcaccggcaggttcgtgccgagctcgttggccacaacgcgcagcgtctcggtcagatcggtggtctcgtcgaatcggtggcagaagtacatgtccagatagtcggtctgcatgttcttcagtgtctgatcaatgctctcgaagatatgcttgcgggacaggccgcggtcgttcacgccttcgccggtggtgacttcgcgggcgcaacgaatgaaatcatcaatgacgctccagcggtatggtgtggccgaaacgtcgaatcggatggcgtattcggtctccggcccgcaatccagcacatgcaaggtgcgcagccgttcgccgtcaagcagcgctggcaggaaccgctccgggcataagcaggcacccatgccgtaatggcatagttccagcagcgtcaatatgttgtccgaacgggcggcgactttcggctcgaatccggcacgacggaacagaatctcgccgatgcggccatcgatgtcctgcggattgcccagcaaaaacgggcagtgcgccaacgaagatagatcgcctggagcaatggcgcgttcatctggaatcgtgttggggatggtggaatcgttggcaatattagtttggctgttcgcggttccggtggtgactaaatccagtcataatgattgcgcaataaccagtaccatacgttcgtcgtagaatctggggttatcttgagtcatggctcgtgcgaatagcattgatgtttgcaactgcgggtcatgagatgaaatctgagatgaggtcgtagccggaagaggagaggatcacatgctggaagcgggcgcgatgttgctgttctgtgcggtgctgtttgccagcgtcgccctcggctggtcgattattcccgcgctgttcgttggtgtgctgctgttcatggggtatgggctggttcgccggtgctcgctgcgcgcgatggcgagccgtgcggccggcagcgtacggtccgcggggaccgtggtggtgaccttcgtgctcatcggcgtactgacctcgctgtggcgggccagcgggaccatcgccttcatcgtggcccattcgactgcggtaattcacgccgccacggtgattccgctgtcgtttctactgtgctcggcgatgtcggtgctggtcgggtcgtcgttcgccagtgcggcgactatgggtaccatctgcatgtcgctgggattgtcgatgcaggcgaacccggtgatgctcggtggcgcgattcttgcgggcgtctatgtgggcgatcgttgttcgccggtttccaccagtgccttgctggtcaaacagcttacgcatacgaacctgttcagtactattgcctgcatgctgcgcactggtgcggtgccgtttgtgctgagttgtgtggtatacgttgcggctgcggtggcggagtggctgtgtgcaagcggtggttccggattcggtgcggctagagcggctgtttcaaccaacacaagcagcataaccgatatcggcggattgttctcatcggcctttgatttgcattggcttaccctagttccagcattactggtcatcgtgttggcgttgctgcgtgtggacgttcgcctgcttatgctcgccagcattgccgcctcggtcgcgatatgcgtgggcgtgcagcacatggaatgggcggaactgttgcggctgcttattttcggttaccatgcgcaaaatccgcaggtggccgcactcctggacggcggcggcatcctctccatgctcactgtgatggccactgtctgcatctcctccgcctacgctggcatttttgccgagacgcggatgcttgctcggctgcagcaggtcatcgagatgctcggtcatcgcatcggcgcatgtggcgccaccatgattaccgcgacttgcgcggcggcgctcgcctgcaaccaaaccctcaccatcatgctcactcaccagttgtgcggcgggctatacggcgacgacgaatccgaacgcgccgcgcaagctatcgatttggaagacagtgccgtggtgatcgctccgttgattccttggtcgatcgccggtgcagtgccgctcgccaccatcaacgcccccacgttgagcttggccgccgcaaccttcctctacctgctgccgctgtgccgaatggcggtttcagctgtgcgtcaccgccgtgcaataactactaatatatgagtgattttgggcgtatacaggcgaaattactcatatattagtagtttggcgaacaactatattgtattctcgaaaagcttcgcgataggcggtgataaggtccggcaaacgcattgaggcgttggccgggctggtggagggcagttgggtcataccgatggcgatgccggcttcggtcaggcgcggctcgataagtttgcggtaaagttgcgctgatttcgcgccggttgcgaagatgtgggcgattggagcgccgcgcaagattggtgtcaagtcgttgggcacggcattgcggatgctggcatcgctggctccggtgatatcgcaagaagcaatgacatcccataacgcaatgtggtggcgcagagcaaacgcacgacgggactcaggtaaatcgccgacagcgtcagtaggatcagcggagttggcaaacagcgcctgcatcaccggccaaaaccggttctgtggatgcatatagtaaaacgccgccgctcgggatttcggactcggcatcgatcccaaaatcaaagcccgggactcaccatcccacaccggcccaaacccatgctccacatgttcgctcataagccccatattatgccgtttggtcttgaaaatagttcgggggcggacagttaatgtcatattccctcaaagagaagaaggatttacaatgaaaaaaggtggaagaaattgccagtgaaggcacaagccattcttattggtgttttagtcgtcgtttgcgcaattgctgcggtatttggatataggtcagttgacaatatgctgcatcctcaggcgactctgaccaattcggttgtggccaggcagttggaaaagattcaggatcttactacggccaaggaaaccgattttggttttgaagagtataaggaaggcaacattgctccacgccagatcgtcctcgaagccatccggcaacggaaccagcggattcttccacatccggaaatccgcaaccagccgcttcaactcctcgacataccgtcgctcatccaaccgaatggacatccccactcaccctcctttgcactaccatcccagcacacaaccagccgtcacgccatgggcagcgccgtacacacgccaatgacgaacaacgcctcggcggtgagccagaacgcggccggccactcgccacacgactcacgacgattatccacacaaaaacaggcagccgccaaatccaacgggaaccacaggaacccaacgaacaacgcaaccagcggggcagccaccaacgcgaaaccgctcacatgacgggtcaacgcgatgccgatggccgcgaccaagccaaccacgccgccacca

SEQ ID NO: 1247 - DNA, 11980 bp, Unknown
  R81_24m  MAG No. k141_30288
gagatgaggtcggcgtacacccaagagcccatcaattccatacctgcttcgccggtcgcaatcatcgcggtatctttgcggtcgtcagcagtcaacgactggtagttgttgccgaaggcactggcatcgatgagatcttgaatcatggacatcgcctgggttacggctggatcgctccaagcatctttattgccgtcgagtacaccttggaagacttcaggcccaccgatgcggtccacaagatatgcggcccacatcagatacggccacttgctaccaccggctagggcaatcggcgttttgccggcagcctttagcttggccactgcatcgagtaggtcgtcccaagtctggggagcttcgtcgactccagcatccttgagcacttgcttgttgtagaagaaaagcaccggctgcgcctgaccagtgggcactgcatacagtttgccgtctcggtagccttcggcggaaacggaatcgaacaccttgctatcaatagtgtccttaagatcgctagttaggtcggtaacggccttggaactgacatagtcggtgagaggagagccaccccagctggggaagaaggtcggtgcattgcctgagccgacggcggtacgaatcttctccttgtaagcatcattggcgaagctttcctcactgatctgagcatcggggttagctttgttccattccttgaatgcatttttgatcggatcccatggggaatcggtcattgcccaagtggtgacattggcgcccgtggcctgagtgttgccggtctggccaggcttattgccgcatgcgggaagcgataccaacatcgaagtggcggccagtgctgcaatggcttttgtcattgacttcataaggatctcctccttgagtccatttcctttttgcttaaggtgcatcttccgtcattggaattgtgtgtctccctttttcggaagatggttatactatatacttagtagttgctaagtgcaagtcgcttggtgacatactatgccgaatatcaatggtgagtgctgaaaggaaccaatatgacggacgccgcaaaaatcaaggaaatccacgtcgattgcaatgccttgcaaggaggagatggcgctcgcgacacgccggtgaataccatccaagcagcagccgatattgcccagccgggagatgtcgtcatcgtgcatgggggtgtatatcgcgagaacgtgaatcccaagcgtggcggatacgatgaatattcacgtatcacttacacggttgctgaaggtgagcatgccatcatcaaagggtcggagatactgggtaattgggatctggtcgacggcaccatatggcatgccagcgtagccaatgacgtttttcatggctgcaatccttatgccttgcctctcgaaggtgattggttggaacgtccgtccgattggaaacttagtttgggcaatgtgtatctcaacggcaaagccctttatgaagctcccagcgtggaagctgtgaaggcggcggagcggcgcgataccggattcggccccgattgggtcaatatcactgaaccggtggcacgcccggaggagaccatttatcagtggcatgctgaagtaggggattgcactaccgaattctgggttaacttccatgactatgatccgaatgcggaattggtggagattaatgtacgtcgcacatgtttcttccctgatcgaactgggctgaattatattacggtccgtggtttcgaaatggcgcaggccgcttgtccttgggcccctccgactggtgatcagattggtctgattggcccgcactgggcaaaaggctggatcatcgaaaacaacgatatccacgatgctcgatgcagtgccattagcttgggaaaggaagactccactggagataacgaagcaactcgatgggggcgcaagccagggtatcagacccaattggaaactgtgttcagggcgcggcacaacggatgggacatgggaacgattgggtcgcatatagtacgcaacaacactttgcacgattgcgggcaaaatggtgtggtcggtcatttgggatgcgttaattcgattatcgagaacaataccatctacaacatcggtgagcgccatgaattcttcggtcatgaaatcgccggtgtcaaactgcacgctgccattgacacgcagattcgcaacaatcatttccatgactgctcattgggcatttggttggattgggaggctcaaggcacacgcgtgtcttcgaatgtattccattccaatattcgtgatttgatgattgaagtgacctccggcccgtgcctcgtggacaacaatgtgttcgggtctgattacaacttcgacaatgtggcccaaggcaccgctttggtccataacctattctgtggctcgacgcaacgtcgtgccacgctcaatcggtttacgccctatcatctgcctcactccactgaggtcgctggttatgcctgcgtatacagcggtgacgatcgcatctaccagaacatttttgtgggtggcgatgcctatctgccgggtgtcacctctcgcggtactgagacttatgatggtgcacctactagtgaaaacgaatacatgaagcgcgtacatgcgcagggcattggcgatcttgagctgttcgaacaggtgccgcaaccggtgtatgtggacggtaacgtataccttaacggtgcgcaatcttttgatcgcgaagaacatcgattctctgacaatggtgatgcccatattgtcgtgactgaagacgcggatggttctgtgtggctggaaggagagattccttctggagtattcgaggttgatacctcatatatcgatacggcgaaactcggtgttccgcgtattgtctggcaacattatgagaaccatgacggtacgccgattgttatcaatcgcgatgtgaccggtatcgcacgaggtgcgcatcccgtgcctgggccggttgagtctctgaagcccggttcgaatcgcattcgcctcgcctgacgaatgtgctgtgtataggctggttgtctgctgtgatggcagaacggatgaccagcctatggaaaacatgataaggggttcaccatgaccacatggattgccaccactcaagacaataggctcgtcgatcgttcgggtgaggtaactgccactggcgcaaccaccgcacctgatttgcaactcgacggcaacgaataccaggcgctgcgcggtttcggcggctgcttcaacgaactcggctggctgccgttgcagaccgtcaccgaggcggaacgcgaccagatcatcaaggagcttttcgaccccgaagagatgaacttcacgttcaaccgtgctcccgtgggtgccaacgacttcgccgaccactggtacagctatgacgaggtcgacggtgactacgacatggagcacttctccgtggaacgcgacgaggagacgctcatcccgtacatccaccgcgcccaggaatggcagccggacatgaagctgttctccagcccgtggtccccgcccacctggatgaagcgcccgaaggcctacaactacggccggctcgtgcagaccccggaaaacctcaaggcctacgccaagtatctggcccgttacgtgcgggagtacgccaagcacggcatcgaggtcacccagctgcacgtgcagaacgaggtgttcgccgaccagaagttcccgagcgccctgtgggacgccgaagccctgaaagtgttcatccgcgactatctgggccccgaattcgaagccgccgggctcgataccgacatctggctcggcacgctcaacggcccggaagacatggcgtggaccggtggcggctacggcatgaggctcaacaactacaaccgtttcgtggacaacatcctcttcgacgacggtgcccgcaagtacatcaagggcatcgcctaccagtgggcgggccagaactgtatcgtccgcacgcacgaatcctggccggaaatcgaactcatccagtccgaatccgaatgcggcgacggccagaacacgtgggaatacgcggaatacgtgttccacctcatcaaccactacctcaagaacggcgcgaccgcctacacctactggaacatgattctcgacgaccgggattccacgtggggctggtggcagaactcgctgttcaccattaccgccgacacgcatgaggtgcgccgcaaccccgaatactacgtgatgcgccacttctcccagtacgtgcgccccggcgctaaagtgctcggcaccaccggccacttcaactccatggccatcgcgttccgcaacccggacggcacgattgccgtcgtggtccagaacgcgctcgaaaccgcaatgccgttcgagttcgccgacccggctgacgcctcccgcggcatcaaagccaccctcgccccgcgctccttcaacaccttcgtgatcgactagcgcccacgcccgtatcggtgcgcaggcagggcacaacgccctgtctgcgcaccgctttcgtatgttcggccgtgctggagtgtgtgggccggcgtgcgggagggcgggctgcggatagactggcgggtatgtccacacaagccacaacccggcccaagcgaatccgcaagttgccggaagagcgtcggcaggaaatcctcgatgccgccgtacgcctcatctccgaacgcgggtacaacggcacctccatacaggacgtggccgatgcggtgggtgtcaccaagcagggcgtgctgcggtacttccccagcaaggacaatctgctcgccgcggtgtaccacgagaactacaacatgtccggcgacatcgaggacttcatgactaccggtctgcccggctccacacccggcgacctgcggctgcccgcctacctgcggttcctagtgtggcacaattccaaacgccccatgctggtgcagctgttctccatcctgcaggtcgaatcgttcaaccccgaccacccgctgcatgacgaattcgcgggccgtcgggattcgatatggcactactattcgatacacgactggaacctgcctcccgaattcgactcgttcgaggagatccgccccacgttgcgccgcgccctggagatcatggacggggtgcagttgcgctggttgcgggtgccggccatcgatctcaacgacgaatgggctgatctggagcccatgatcttcccctcgccgctctgggacgggtaccgctgagctttcttgcgataggtgggcgttctggtgcttgcaggatatctaacagaaattagattgtcagaaaaccgtgtattcgcagcgtgtttcgtcattaggcatgctaaactaccaatcggtaactaaagaaccgttcgatttcaccgaagaaagcgacaccgcatgaccgacaacaccgcaacctccgcaaacgccgaaaccatgccgtacaagaaccccgccctgcccgccgaggagcgcatcgccgacctggtcggccgcatgaccctcgaagagaaggtcggccagatgatgcagctcgacgcacgcagcggcgacctcgaagacctcatcgtcaacaagcacgtcggctccatcctgcacaccagcccggccgacctgccgcgcgcggtgaagatggtcaacgagcagacccgcctgaacatcccgctggtcatcggcgacgactgcatccacggctattccttctggcccggcgccacgatcttcccctcccagctcggcatggccgtcagctgggacgccgccaaagtcgaagccgctggccgcgccaccgccgaagaggtctcctgcaccggcgtgcactggacgttctccccggtgctgtgcatcgcccgcgacacccgttggggccgcgtggacgagacctttggcgaggacccgatgctgatcggcgaactcgcctccgccatggtcaagggctatcaaggcggcgccaaggccggcgaggccctgccgaagaacgcgatcctggcctgcgccaaacatttcgccggctattccgaaacccaaggcggccgtgacgcctccgaagccgacctctcccaccgcaagctcgaatcctggttcctgccgccgttcgaacgcgtggccaaggaaggctgcggcacgttcatgctcggctacgagtccatcgaaggcgtgccggtcacgttcaacaaatggctgctgaccgacaagctgcgcggcgcatggcaatacaacggcacgctgatcaccgattgggacaacgtcggccgctcggtatgggagcagcatgtcaagcccgattacgtgcacgccgcagccgacgcggtcaaggccggcaacgacctggtcatgaccaccccacagttctatgagggagccatcgaagccgtaaaaaccggtctgctcgacgaatccctgatcgatgacgcagtagctcgcatcctagctctgaaattccgcctcggcttgttcgaagacccgcgtctgccggacgccgaacgtatcaaggcggtcatcggttcggccgaacaccagcaaatcaacctggagctcgcccgcgaatccatcgcactgctgcgcaacgacggtgctttgccgtttgccgcaaacaaggccaagcgcatcgccgtggtaggtccgctcgccgacgacgcccagaaccagctcggcgactggaccggcaactccggtcaggtttcctggatgccggatggccagcctcgagacatgattaccaccgtgctcgacggcctgacccagctcaccgccgacgattgcgaagtggtctactcgcgcggcgcgaacgtcatcgacctcgtgcctgaccctgccggcgagttctacccggacggccagcctcgcccgaaaatcggcgtttccgccgccgtcgatcaagcgatgatcgacgaagccgtggccaacgctcgccagtccgatctgatcgtggccgtggtcggcgacgtggtccagctggtcggcgaaacctgctccactgccacgctcgaactgctcggcggccagaacgccctgctcgacgcgctcgctgccgtctcgcgcgaaaccggcaagccgatggtcaccgtgctcatcagctccaagccgcaggtgttgcccgcctccatcgtgggggagtacggcgtgttcgccaagcgcgtcagcgaccctgaaaccggcaccggctccatcctgtgggcgccgaacccgggcatgcgcggcggtcaggccatcgccgaaataatcctgggcctgaccagcccgtcgggccgactgccgatcaccttcccgcgccacgcgggccagctgccagtctactacaaccagattcgcggccagcacggcgaccggtacgccgacctcacccaggatccggcgttcgcgttcggcgaaggcctgagctacacgacgttcgcatacggcgaaccgaccattacgggcggcgcaagcaacgccgacggcacattcgccgaaaccgacaccgtacgtgccgaaatcaccctcaccaacaccggcgagcgcgccggcgtggagatcgtgcaggcctacatcggcgacatcgtgacctcctacagctggaccgaccgcgaattgaaggcgttccagcgcgtcgcactggaacccggcgagaccaagaccgtcaccttcgagatcccggtggcgaactgcacgatcgtggacccggacgccaaccgcatcgtcgagcccggcgaattcgaactgctcatcggccactcctcgcgccgtgaggacctgacgcgcaccccgttcaccgtggcgtgagtgagtctgacaatcgccggataataacaaagtgggatgaggctcgatgccccatcccacttgttggcttgttgtactgttgcgatgttgctggtcagcgtcagtcggacgtttcagtcggacgtggtgatgtgctccacatcccagcgcacgccgagcacttcgggcgcgcaactggcgttcgagccctatcagcgcgcccaatgccgtgccgagcacaatgcgtacggtgcagtcgagaatgatggccagagaaaacgtggtgaacatgaggattcacctcctgaaaagtagacgtcaggaacttcccgcacgccctacagcgccagcccgcctcccgcaactacgtcgccgcgttcgggtggttcgggctccgtgcggtgagcgtgccgcggccgtatgatggaagcgcgggtggtccgggattttctgcatacggcgggaggcgtcatgattcctattgagaacgtgtacgaacagattcgtacgttcgccgctgatgccggcgctcgcaaggtcgtgctgttcggttctcgcgcaaagggtgtgaaccggcctaaaagcgatatcgatcttgccgtggccggttgccccgatttcaatcgcttggagcagaaccttcaggacaatctgtggtcactgcttaaagttgatgtcatcaatctggatgagccgatttcttcatcgctgagggcggagattgagcgtagcggaaaggtattgtatgaaaaaaatatgagaattacgcttccgcactgaagtcgctgcgcaaggctcccgaacaggatctcggcaatgatttcatccagagcggcatcattgacaagttcgagttgcagtttgagcttggttggaaactgttcaaggcgctgctggcttatgagggagaccctgtttccgcttccggttctccgcgagatgtgctcaaaaccgctttccaatattacgatttcatggacgaatcgttgtggctgcgtatgctgcgcgatcgcaatgattctgctcatatctatgatgaggaacgcgcccggcggcttgtggatgccatcatcgttgattacatccccgaatttgagcgtgtgaatcaggggctggtcgctcgctacggtgaagcattgaacgattagcgtgacaggtatggcatcgggcgcgctgggtgttggcgaacgaattaatggggtgaacctcggcaattggctggtgctggagcggtggatgaagccggggatttttgccgccagcggcgaggcggacgagatctggctgcatcgggctacgaagtcggctgagctggaggctctgctgacgcggcatcgcgacacgtatatcactgaagctgattttcggaacattgccgcgcatggctgcaatctggtgcgtattcctgtgccgtattttatcttcggggatgtgtccggtcatccgggctgcatcgagtatttggacagggcgttcgactgggccgagcgtaccggtctcaagattcttatcgacctgcacacggtgcccggctcacagaacggattcgacaacggcggtctcaccggcgtggtgcgctggcatcatagcccgcgagcggtcgcctatgcgctgaatgtgctggcctgtctggctcgccggtatcgcgatcgcgcggcgctgttcggcatcgaagtgctgaatgagccgattgattggctgacgtatgctacgtcgtcatcgagcaggcaggcaaaggatagctttgaagcacggaggagtgggccgattccaatggtgttcctcaagcgtttctaccgtgagtcgtatcgccggttgcgcccgattttggccgagaaccaagccatcgtgttccatgacggcttccgactgggccgttggcgggactggtttgtgcgggagggcatgcagggcgtcatgctcgatacgcatatctatctggtcatggccgagcaattctcgctgttccgtctgattccggatcggtggctgatggactggtatcgcttgttcgtgcgctggaacgaacgccgcatccgccgggccgcgcgctatacgccggtgatcgtaggggagtggtgcgtggccaacaatctggtgaaccgaaccccttcagcgaggaatgccgtctatcgcgaggtcgccgccatgcagcgcaaagcgtggagcgcatccgccgggcagatttattggagctaccaattacgtggtaatcgtgatttcttgcctgccatcgacccgcaatccgacacatcacgtctcgacccatgggacctcacccacgtctggcacgccggttggatggcgtgcaaccgcaccaatcagcgatatccctcccaaagaggcaaaggcatcagaacatcctcgcagtcggcccacatggtattgagattttggccgggggagcgcagccaacgcagctgaatgccgtccatcatggcgaagccggactgcagcaggtgctcgatattcacatcttccggcacggcccagttgatgttgagcgccatggtggccgtgcggcgctcgcggtcggcgaaataatcgtgcgcggggtgggccgagtcgagcgcctcggcgctcagcgtggagaacatatgcaccaacgtgggccttttgttcctgggcctgccggaagccgcggaatccgagagcttcgaccgcgacaccctcgacatgcccgccaagcaggtcgccctgctcgaacaggtcgccgccacgaaccagaacgtcgtggtcgtgctgtccaacggctccgtggtctccgtggccccgtgggccaagaacgccaagggcatcctcgaatcctggctgctcggccaagccagtggcctggcgatcgccgatgtgatcttcggccaggtcagctcgtccggcaagctcgcccagtcgattccgctggacatcaacgatgacccgagcatgctgaactggccgggcgaggagggccatgtcgactatggcgagggcgtgttcgtcggctaccgctactacgacacctacggcaagtctgtggactatccgttcggctacggcctgagctacgccacgttcgagatcgctgacgtcgccgccaagaccggcgcgaacaccgccaccgtgaccaacaccgtgaccaacacctccgccgtggccgccgccggcgaggccggcgagctgacgaagctgctcgacaacgccctgatgcgcatgttcctcaactccatgccgatcaactcgctgtccaccctgctgggcgaaggcggcaagaagatcgccaagttcatggtcgacgagtacgccaagctcgcgaagtaagggctgaagcgaggcaatcgcacggcgtaagaaacccccgttgaggggaattttgtctgttaacgaattacactagaataccgtaaggcagggacaatggagggtctgtggacagaactatgccatacccccgtttaagggaagtattcacggggggggggtgcgttcccggcgacaacacccccggatcatcaacgacagggcaggaaagtcataccaggaccggcgacccggccccgaccatcgaggcggcctaccaaacatggtaatggggtggcagcatgaagtgcttttggtcggtaataccgatttcattaccaaacagtggattcagcatgcctttccccgagaccatgtggtgatagcggaacgagaaggcaccgtggacggcaatgaccgtctcagaatcgtcaacatgtctgacgccaacacccttgccgaaacccttaccacatacgaatttgatcgcatcgtattcttttccgaaaatctgaccccacgcagtgaccgagacggcgatctaggaacattgcgaagatttctgcatgccatttgcaacaggcaaacgcaaatactgatggtcagcggccccgaatccgaatttacctatccggaaaacgccgacgtacgtgataccagcaaaagtctgatgtctcgagcgtcggaagaactctgcctgtattatgcgcgtacctaccgtctggaagcgaaaatcattcgaagcccgtacctgtatgcgtcggatcgcaacggcgtcaccgcatatttcaatcatctatttgaacaggcggaatcgggcacattgtcgttctgcgagcaaaagaaccagcagacatgctttctctgcgccgacgatcttgccgaactgatctaccgcatgttcgacgattggaccgccgaaagcgaaatattccatgtgcccaacgtgttcaacttcacatacggtgatttggctgatgtaatcagcgcggcatttcc

SEQ ID NO: 1248 - DNA, 7170 bp, Unknown
  R81_24m  MAG No. k141_30348
cgaactcgtctatacggctttgcaggccgctgcctaaccgcttggctaacccaccgtaaggtctgtcaactcacggacctagagcggacaacgggactcgaacccgcggtctcaaccttggcaaggttgcgctttaccaactcagctatgtccgcgtgtgtttccttggcgaggtctccctgccgaagcacgagtgtttactatactcacatgcgtgtagttcgtccagctgcggcgtgtcgcctgtaattgcatactctcgcttatggctaaagcgtgcgcttcgggcaatgaattccagttactctagaggtatgagtgaagcagcgaaggacaccggcgcagtattgatcgccgcattcgagggatggaatgatgcctgtcaggcggcgacgaacgcggtgcgccatctggtcaagcgatatgagtcccgcgagattcgtcatattagatgtgatgatttctatgactatcaggttgcccgtcctatgctgtgccatgttgcgggacgcaccaatcttatctggccgcagaccacgttctacgacatcacgttggacgcaggcaagcatatctatgcgcagatcgcccccgaaccgaactatcggtggaaggaatactgtagccagagtctggccattgccgatgagctggatgtcaatcggatcattacgttaggttcgatgttctccgattgcccgcatacccgtccgttgcccatcgccgtcagcgacggagactgtcaatgcgaaggagaccggtcgtataacggcccggtaggcattccaaccgttttggatgtggccgccgcgcagcaaggttttgctcattcctcgatgtgggtgtccatcccccaatatttgggcagcgacgaatgttctgccggcactatgcgattgctggatgcgttggacaagcatatcggcttcaccttcgatacggcagatctgaagcagaaagccgaacagtggaaggcgcaagcctcgatactggttcgttgtaatgaccagcttcacgattacgtggagcatttggagcacgactacgacttgcagcagaaagccgaggcggaggcttccttgggagcgccccaggccgaacaactagtcaaagaagcagaagcgtttctgcgccagatgggcaattagcccatatatggcgtgctcccgctggatgaacagccctgtgggctgttcatagcagtgcaccatgtgcacgtcgcacaaaatgtcgggagctggctcgcgtagcgagactgagggtggttctgctggcatattccagtgaccacccccagtcagcttcgctgacggctcccgccagcgggagcaccattatattggagtcgtctatcgatccgtcttatgccgcagccgccacggagggatcgatggccggcagcacgcccacaatcagcagcaaggcgacgaccacagccaaaccgatgcggtagatggcgaaggccttataggagaagttcgatacgaacttcaggaatccgatgatcacgatgtagccgagtacgaagctgatgaccatggctacgagggtcggcccccagccggggaacatcgcatcggttttgtagttcttcacggccttgatggcttcgagcaaacctgagccgaacaccgcggggatggccatcaggaagctcagacgtacagcggcctcacgcgtgtagcccagtgcgcgaccgacggtgatggtgccgccggagcgggacacaccaggaatcagcgccatggactggcccaaaccgaagaggaacgcatcacgatacgtcatatcattcatggttttgttctggcgagccttggcatccaccatccacagcagaatgccgaataccaacagcacggttaccgtaatccacaggttgcgcaacgaggtctcgatgacgttctgcagagtgaagccgaggatgataatcggaatcgagccgacgataatgttccagccgagtgtggcgtaattgtcgccgcggcccatgcgggccttccaatccttgccgttcttgccgaacaggcagctgaaccagtgagtaaggatattgatgatgtcgtgacggaaatacagaatcaccgcaagttcggtgccgatttggatgatggcggtaaacgccgcaccgggatcagagcccagcatcaaatcgccgaaaatacggatatgcgcgctggaggataccgggagatactcggtcagcgcctgaacgatgccgagaatgatcgcttggaaaaaattcataacccctcgtgatttctaagtatttgatgtgttatgacgatgaacaccctacccaagggggtgtagaacaacactaagaatcggtaacatccacggcttctacaatgaaagtggatatagtacgtaagcgacgaagggagcattatggccacgtatcgcaaaagcagggcattcgcaccggaaggattcttcgaatgcgagggtcgaggactcgaatggttgggagcggctcatgcgcagggcggcccgcgcgtggtgcaggtatacggctggggcaaggattatctggatatcgaacgtgtgggcagcgcgtcccccacgcctcaggcggcacgagcttttggtgcggctctggcccatatgcatgatgtgggtgccgaatatttcgggtctgcgcctgacggatataacggcacatgctatttcgggccattgcaggacccagtgaaaatggataccggcgagtggaccgacccgatcagctatttcgctgatggacgtctgcgcccgatggtcaaccttggtgtgaggcgtggcgagctggataagcgcgatgtcgaactgaccgagcgcgtgattgaagcgttgccggatctgatgggccgagccgcgtccgacaagccggcgcgcatccacggtgatctgtggagcggcaatgtgatgtggaccgccgattccgggcagcccgaggctgtgctcatcgacccggcggcacatggcggtcatcgcgaggaggatctggctatgctgcacctgttcggcatgagctatctgagcgaaatcaccgagggctaccagtccgtgcatccgttgaaggccggatggcaggagcgtatcacgctctggcagctctaccccatcgccggccactgtgtcttcttcggcggcggctacgtcaacgaataccgctccatgtgccgctccctgctgaagtaacagacttggctcccctctctgaggggagccaagaacgcatccactctcagctcagcgcgtccttcaacttgctgaagaagcctttcttttggccagcctgtggacgggatgcctgggagacgtgcgtggcgcctgaatcgtgcgaggcggcgaactgttcgatgaggccgcgctcggtttcgttgagcttggtgggaatcagcacattgacgtgggcgatgaggttgccgcgctcgtccttgttgcggatgttcgtgacgcccagtcccttaagcgtcacagtgtcctcaggctggcagccggccgggatggacacggtcttctcaccatcgaacgtgtcaatggacagatcgtggccgagcacggcccagctcatcggcacctgaatccagcagtgcaggtcgtcgccatcgcgggtgaactgcttatccgccttgatgcgaatgtcgatgtacaggtcgccggcagcgccgccgccctcacccacttcgccctggttggccaaacgtagacgcgcgttgtcgttgatgccggcgggcacggtgacgcccacggtacgtgtggtacgcacacggccgtggcccatgcagctggggcacgggttcttgatgatggtaccgtggccctcgcaacgttcgcagggggcggaggtcatcatctggccgagcatggtgcgcacgaccttctgcatgaatccctggccgtggcagtcggggcaggtgaccggctgtgcgccgctctgggcgccggagccgccgcactcctggcacagggagaacgtgctgatcttgacgtgcgcggtgccgccgaacacggcggtcttcaggtcgatggacgcggaggccagggcgtcgcggccgggctgggtacgcggcaccgggccctgtgagccaccaccgaacgcggaaccgaagaacgtggagaacacgtcgctcatatcgccgaagcccgccccggagaagccgccggcaccggcgttcggatcgttcgggtcgacgcccgaatcatacatacggcgcttgtccggattggacagcacatcgtaggcgttgttcacttccttgaacttgtcctcgaattcagggcccgcgatgtcggggtggtacttacggctgagcttgcggtatgccttcttgatctcgtcgtcactggcgccgcgttccacacccagcgtctcgtaataatctgccacttgattgatcctttgtgttcgtttggtctgcgggtcattgtgccacagacggcggtcagtcttgggtccggccctcggagaggaaggcggtcaaatatctggctacggccctgacggcggccatagtggccgcatagtccatgtgggtcggccctatggagccgacgaaggcgatgggttccgtgtcgttcgtctggctctccgtctcggattcggtttcgggttcgcctacgggatcgttccccgccggttcgcccgccgcaccgctgcgcccatagccactgctgaccacggaggcatgcagtaggccgggggtgtgcatttcggagccgatggccacgcccacgccggatgcattcgtctcctcgctcaggttgctcatgagcttcatcagcacgacctgttcttccagcgcgtcgaagagcggggccagatcggccagggaccgggagtgggccaggtgcgaggtgccggacatgtacagttcgtccgcgcgttcgtccaatgccatcgattcgaaggcgtcggccagcgcgtcggccacgccgcgcaccgactcgtagccggcgctggcggcgatggatcgcacggtctccgcggatttcgatagggacagtccgacacattgttcgttgacggtgttggagagccggttgatctcgtccacggcgggcatggatgcgatggtcaggccgtgctgggccacgcggccggtgtcggtaatcaccaccgcgagcaacgtggtcatggcaacgggcaccatctccacgtgccgcaatgtggccttggccagcgatggcgaggtgactatggccacttgaccggtgatttcggacaacagtcgtgccgaacgctgcagcgcgtccttgagactcaccgatccggacaggaagctgttgatgccgcggcgctgcgcctcgctgagcggcaccacggtagcaagtcggtccacaaagtatcgatagcccttttcggtgggcacacgaccggccgaagtgtgcggctgaatcagatatccttcatcctccagagcggacatgtcgttacggatggtggccgaactgacgccgagatcatggtcgcgcgtcagcgaagtggagcccacgggctcctgagaacggatgtaatcctccaccacggcgcgcagcaccagcatgcgtcttgattgcgtcatgcgcgcctccttatatatgcatacatattcatatcagtcacggttcactcagggcgtaccccgacggtcggttcgccacgccgcgacacgcgggaacccagaaatattgcctctttcttggctccgccacgtgcaggtggcgcacttcaccttagaacattgtattagcactccttaggcttgagtgctaatgcgttcgtttgcagcgtagcaatgttcactgtgaacgctaacagaacacaaactaccaaaacacgccaaaattgcaccgcaacgtcgcaaaccgacgctagcatggtaatcgcaatgtgagggcgtcaagcgcccggcacaagccggatacgcggcccgaccaattggaaggaaagtaatccatgaccgaattcaaggagaccgagctcgacgagcgcgccatcaagatggcgaaggtcctttcggctgacgcggttgagaaggcaggctccggccaccccggctcccccgtctccctggcgcccgtcgcctacacgctgtaccagcacttcatcaagcacgatccgaatgatcccaactgggaaggccgcgatcgcttcatcctttccggtggccatgcctccctcacccagtacgtccagctgtacttctccggctacggcgtgaccctggacgaccttaagaacttccgtggcggcgctgccacccgcaccccgggccacccggagtacggcctgaccccgggcatcgaaatgaccaccggccctctgggccagggcttcgcctccgccatcggctttgcctacggcgagcgtttccagcgcggtctgcttgacccggagaccccgaaggaagattccccgttctaccacaagatttgggccatctgtggtgaaggcgacatcgaggagggcatctccggcgaggccgcttccctggccgccaaccagaagctcggcaacctgaccgtgatcttcgacgccaaccgcatccagatcgaaggcgacaccaacctggtgctggccgaggacgtgctcaagcgcttccaggcctacggctggtacaccgacgagttcagcttcatccagcccgacggctcctacaaggaggacatcgagggtctggccgacgtcatcgccaaggccgaagccgccgccccggaccagccgaagctcatcaaggtccactccctgatcgcctggccgaccccgggcaagaccaacgacccgtcctcccacggctccaagctgggcgccgaggccgtcgccggcctcaagaaactcctcggctacgatccggaggagtccttccacgtcgacgaagaagccctggcccacgcccgcaaggtcgccgatcgcggcctggaggcccacaaggcctgggacgagaagttcgacgcctggcgcaaggccaacccggacaaggccgccctgtacgaccgtctgaaggccggtgaactgccggaaggcttcgacaaggcccttgacgaccttgaggccaccttcgaagtcggcaagggtgtcgccactcgtggcgcctccggctccgtgctcaacgccatcgccgccgtcatgccggaactctggggcggctccgccgacctcggtggctccaacaagaccgacctcaagggcgctgccaccttcgc

SEQ ID NO: 1249 - DNA, 28505 bp, Unknown
  R81_24m  MAG No. k141_30876
aatatcctgcagcaactgcagcacttccttgccggtctcgtaatcgagcgcaccggtcggctcatcgcacaacaacagcttcggctttttggcaatcgcgcgggcgatggatacacgctgttgttcgccgccggacagttgcgcggggaagttgtccatcctctcccccagtccgactttgcgcagcgtttcctctggatcgaaatggtcagggcagatttgcgaggcgagctccacgttttcgagcgcggtaaggttaggcaccagattgtagaactggaagacgaagccgatatcgttgcgccggtaggtcaccagttcctttttccgcagacccgtaatatcgcgtccgccgaccactacgcggccggttgtggcggtatccatgccgcccagaatgttcaatgccgtggttttgccggcaccggactgccccagaatcacgcttaattcgccttgttcggcggtgaagctggcctcgtcgagcgcgcgaatcacactgctgccagaaggatattccttgaccacatggtcgaattcgatatacgccatcgcacacctccaacgcgctcgtggcagccacctagccccataggccccgccagaacttcctgctatactcaagtaaaacaacactgtgtcggttctgcaaccaacagttggattgtgggttgtcggaacttggggagaaggccatggccaaagaattgacggaaagccgccgcacccgctacacgagacgtgccatgcaggacgcgcttatcgagttgctgcgcgatcagccgctcggctccatcaccgttaaagcgttgtgcgagcgggccgatgtgaatcgttccacgttttacgcgcattatgcgagcatcgaggaactgctgcacgacattgaagacgaaaccatggcctgggtcaccaccgcactcgaacagctactcgcccagccagatcctgccggcatcgagcatgttattgagcgcatctgccagtacattgccgacaatcgcaatcatctccaagtgctgatgagcccgaaagcggatatcggtttccagcagcagctgctgggattgatttacagccagcgcggtgtaggcgaacagttgcaatcttcggcgggttacccagccgaggcgcagatgcgtatgcgattcgccgtgtccggcagcattgggcttttgcaatattggctcgccaccgatctcgcggcctctcccgaatcggtgtcccacaccatcttcaccatgtgtatgcctgccacgcagtgagcacagtgaattcagtgaactcagtgaactcagtgaagcgtgcggtttcataagcatcgctcgctatagcttcgcctgctcaccggccgcgcccacgcccgcgcttgcaatagcgcacaaatagacgattgaccatttctgagacgatacggcggcatagaataacgaacgttgcgcatcacggcaagccccgcgtgcgccaaacccaagaaatgtgagagaagagcacaatgagtactactgatgcgcctaagaagccgcgcgaaaccgacgacgtgccggtgccggccacgctgcgcaagtcattgaaaaaccgccacatccagctgattgcgctgggcggcgccatcggaaccggcctgttctatggttccagtgaatccatcgcgctggccggaccctcgattctgctcgcctacttggttggcggcctcgcgattttcgcgattgtgcgtgcactgtctgaaatgtccgttgaggatccgaaggcgggcgcgttcagctactatgccacccgctactggtccaagcgcgccggctttatttccggctggaactactggttcaactacatcctcgtctcgatggtggagctatcagtggtgggttcgtttgtgaactactggttcccggcgattccgacatgggtgtcggcggccgtgttcttggtgatcatctgcgccgccaacctgctgggcgtctctaaattcggtgagttcgagttctggttcgccatcatcaagattgtggccgtgatcgccatgattatcggcggcctggccgtcatcatctttgtcctgcccaccgcatccggcgtgcgcgcaagcttcgcgaactggttcaccgtgggtaacggcttcttcccgaacggcctgatggggcagaattccgacggttcctggaccggcctgctgatggcactggttgtggtgatgttcagcttcggcggcaccgagctcatcggcatcaccgccggcgaaaccgaggatccgaagaccacgattccgcgcgccaccaatgatattatttggcgaatcctcgtgttctacatcggcgctctgggtgtgatcatggccgtagtgccgtggaacaccatcgatggcaagtccagcccgttcgtgcagatcttcgattccgtgggcattcacgcggctgccggtattttgaacttcgtgtgcctgaccgctgtgatgagcgtctacaactccggcctgtacgccaactcccgcatgttgtactcgctggccaagcagggcaatgcgcccgcttacttgggcaagctcaactcgcgcggcgtgccaatggccggcgtgctgacgtccgccgcgatcaccgccatcgccgtggtcgtggtgttcgtgtggcctgagttcgcgttcaactacctgatgtcgattgccaccattgccggcatcatcaactggacgatgatcatgctcaccgaaatgaagttccgtaaggtggtcgccgcgggcggcgctcccgaggattccgagctggccggtctgagcggccaggaggcactggacgcgattcacttcaaactgccgtttgccaaggtgaccccgtgggtggtgctggcgttcctggcgctggtcgtggtgctgatgtgcttctccaccagctaccgcatcgccgtcatcgccggcgtgatctggctggccatcctcttcgccgcctaccagctcactcaggcgaagaagtaaggctccatttgcgaatagctctcactgatgagcactcagtgagagctattcgcaaatgggatttattcatgaaacagctcatcgatgccgacgagctgaacgtcggattgagacgccgcagcatcgtcgaccagtgattgatcgaaaccgccgagcgaaaacagcaggtatgttcgctggccgataccggttcgcgcagcacggtctcgcagtagattcagcacggaacggtccaccggcgcattgcggaatttgcactcgcccacaatggcagcatcagacgcattgtcaacggccatcacgtctatctcatcctgacgatcccaccaacggccaaccgcacgcgcacggaagggcaaccgtccagcagcactctcacgccacatccattcacggcacagaccctcgaacggtttgccggcaaaatcatgtaataccggcttgatatgacgctcgtatacgccttccacatcgccccgctccaattccgaacgatacggaaagacaaacgaataccagaatcggaagaaattgtcgctcagctgatacagcccacgcgaacctttcgcccgctccttaggcttcgccgtgactgggaactcacgttccacaatccccagttccataagattggcgagatacgacgatactgttgcgtttgccatcatcgtgtgtgtcgcgatctcattcagcgaagttgcgccgagcgcgatcgcccgtatcacgctgttatatttcgcagtttcccgcagttcttcgtgcaacaaaaattcaacctcgctgtatagcggagcaatgcgtctcagaatatgccgcttgacatttgcgtctatggtctcatctgggtcaaattcctctaggtaacgcgggataccgcccagtattgcgtaggccagcgccttatcctcgctactatagttggggaagaattgcgctgcatcccaatatggcatcggcagcatcttcaggatgccggtcgcacgaccatatagcggcgatttttctcccaacagctccttttcgatgaagctcatggcactgccgcaaatcacaatcatcagatttgcatgacgcaacgtgtggtcccaaagattctgtagcactgacggcaatgacggatcagatttgaccagataaggaaactcatcgaatatcacaagcctgcggccgccatcgctcggctctggcagccgggttaactcggttaacgccctttcccaagaaggatattgactcagataatccttgcccggggcacccgcctcgaacatgagacgggagaacgatgccagctgttcatctttagtggcattctgcgccgcgaagaataaggtttccttgtcttttgcgagttgaataagcgtctctgtttttcccacgcgcctgcggccgtagacgaacacaagctgtgccctacgctcagtgaaacattcctgcagttgcttgaggtcatcgtctcgtccgatgaatgccatgctgcccgcctcctttatgccatacgccggcgtatttctatcgcatcacgatttattgtatcacgattagtataatcgtgattatacaagctgtgacgaggtgcgggtacgggccaatcggcatcgacgagaccagccgcaggggccacaattacatcaccgtggtcgccgatctcgtggagcacgatgtcatcaacgtgacgccgggcaaggacccggccacggtcgaacggttctcgcgtgatttcatggaccacaacggggtcccggaatatgtgcgtctggtcgcctgcgacatgagcctgggcttccggaagggcatccgtgagcatctgccccatgcgcggcggatcgtcgacaggttccacgtggccaggcacgccaacgaggccgtcgacaaggccgggaagacggaaggccgctccaacccgctgctcaaacggaccaagtacctgtggctgcgcaacgaggaaagcctgaccgaactgcaggtggagaccaagcgcaacctgacgaggcaacggttgaagaccggccgcgcctgccggatgcgcgaggtcctgcaggacatccacacggacagccgcaccccgtccgaggcatgggtgcgcctgcatcgcctgtgctcgtggatgatgcactcgaggctcgagcccatgaaggacttcgcccgcatgatccgacgccacttcgccgagatcgtcgcatacttcgagcacccgtacaccaacgccgtgctcgagggcgccgacagcgtcatccagaacgtcaaacgacgggcgagaggcttccgcgacatggactacttcgccaccatgatctacctgacctgcggcagactcgacctcaaagccgtcaccaccacttgaccatcacccaccacaaacagcgaatagcctttgtattttctcagtttccatacggttttttcgtttggtttcttgcttagttttccgtctggctttttgtgcgcttttcaaatgctgtacacttcgcgcgtcgtttcgcgcgttgctttggcgatttccgccaacgaacggtcgagataatcggcgagcgcctgcagagtgtagggaatcatgtatggtgcattagtgcggccgcggtatggcatcggacttaagtagggggcgtcggtctcgaccatgacatggctcatgccgacgagtttcgcggattcgcggataccgtcgttgcctttgtagctggatgtgccggaaaggcttaaataccaaccgttttcgcgggcgatttcacccatttcgacgtcgccggagtaactgtggaacacagtacgttcgggggcaccgtcggcgaggagtgtttcgatgacttccttgtgggagtcgcggtcgtgaatctgcatgggcagattgagctccttggcgagggcgatatgcgcacgaaacgcctcacattgcagctctttggcaccttcaccagtgcggaacaagtccatgccggtttcgccgatggccacgacttgattagggtaggtagtggcgagacggtgaacttcggccatggcatcgtcaaaggggatgtcgtgccagggcttgtatttgatgggcaggccgtcaggtccgggtacgccgcgatgaccatgcaatacggattcgttggggtggatggcgattgcggcgtgcacggttcccgggtgttcgcgggccatgtcgatggcggtcatgagattgggcagctcgcaaccgcagtcgattacgccttcgacgccgacatcctgggcttgtttcagcagttcgtcaacactgtagacaggcacttcgccctggcctttttccatggcttcgtggctcatggcttgcgagaaaggcacgacggatgcgacgtgggtgtggttgtcgatgacgtgcgcgtcttcgggaagtggctgtggggccggcgcccagttgcgattgcgatgatgcttgctcatggcttccagattacgcttcctgcgatggccagcattgctcgtatccgactccggtgagtcgttcgaccacggcacgggttttgtcggtgacgtcggctttgctgccgccgtgctgcagtcgtgcgatctcgtcaagcagaatggcgtcggtttccttgctgatcgccatccgttgcgatgcgatccagccgacaatcatggcgacggcgaaccagccgagcaacatggcgccgatgacgatgtgtgccgcgaatggctgcgtgccgtgttgggagtcgaatcccgttgcggcgagcacgaggccgacgccgatggacagcagtccgctgcacagctggcgtgcgaaggtctgcgtgccgaggaacgtggctgagcggtatcgtccggtgacgatgtggtccacatccgccatgtaggggaacacttgccatggcaggtatccgcaaagggatttgaacgagaagaaccacagcgcgccgatgacggtgaacaccgtccatgccggtcgtggcatgacgcctgcgcacagccagctggcgagcagccaggccacgccaatcaaacagccggcgaaattgatggcgtagaggcggcgggggccgatagctacgaccgcccagccgaatgccggcatcagtggtagggagatcacggcgcaggtgagcagcatcgatccgaaggctgcggaggagccccaatcgtagatggcgaagaacaggaacagctgtccgaacaggtccattgagaccattaccatgacgtatacgaccaggtggcggcggaattcggcgatacgcagcgtggacaggtattcgcgcagcatgacggcggcgcgatgcgtccacgtccggatgacggaacaggtctgtccggcgggccggccggcgttccgatggacggagccctgtgcgccacgggagagcgtctcgtatacgccgaatccggcctcccgcggcgtcatctcccatgtggagtgccagcagatgacaatcgccagcgagaacatggccgtcactacgaacgtgaatcccatgtatccaccgggatggtcctcccccaccgtggccagcacaatgccgccgaccagcggaatcagcgtgcccgaagcggtggcgaggaacagcctcacggtggacagcgtggtgcgttcgctgaaatcggttgtcatttcgccgggaagtgtgctgtacgatgtgccgaacagctgcgcgagcatgacccacaccacgtagaccaagcagtacagcgctaccggaagccccggaatccatagcaggaagccgaccagcaccgccggcgccacgacggcgagcaccagtcggcggcgaccgaaccgacgacctacacggaagcggtagagattatcgcacagcacgccgaagccgagggccgcgaacgcgctcagaatggcgctcatgccgatcacgccttgcgtcagaccgatgtccatgccgcagaaacgattccagaacagcgcaaggtaggtggccacaagcgcgccttggccaccgccgtacagatcgcccatgccgtatccgatggccgacatgaacgtgaccttgcgccgtgttccagattgtttcacagtgcgtttcacgatgattcaccccgtgtgatttcgctatttgagcgcgatgacggtgaacgaccacgccggcgccgcataggtgccgtccatcagatcgagcggagtattgaccggcttggtcggcgattcctcgccgacctgtccggcatacggatcgttgccggccaggatggtggccgttgccgtcgctgcggattgcgcggagacgtcgagtccggcgaggatctgactcaggtctacatccaccggttcgtccatggcgttgaccacgcgcacgtaggtttctcctgccttggcgttgcgcgatacggtgacagtgcgcctcggctcgtccttgacctccgtgccgtccgcgatcagcgttccatcgatgtacagcttcatggcctggccgcggccggtaacatcggcgtgcacctgccaggtggtgcccggcaacacttcgttcatggagacttcggtgccggcgagcgcgtaggctgtgccgtcgcggaccacgcggacgctgtggcctcggccgaatgagacgatgttgtggtttttgccgtcgatgtcgccgcagatgagatccatgccccatttgccttcgtagtagacgacggtggcatcgatgctgtaggcgtccgtgtgcaggtcgagcggggtgtcgatggttctgccgtcgtaggacacgtcaccgaggttgaccgtttctccggacgcggtggtgacggtgaggttgttgaagtcggctttggcgttgcctgcgatgcgcagtctcactgtgtcgggcagggtgcggcgcagcgtggatgggccttcgacggcgacgggccaggcggtgtcggccgtggtggtggcatacatttgctgtacccagtagctgtagggatggtaggcgcgttcgttgtcgaagtagataaggtccgggttccagctgtggtggctgttcttggcgaacagcggggcataggaggccatggccaccacgtcgccgttgagttccatgcgtcccatgaaggccgcttcggataggccgttgatcagttgggtgttccaggagccgtattcgccgaggtaaaccttcgggcccttgcggtccgtgtggtcgtagtggtcaaggttgtggaaccaccagctggatgactggtaggagtgttcgtcgacgatcggcaggcccgcttcgcgcgcgtatttccaaccttcctcatagtccttgccgctgggggatggtccgacggtgccgacgacgacgatgtccgggtatgcggctttgacggcatcgaagatctgttggaagcggtttttgaacacgtcgtcgatgaggtcttcattgccgatgccgaggtattcgaggccgaacggttcagggtggcccatggcggcgcgcttggcgccccattcggtgtcggtgccgccgttgcagaattcgatgaggtgcagcacttcatcgatgtaggtgggcatgtcctcctgagccactggcaccgggccttggctggtgttctggcagctcacaccggcaggtagcaccggcagcggcttggcaccgatggtttcgcacaggcacaggtattcgtagtagccgatgcggaacgactggtggtatccccagaggttgaagttgtgcggacggtgttcgactggtccgatggtgcggtcccagtggtacatgttgtccatgccgaggccgtgggtgatgcagccgccggggaatcgcatgaatcgtggtttaaggtcggcgagcgccttcaccaggtccggacggaagtgtttgagcccgtggtaggtggtgcgcggctccaaggtgatgaaatcgagatcgatgacgccttctcctccgaaggtcagacgcaacgtgccctgcgtggacacgctcgcaccggctttgccatcttcttcgccgctttccggaacggtcagagatgcctggcatgtcgtccatgccgaggccgtgacggtgatggtggtttcgctgatgatgctgccgtcgtcgccgtgtagcgagaccgtcactggcatcgcgcttcctgatcgtacgcgcatccatgcggtgaaatcgtaggtttctccggcatggaataccatgccgtcccagccggtgttgtccagtgcggccggagcctgttcgatttccaccgtcgcgtaatgcgggttttcgacggcgaccgggtcgatgtcatggatgcagaacgcggcgaacgagccgtccggcacgattttgcgccagaaactgtagttgctccattctgcggaatcggcgcgattgtattcgaaggcgccgttctgcacgaggtcggcgttgagaccgccgtcgccggaatagctgatgtcttcgaagaagatgccccacaggtcggtgctgatggcgcgcacgcccgctttgtcgagcgttgcgatgagtttgtcggtcattgatgttcctttgtggatggttgttgttggatgtgccgccgttcgccagattggctcagtctggctcagtcgagcgcgaaccagaggcagccgtgcgcggggatgatgccgcggatgacgcggtcctcgccttcgccttcgatgcggatgtctggttggatgtcgtcgggcgcttgcgggacgtcggcccacaggtcggtgagtgtccagtccttgttgcgttggtcgatgccgacgaagctttgcagttggatgttgcctttgagctcgtatggctcgctgcctgtccagaagatcgcgccgtagtgtccgtgcttgtgcgccgatgtggtgccgtcggcccagtcggccgcgtcggcggtccatacggcaaggtcgccgagatagctgtcttcctcccaccagcgtccgaagatccgctcgtagacgatttcgcggttgttcaccgatcctgcggtcacttcgcgcagggccgggttggcgagcagtgcgatggtgtcggcgctgctggtgggcaggtcgccgccaaccatcagcggggaccggcccatgctccacagggtgagcagcgttttctgctcgtcgcgggtcagtttcgattggcggtcgtcgccgcgttcggcgcgcaggccgatgtgtccgagcggcagcatgtcggcgtcggcccagtggccggtgcgttgcatcggcgcccatcgagcgagccgggggaactgctggtagatgtcttcccaacggtcccagaggtcgtcggagatgcgccacatctgtgagacgccgcgtaggaaatcgacgtgggtgctggccacccagccgcccggggacagcgatagcgtaatcggccggccgtaggcggcttccgcacgttcgatggcgtggtggtatgcctcgatctcctccgggaagaacggcgtctgcatgtcgtcgaccttgaggaaatcgaggccccaggaggcgaacaggtcgacctgcgcgttataccaagcctgcgcgccggcgtcgccgcgcttgagaccgtagttgtcgtggttccatacgcaggtgtgctcggtgtcggccacgtccctcgcgtgcagcgtggtgcctttgaccggcaggttctcatgcacggcctgccgtgggatgccgcgcatcacgtgcacgccgagcttgaggccaagcctgtgcaccgcttcggcgagcgggccgaatcccttgccgtcggccgcgcttgggaagcgctgctcgtcgggaatctggcggccgtaggcgtcgatgcacagtggcgtgccgtcggagtagccgtgcgcgtgggcgttgggatcgaaccagccggcatcgatgaccaaggtgtcccagccggcgtctttgagatgcccggccataaagcgtgcgttggccaggacctcttcttcggtgatggtggtgccgtaggagtcccagctgttccagcccatcggcgggcgccaggctttgaccggcgcggacgtgtccattgggcggttgtcggttgagtcgacggaaacggtggtcgggatcgtcatcgaacctctcttcgttcagggccgctatggcgctgcctcagcaagagccgaacgccatcacgcggaccacatatatgtatcgttacatattctaacgcaaatccaaccggacgcaatcggcacaacatgtcggtgagtctctgtgttttcaacgattttccagaatcagaaagtatgatatcgttacatattaatcgtgtttttcaaggagcggcatatgaccagcagcacaccgacgctacgcaacgtggccgcggaagcgggcgtctcccccatgaccgcgtcgaacgcgctgcgcggcaagccgggcgtcagggaatcgacccgcgccaaagtgctcgccgcggctaagaaactcaattaccgtatcaatctgacggccagcatgctcaagtcgggccgcagcaacatcatccacgtcatcgtcaacgaattcgattcgccgttctattcgaagctcacgcaggcgttgagcaacgagatcgtgtcccgcgggctcatcccgttcatcgagcagacgcagtattcgccggacgccgccgagcatgcactaagcagcaacccgttctccggacagctgttcgatggcgagatcctgcacgccacgggcttgggcacgaacgtgccgctggccaaactcaacggcggcaggccgttcgtgctgctggacgcctgcgaggagatgccgaccgtcgacgccgtgaacttccccaacgaggaggccgaacgcgcggcgatgcagcatctcatcgaccgcggatgccgcaatatcgcgatcgtcggccaccggttcgccccccgcgccgatctggcgcatgcccagaacgcgttcgctctgcgattgcgcggcgcatgcggagcgctgtccgacgccggactgccctatgacgagtcgatggtgttcgaagccggggatgtggccaatggcatcatcgccgggcatgcgattgcggaacgtattctcgccgcacggagcggacatggtggcaccgagttcgacggcgcgtgctgcgccaacgatttcgcggcgttcggcgtgatacgcgggctcgcggaccgcggactgcgcgtgccgcaggacgtgaaggtgatcggattcgacggcgtgacctccggctcgtacacgacgccggcgttgagcaccatccaggtcgatttcacgcagcttgcgaaattctcggtcgatatgctgtccgaacgtatcgaccatggaacagacgaggcgttgccgccaagacgggccatcatcggctaccagctggtggaccgggaatctaccgcggtctgagcggcgcccggcagcggcgatccgccccggcaggcggcggccgcgacgaatccccctcaatcggaatcaatcatcatcatcattcatcaaggaatctctaggagcatcatgagcatcgacacccaggcctatctgttcgtgcatttcatcggcgaggagcgcatccccaccgacgagcagctgtacttcgcgctgagccgcgacggcgtgcattggaaggatctgcgtccggccggcagtccggcgctgacgtggctgggcggcgagaagggcgtgcgcgacccgcatatcgtgcgcgacccgcgcggcggattccacattgtggccaccgatttgagcatccattaccgtggcggctgggggccagacgacggcgcggacacgaacggttcgaccggcctggtgatctgggattcccccgacttggtccattggagcgagcctcgcctcgtggacgtggcctcgaagattccaggcgcgggcatggcctgggctccggaggcgaattgggatccggatcgcgggcagtggatcgtgttctggtccacgaagagcaacgcggacggctccgcggatccgttagccaacgagctcggcgacccgacgaacgtgtattatgcgacgaccgttgatttcaagacgttctccgatccggtcaagtggatcgaccgcaggaacgtgatcatcgattcgaccatgctgcgcgacgacgacggctggtggtaccgcgcgtccaaggattcggagatcaccatcgaacgcacccgcaacccgtatgcggtgacctacgaggtgctgcgcaccgacgatccgaacgcatggtcgtatgtgggcacgctcactgacatcttcggcaacggccgatattccatgcattatctggagggaccggaactgttccgttacaacgaggcggacgtaaaggacgtcaacgggcggccgatgccgttcggcctcatgtgcgaccagtacgcggaatccaagggctacctgtcgttccgctccgcctcgctggcctcgcgcgatccggccgattggcagcgcgccgacgatatcgatttcggcgcgctgaagaagcgccacggcgcgattctgccgattacagccgccgaatacgacgccgtcgaaaccgctttcgccctgtaggcgtcgcgatcgtacggttatcgcgacgtccacgtcgcactgccggttcccttacgtcattcttttgactcgtcatgcatattccgccgttccagagcgatggaacggcggaatgccaacgaaaatctcttttgcctgccatttgcttttcttttgattctagaatcaaaagaaaagcgagacgccaagccgacggggaatcgcacgcgtctactcgaagcgaaggtaggcgatgaacgaggccggcacgtccttgttcttggtgacgttgccgaaaccgaggataacccctttatcaggtagacccttcgtcgaggtccacgtggccgatcgcgacaaatcgaagccgacggccttgtcgatgtccgacaccggctctcccttggcgttgaccaaggaatccttgatacgttcgagctcggcggcatccatgacttcggagggcttggtgatttcgccgcgccgattgacctcggcaaaggtcttggcgtcggatgcgatcatgttgacctgccccgcggacaccatggcgagcagcttggtggagtcatcctgcgcgttcccacctgccgcatcacccaaggagattgaggcatccatgctgaccaagcggccgtccgtaataccttccgattgggcgaaaccggcgccgagcgaatccagttggtccgagcaacggctcatgttgacgccttcgaaagacagcaccgggtctggcgccttgatggcgtacgaaatgccgaacgaggcggcgatgccgacggccagaaccgcaacgatggcatatgtcaggaaattatccttgaaatacggccatttttcgctcgccggcagttctcggaatgtcttgagcttcgactgcttcgcatagacgttggtctcggacagttcggagaccgccgccttctgctcgtcagacagcacgaaatcgtccctgcgttggttgtcggtcataggttcccgccttcgtcactcgtcgtactcacccgcgtaggaacaccgtcatctcgttctcgccacggttggcccatgcgaagtatgggatcagcgtggccttcgtcgccttgcgttcggcgggacgccaatcatggtacaacgtggaggtctgcgcgtcgtcttccatttcgagccaggcgggaatcgtcagcgtggtcatcggcatatcgacggcgtccacttcgccgagcccccgctcgtcctgtgcggcggcgccggcatggaagacgatgcgatcgacggccacgcaggacggatcggacgcgatgcgcgcggtgtcggcgtgcagcagatgcaggttcgcaccattgtcaacgccttccgcgcagtaggccagcggcccgcgcacgaacgccaccttgccggcgtcctcgcgcacgagcggattcgcgccgaccatgcggaccggcatcgggaaatcgaaatcgacgatgtctccgtcatgccatgtgccggtcaggtacaggtatccgttcctgacggcacgggagatgtcgtcgcggccgcgcacgatgaccgcatcggaagcgctttcgccaccggcccaggctggcaggcggaaggcgatcgtgaaaaccgcgtccttggatgcgtcggaagcagaatcgcctgcatcaaagcccaccgcgacggatcccttgccggaccaaggcatatcggacgtgacgtcaaggcgcacatcggcgccggaaagcctggcatggacgccgccgcccatatacagatgcatatacagggtggatgagtcgtcgccgatcgtgtaggcgtactgctgcacgtcctccacgatgcgtgcgatgttcggcgggcagcaggcgcagccgaaccacttctggcgcaccggctttacgtgcgccttgcgttcatcgcgatggcatgcctcgggcaccacttcgagcgggttcacgtagaagaagcttttgccatcgagtgccatgccggcgagcgtggtgttgtacagcgccgattccatgacgtccgcatattcggatttcggctggatctccagcatgcggcgcgcgaagaacgcgagcgcgatggcggcgcagctttccgagtaggcggtgtcgttcggcaggtcgtagtcgaaggagaaggactcccccatgtgggtggcgccgatgccgccggtgatgtagagcttccggtcgatgatgttgcgccatagtcgttcgcaggatgccagtaggtcggggtcgccggtcagtcgtgccacgtcggcggatccggcgtagaagtaggcggcgcggacggcgtggccgagggcctctgtttgttccgtgatcggtttgtcggcttggtagtaggcgtagttctgttcgcgtggctcgtagttgcggccgtcctcttgggcgcggcgtcggtcttcgagttcgaagtagagcggttgccggccgcgttggcgtacgaagtattcggcgaggtcggcatagcgttgttcgccggtggtttcggcgagtttgacgagtgccatttcggcgatttcgtgaccgggataaccgtgcagtttgccgtcggtggcgccgaatcgggaatcgatgtagtcggcgaaacggcaagccgcgtcgagcagtttgcgtttgccggtggcttggtagtaggcgatcgcgccttcggtcaggtggccgaagcagtacagttcgtgatggtccttcaggttggtgaagtgccggtccatgccgttgaggatgtagtaggtgtccaggtagccgttgtcgagttgcgccgcgcagacgatgtcgatggcggcgtcggcggttgcctcgagttcggcgtccggatggtgggtcagggagtatccgaccgcttcgatccatttggagaagtcggtgtcctggaatacgaagccgtagaacttgtcgggatcggagtgtgccggatcgtccggcagggcttcgaagcctcgaaacgtgtatttcggcggcacgaaggccttaccttccctgcggtgctcggcgttctgcgcagcggcggctttgaagttgtgcatgcagtagctgggtgcggcgccgggcacgttgtcgttgagggcgttccactggaacgggatcacctgggtgcgtacgagttcctgccgcgatgcccagaatgggtcggtgatcgtcgcgtccttcaacgcgatgggatgactatgttgcgtcatgctcattcccttcctgattgtctatttcgattttcggcggtgcgtttcagtaatggatcggagcgacttcttccggacatgcgtcgtatggtggctttcgtcccattgccacgtcgtacattccgacatggcaccggcgcatcgcctgagccatttccggatattcctgggaacatacatccacgagtccgatttgatagttttcgccatcaaaacgtcccaaggcgctttggtcgttgtactggaagtaatgcgcgccgacaaaataccggcttcgcaaagcctgctcgacgtagtatcggtaagctttcccgcgatcctcctgcgtgcgcacaccacgaatgccatgcgcgttcaatccccggtcgagggcaccgtggtggaattcgccgaccatgaccggcatattcagcgtttttcccagctcatcgacctgatgataacaggtcatctgatagctgttgatggagaacacgtcgtagcaatcggatcccgcgagcaatgtgggatcggtgatgtacgcgtatcgcatgccaagattcagatggtgcgggtcgactcggcgcaaagcttctgcgggaatcctgacgtatctgtcgatcatgaggatactgaagtcacgcaaatcgtgcatgctgccagacatctgccgcacgcaacggtatcgggggcacgcgattaggtcttcgaaacactcgatgccggaatcgtcgggaatccgccatgcctgtttccatgcctgcgcatcgccatggtaccgatccaccaaccatgcgaccaaggcctctttggaggccagacgctcgggattggcgagcatttcctcggcaaggttcagatcatatacgaacgcccaattgggttcgttacgcatgaagtagccgatcatattgcgatcgtcacgccaatctttcaggccctgtgcgtatacgtcggcattgcgttcgtattccgtcgagaacacatcggggaaatcacggaacaccatggttttggtgcggggatattcccgcagcgtatcggcgggcagcacataggggatgcccgcagtgcgcatcagctcgtggtccgaccaattgccgatggtgttcatgccccagtcgtggaaatgccgcagtacgatccgtttccatgcgtcccatgccgaagcgccgaatgcgtgacgtagattggccatggcgtaatcgtatgagcattcgaaaccgcaatacgtgttcggagcgctgcggattgagaaatccggatcgccaatccgttcattccgacgcgccgcatccaccagttcccgtacatgccggtcaacccaaggcaataccggatcgactctggtgtcgatgccgggattgacacagtcggcgccgacggagatgaatgcgttgccgtcagggtcgagcagccagaatcgtccgtcatcccccggttcacgccatacacggaaccatccggtcgcctcggcatgcacatcttgacatccgccataggaatcccggtttagcaatgctggcaggccggccataccgcccgcaccggatggcatcggttcggccaatcgatgcaacgcctcatcgcaggcggcacggttggtggtctttcccggccattggcgtggcttccattgtcccatctcatcgataagcgcatgcacgggcggatccgcgtgcgcgatgacgtccgcccattgcaccggccacaccttcaaacgtctgccatcgcaactcgcatcagacgataggacaatgctcgagacatccgctttgcgtagaggtttgccgaaaatcgtcatcttcagacggccaggggtgcgcggagcgaacaacgtctggccgtccagccaccgcaaatcgaaatacacggtggtctccacgcccggcaacagtccgaacagcgcgtacatcgtcggatccgcgccacgttcgcgctgccccgcctcgtagaattccaaccgcaagcacatggagtactcgtcgcatccccgcaaccgcaatgcgagaaactccgcttgccgaaacagttcggcggccggcatggtcttgcgatcgaagatctccgccagcgccttgcctgcggagcatgtcaatgtccgcccgccatcaaccatattgtcgttcataagtgcccttgcccgtcccgtctcagccgatgtttccgtccgccttggacagccgttcatattcggcacgcgtcagggaaagaaccccgccatgcttggtgtgcggcgccatgaagaaatcggtggaacgaaggtagtcaaagccgcggtcgggatcggaactgaccataggtctgtagccgatggatgggatcacatccacatacagataccacttgtcttcgctgtgcgaggcgaacagggccggaccctccactccaccgggatggccgttctccgtccaatcgacgccaatgttctcctgcagcaccgtccattcggtttccggcttccaccattgcacggcatccgtcgcatccagccagatattggcctgaggaccgttgtctttggtggcgcggtatgtgcgcacggtgccgtccggcaaggttctttgcagcatggtggtgtcgatggtcgggtgccccctgtcgatgaacactccaccgaatgagaaggtctcgtttgtgaagtctgtggtcacgccccacatgaccctgtcgtacacgtcgggattcgtgtggtcgacatcatcatcggagaacagggtgcttgaccaatacaccacgaaagctccacgaccgcccgcatggccttccggataatagtcgggcacccacaatgcctcaggggcccacgccatgcccagctgcgcgtgcgtgccatccgcacgtttgctcatgtcaagcatgcgcggagcgctccaatgcaccagatcgtcggattcccagatgatcaggttcgtgctgccgtgatgcgagaacttgtaccaatcggctccggaatcggaaccgtgtccatcggagaacaccatcagatccgtggcgaggatgtacaccttgccggtttgcgggttacgcaccaagtatgggtcgcgcacgcccctcgtgcccaacggcgatgtcagtatcggcttgccgccgttcaaaggattccaatgctcgggattatccccatcggacaaatcgaggtagattcgttccgcatacgcattcgggtcctcgataaagtggaccagcagatagccgaatggctggctttctttagattccatggattctcccaatgtccagattctttctacatcgttgtatagttgcttcacaaagtattatcccacgaatcccgccactgcaggacggcccgtcgatcgtcgatgtcgatcggcagggtgaccaacggggaattgcccagatcatccggattccaacgatcgccgatgtacaggaaacgaccggcgtgccattggtccgcgccatcgagtggcacgatgatgtcgcattgcgactggtaggtgtgtgagccttccggggtgaacggggtgaaatcgctccatggaccatgcagatccgtcgccgtcgcgaacatattgtcgttgcaatcccaacccgtcagacaggaaccgaaccagtagtagacgccgtcttttttaatcaggatcgggctttcatagccggcccagtaattcgtgccccgcaggcaaatcacatcttcgacgatggacaggtaatcatcggaaagacgatagatgtgcgtgccgtgaggccgatcctcgctcaaaatgtacccgactccatcctcatcttggaaaacaccgatgtcgcgcgattcataaccgcggaactgcatcgtgttcagaaactcgaatggtccggtcggcgcgtccgagatcgcggtgccgatatgcgcataagcgtaatcgcctttgccgtcgacatgcagatacatcacatactttcccgtctgtgggcatcgcatgaccttcggacgctcgatgatacgctccggaccggtgatggaaccgtcttccccgacttccagcaccgtcccctcattgcgccacgtcacgaaatccgtggttgaatagcaggccacgccctggaacaggttgccgttgtttttgatctcgccatacgcataccaacgatcgccgaaccgctgcacgccaatgccgtgcagctgcgcgacctcgccattggtgtcgcggaacagctgagctccttgcatgattgccataatccgattcccttcttatctgtgtgtttatttcgggctggtcgatcgtcaacgatcgaccgagcctccaagcatgattccgcgcaacgtgcctccgcgttcccgcgtcgattcggcgtacagcatcaggtcgccttcgccatggggcaccacgaacagatcgccgcgccctccagcgaaaaccgtacccggcaacggtcccaacacgacgcgtcccaagcaatactcatcagtgaacgccgtcagctgcagaccctcgccatcaaaacgcacgatggtgttatttgagtactcactaccccgaatggacgcgccgggaacacgtatccaccgcccttcgccaccgggaacaagcaccggaagcgatgcacggacatacgtcgcccgcgcgcatgatgcacgcagttccttcagtccttgggattcgcaggtccaaccggtcaattcatcgcctaccagcaatgcaatgcgtccggcatcctcaccccacatgcgattcacgacgatggacagctcactgccgtcaggcacttctcccagccacagcgtcggagccagcggcgtgatgatgccgatggtccgaccgcccacacgcacttcgcaacgcgtctgcccatgctcgatatgaaggcaggcggaggccccgcccagcgacagcgtacgcgtatacaccaaagcatgaggccaggccgtcgtgctacgcgaaccgaaaccgcagcgcggcactggagcgtcgccaagcaccaaaccgttttcacgcaaccgttcggcgttgtccggatccgtacggttatagccgacgcgccatcccgaaccaatatccaatacccgttcaatgctcattgcgccgcacatgccgcgcttgccattcaaccgcaaggcgttcaatctggtgtcatcgaaattcgaatgaccccagatacgtgtggtgacgacgatatctttggtatcgtcggcaacgggctcattgaaaggaatccacgcatcgacgccgccgcaggcctgccaatcagtgcctgaattcccgcatcgcacgttcacggtatcggcggcattatggagcaccactcccaaagcgccgcgcatgttcgtcgccgcgcggtaccggccggcaccggaatacacgcccatgtcctccaatggcagcgcgtcgtgcaagacgtcgccgtcgcagagggtccacgacggccaatctaaggaaatggccacgctacggacgctgctgtgtggagcgcagccgagcaccacatgatgttcgggctgggtgaaagtgatgcgccatgacgattgcccctggccgatcgtcgccgtgccatgatccccttgaaccacaatatcgccgttcaccatatgcgcagtcaatgcatcagtatggatatggatatcgtccgccttgatgccatgcgcgggacggataatcgctccaaaacgccctggtgccatagtcggtgccgacaacgtaagcgtgtggccgctttcatccaactcaatcaattcaccggaagtcgcacgaagcatcatgccgtcgcccaatggcagacccgcaacgaccatcgctccggcaccggccggcaaggtcagagctggatatccaccatcagacagggcatcgtcgggcgcatcgccgatgcgaatatccgcagcgtcatcggacacgttggtgaatgtcagcagacgtccgccaccatgcagatccaatgatccgacggcaacgccgacgcgcgtctcgtcaaatcggtcgccttcagccgaatcaagatggattcccgtcaatcggtcatcggatatcgtcgccgaagccagccgctcgcccaatgcgtcgatgatggagcaaagccgacgcgcgtcatcggcatcgggacgctcctgccccgtagggtcgatcacaccgccaaaatcataatcatgggtcatgtacgcttcgacgcgaccccaattattcaccgaagtaccgtaatcgaaatcccatccggaaacctgcaggaacggtccgacgaaacgcgctccattgcctaccagacgacgcagcgtacggtgccaacgattggtttcggtaaccaccaacggcacgtcataggtatccgccgcccggcggtagtaccggacctgtgcgtcgacgtccacatcgttatcgcccggatacagattcacggctggagacacgtcttcagccgtgccgccggcccgaagcatatcaccttggccggcacaggcgattataggaacgtccacaccgtatgaacgcatcatcgaagcgagcgcaccaatatatttccccggctcatggcaggcgtaaaagtcgagttcgttatccgcctggacaagaatgacgacgccgccatcatcggcatcggcaccgcgatactgctggcgcgcgatgatcggcatgattttgccataccattttctgacttcgccaaggaacgcatcatcatattgacgaacatgcgttttcccattcgtagacacccacgcggggatggcaccgccatcccattccgagcagatgtacgggcccgggcgaaccagcgcgtagagccccacctcgtgcgtcaatctgaggaattcctcaatatcatgctgaccttcaaaattccatatatccggttcggtttcatgaaaattccaagggatatacacatcgatggcgtgatatccgatgctcttgacggcttggagcctttgtttccactgttcccgcggcacacggaacgggaacagggaagcgcacatcaacacacgaggccggccgtcgatcagcagacggttatggtcgaaagccacgaatcgagacatcatttttccttaaaaatgcatcgataaaggtcatagagatccattggtataaggaaggcccgtgcaggcattgacagaagcttgcacaggcctcccaatcatgcggggaacagtagaagaaccgtcccgcatccattcgcaggcgatcagcccttgacggcaccgatcatgacgcccttgttgaagtacttctgcaggaacgggtagatgacgagcagaggcagggtggagacgatgatcacgccatatttgatctgatcggcaagttgctgctgctgcatggcgttctgcccgccggaactcgaaccaagctggttggtctggttcgcgagcaagatgtcacgaagcacgttttgcaacggctgcagaccactttcacggatatagataaggccggtgaagtagtcgttccagtggccaacaaagtaatacagaccaataaccgcgatgatggcggagctcagcggaataaccactttgaaaaaatatccgaagtagctaagaccgtcgatctgggccgcatcatgcagatcctctggaatggatgtttcgaagaacgaccgagcgattatcaggttccacacgctcaccgcccccggcaggatgaacacgagcgggttgtccagcaggccaagggccttgaacagcaggtagttcggtaccagaccgccggcgaaatacatggtgaaggtgaacaggaatagaatcacacggcgcggcttgaactcgatgcgagccagagcaaatgctgccggcaatgtgacgatgaggttcagcgctgtaccaaacacggtgtagagaatcgtgtttgtgtagccggtccagatacgcgaatcctggaaaaccctgatgtagccggcaacggtgaagccttttggccaaatggtgacgttgcccgcggaaacctgcatctggtccgagaacgaagcgacgacgatgaaccacagcgggtaaatcaccaccgctacggttgccgcgatgagcacccagatgacgatatcgacaatccaatcaccgacacttttctgctgatgcatgtgcttgttccacggaatctcatcggcgctcgttttaggcgcaacagatggggaaacgcttgcattagtcataatcaattcctccttgcgattccctcattagaagatgctcgtatcggatacgcgcttcgaaatccagttggcgataatcaggaacgcgaagttgataaccgtgttgaacaggccgattgccgtgccataactgaactggaacgattgaataccgattttgtaggtgtacgtcgagatgacttcagatcccggcatgttcatggcattctgcatcagccataccttttcaaagccgacgttcagaacggaacccatgttcatgatgagcagaatcacacaggtcggcatgatggtaggaatatcgacataacgaatcagctgcagacgtccggcaccatccatcttcgcggcctcatagagactcaggtcaacagaagagagcgccgccagatagatgatggcgttccagccgacgtgctgccagacttcggaaatccagtaaataggagcaatggcgtttgcattgtcgagaatgctctggcttcccaggaaacgccccagcagaccggtcttcggagtaaggaagatgttcagcatggccacaatcaccacggtggaaatgaagtggggcatgtaggtgatggtctgcacgaagcccttgatcttctgcgagccgatctggttgatgagcagtgccagtacgataggggccaaaaaaccgaggaccagagttcctaggctgatcttgaaggtgttgatcatggtcgatgcgaacatcggcgacttgaagaactgctcgaaatactggaacccgacgaatttgccgccggtcaggcccttcgccggaacgaattcgcgaaacgcgagctggatgccgtacataggcacataggcgaacagtccgacgaaaatcatcgcgggcaaagccatcacccaaagctgccaataatgcttgaaatgccagccgatgcgcttgggaagcggccaagatttgcggacggcgttattgtcgatcacaccgttttcatcaactacagaaatggacttgctggacaccattatcctccttacaccatagcggaagcccgatgtggacggggacgaatccccgcccacatggccctctggcttacttgacgtacttgttgtacgccttctgccagatttcggtgttctggtcgatgttgtacttcttcaggttctcctggaaggcgttccactgggaatcgtcctcaacaccaccttggctcagccacttggacacaaccgggatggcgtagttgaacagcgcagtgttgttgttcgccacggtgttctggtcggattcgccgatgcggacgtaaatcggcatcagatccttggtgtggtcgtagtgggagtactgctccttgtacggcttatcagcgttagcaacatggtccatgccgcggtcgccttcgacggtgacgtcatcggaaacccagccggccagacgatcttcgagagccggaatcttggacgcatcctgggccttgtggaacttctcggtcaccttgtaggagtgggctccggtcttcttcacatagccatcggagaacgagccgaagagctgctgaatcgaatacttctcggagtagagcaggttgatcaccttcaggcaggcatctttgttggcggcgttcgcggacatcgacatgtggtagtcctcgtaacggttggcctcgctggagccatcccagacggtgtcttcggcggacacgccatccgcagacggaatcggaatggaaatgtactgattcgcaagatcggaaccgtaggaaccgaaagcggattcatcccagccgaacaccataccgaccttggcggtcttgccatcggactggttgcgcgcgttgtacttgtcgtccttgacggtcacccagtcagacggcgcccagccgttcttgaccatctcgtggtagaactcgatgacctgacggaactgcttggtctgcatccagttggcgaccttgccgttcttcacgtagatgccctgctgggacggaccggagttgaagtgggtggcaatgccagtggaattcatcatcaggaacgggctccaccaatcaccgatcttaccggtattcatctcgcgcgggttgaaggcgatctcatcggcctggccattgccgttcggatcctgggtcttgaatgcctgcatgaccttgcgcaggtcatcccaggtcttcggcaccgagaggcccagcttgtcaagccaggtcttgttgatcatgaaatgctggccggaggcaaggaagcccttggtacgactggatggcaacacagtcacttttccgtcgacggtgacgagcttcttagcggtaggctgttccttgaagaacttcttgacattcggcagcttgtccagatcgttgccaagctgctcaaaagctgaagagtttcgagcggcatcatccgggttgaaagcgcgaatattcaaatcggaaatctcaccagcggcaagggatgcgttcttctgctgaccccactgatcgtcggagacttccttccattgaatggagcaatcacaatccgcctcgagatccttggtccacgacatatcggccatcttggtttggttagagttctttacaaccagaatggtaacgatcggcttgccattggaatcggtggtggccttgctgcttccgcaagctgccaacgagccaagcatcgccaatgcactgatagcggcacccaccttgactgccgtctttctacttagcattagtccagtcctttccctggtcctttccgataaagagcgccagttgcccttccacggcattccctttaatgccattgcttatcgggttgctacctcccttccgagaaatcgcaacgattcgattatctatcagaattccttgtaagtcaaatccacccgacacacgtgtaaaacccagaaaatacctgtagtttaacgttttactttgcacaaaagccgaaaaaaatatcgcaacgattcgattttcccaaatttgtggctatagtaggatggtaaatgatattgcaacgca

SEQ ID NO: 1250 - DNA, 32868 bp, Unknown
  R81_24m  MAG No. k141_31297
caaacacaatgacagcagatacggccggttttttcccatacgcgcgggacggccggatgcggggagaacacgcgccccccgcatccggccttcccgcgcgtatgggaaaaaaccggccttatctgctgtaattgtgtttgtgggcgattgaggccataatgtgttttagatcgggaggtggtttgttatgcgtacgtatcttcgtcgggcggaggccgcgaacaggttgcatgtgtcgaccaccacgttcaagaccctcgtggcccaggggaagatcaagtattccctgtctcccggtgggcagaaggtgtacgacccgaaggaaatcgaccgtttcgcagcccaagcgcaaggcagggagcccgccgaaggggtgctcgtgttctatgtgcgcgacagcgagggcaatgcggcccggatgcgcacgcaggaggaacggttggaacgggcgtacggcgcgccggcgaaagtgtatcgcgaccgcgcgtccggtttgaatgagaaccgcaagggactggcccgcctgttggatgatgcggaggaggggaagttcgaccgtgtggcggtgaccgccaaggaccggttgagccggttcggcgccgcctacctgcaacggcatctcgcgttcctcggcgtgaatctgatcgtgttggacggagaacgcgagaagggcatgatggatgagctcatggacgatttcatggccttgctcgcctccttctccggccggttctacaagctgcgcagcatcgagcacgagaagctgctgctcgaccgcgcgaggaagcggttagaggagcgggagcatgaaggcgagtgagatcgcctgcggcatccccgacctcagggactaccggctgtacgaccatcggaccgggaaccccatcgacccggtggaagccgagacgcttctttggctgcacctggaccattgccgtcaatgccagaaccggatggtccaggacccacggaaccgtggcctgaaccgaagcgggaacgccgggcgcgggaacgagtgggcgaggaagaacatcgctttgacgggtctgccgtccaagttcaggaacctgtcccatcagaatcgcgtcaaccagtgcgaagccgcccgtctactgctcgcgtggcgggcgcgcgaggacatcgccaccgccatcgactccataggctggcagaaagccacctacgacaacgtgctcgccctgatgggcgaggacatcgaccgtcagctgttcacgaacgtgctcgacagcggcaaacaccccgcgttgccgacggtggagcacacgcgcttcccctacgaccagtcgaacaacaactcctgcggcaaaggtgtcattgatcgtgggcggggcgtcatccggtacgagcgggtggctgtctacgacaggttcgtggacctggagatccacgcgccgcacgtgatgcgcctgcatccggacctgacgagagtgtcccgccccacgttgcggtggaacggcgaatgcgtgacctgggacctcgtggcgttcgagcccaagcccaggaaaaacgatgtgaaccaggtgggtcatgtcgtcggcttcgacctgaacgccgactggcatggcggcatcagcggcgcccgcctctcctacacgggcaacgtgagccgcgagctcgtcgccggcgtggacacgcgccgccagcaggagacgttggagagactacacgtccaataccagcggtgtctgaggaagctcgacaggctcatgccctggcagcggccgcacgacccggacgaccccgtccaggtggacgcgcaccccaagtggaagcgcctgtacgagcagtcgctcgcattgagggacaagacgtaccgggtcaaggaactcctggactggcggtacgcgcacgacatcaccgatcacgcgaaaccaggcgagctgatagcagtggagaaattgtccccgttcgacgcggcgggacgccacgagttccggcacggcagccaactcaggaaactggagcatgtcgcggacaagaccggccgacgcgtggtccaggtcaacccggcgcacacgtccgacacatgcccctggtgcgggaccgtcaacgacgtgggcaaatcccgccgataccagtgcgccgactgcaagcgcaccatcccacgcgaccatgggtcggccatcaacatcgccaaacgcggcgcacgctacctcggccacaaggtccaacccacgccacgcaaaggcagggcgacaccgaaacgaccaccacgcaaaaccatggcaccggacacgcgcgtcagaacactcttggacagaaaaacgtcaggaaccggcaaggggccggactccctacgggccaggaccactccactggaatggcacagcccgtcgacggcgactatcagagataaaaggaaccggaacatccccgcacaccaacgggaccggatacacccgggattacggcaggaaccataaccacctcatttctgataaccctaggcggccgggtcgagggccgcggcccgcctggtggcgagcatgcccgcacggcacaggatcgacgcctgggcgggcgtcaggccgccgccgaaccgtcccatgagacggaacgcgtcctccatgagaatccggtccgttccgggcagtgtttccaggcatctggcggcacgggcgaacacttccgcatcatgctccagcatggcgtacgcgtccatcatgcgcgtcccgccctcacggctgatgctctccgccgcgcgatcccaatccattccggtcatgcccccgtatatgcgttccggccacccgcctgtcgctcagccatgccaatgcccgcgcatgcgctccggcagccgccatgaggcggcgttcggcaggccgaacacgcggccgagcctgtccatgtcatgtcccgtccacccgtccagggggacggggatgccgggtgagggcgtccacccgtccgtcatgaaaccgccggccatgacggacgccgcgtcgcccgcatgctggcgggagcgtgccgcgcacaagccgtccaaccgttccaggatccccgtgttcccgtcgccgcggccggccgacagccacaggacatgcgtgttccggcaggccggatggtcgagcaccctgtcccaccggcggaacttcgtctccaatgactgtccggtggacgcggtcagttccacgcatacgagcaggccctcgccgatgagcgccagatcggggccgccgtggcccatgatcggatcatcgcagatccggtcgaaccggcaccacgcctcccccgcggtcagccacccgtcgcgccgggcgcggacggcgagccccgtgcagatcaggttgtgccggtcgtactggcgttgcccgcgcaacggcccgggcccgatgtccgcgatttccgcgggcgtgaggcccagccggcgcagttccgggtcgatcgcgtggtggacgggcaggcggacggccatgaagcccgcgttcttcggcccccatccgccgcgcccgttcacgttgatggggaagcccaggtcgatgaggcgcatgccggcgagcatcatccacagcgtggaccgcgggtcggcgggcagccgcgggtcgagctcgtggagttggcttgtctcgcaggtcctgtacgagcggatgagcgcgagcgccgccccggtgacgggggcatgccgtttcagccatgcgcgcgccttctcccggtcggggagccatgcgggcgggtcggccacgcggctgtcccaccagttgagggccgatccggccgaccaccatgattcgtcgaaagcgtcgaacatgaggtccggctatgcgggtcgtccgcgtacggcgtgtcgccttgcgccggccggaatgcggggtggtggcgaaacgcatggtatgcgtcccgggacgcatacgcgcccgcatgtcagacgataaccttgcatgcactcccgcgcaatgggagcggatcatcagccgatacgccgacccggcccggccgaactcgccggcgggccggatcgccgccctgctgcgcgacgacgcgcgcgcctccgacctggtgcgcgaatgggtcgaggaccaggccatgcgatgcatggcgaaggggcagacggtcacgcccacgctcctgaccatgatctgcaaacggtgcagcaaggaggcgatcctccacagggagctgggcgtgagcgtcaaactgctgcgcgccggcgccgcctatgagaaacgtctcgccgcataccgtaacgatcatgcgtcggcgcgtcccccgcgcgccgtcagggaacgcctgtgggacgaggcggtggacgcgcatatccatggtcagatggagcgcggcgtgagcagcatggtgttcctgccctaccatgacgggcgcaactcgcgtccgggctcgtcgaacctgctcgcatgcggcggcctgccggaatgggaggcgctgttcggatcgaagcggcgtcgtttcgccccgttggaggatgtggacgaggatcatgatccggcgctcatggaccatacgggcggcgaaccgttcgaggtgaccgcggaatggctcgaacggcatgggatcacgcccgccatgctgaaccgtctgaccgacacggagctggccgtattgggcgtggacgtcaggtccgcgcgcctcgaatccgcgggcggcgtcctggacggggtggcgggccgcctcgacctcgtattggacgatccgcgggcgagccaggccctggcggccggccggccgatgctgggggccgtggagatcctccactcgctgggcatgggtgtgggcatgatccgggcgggcatgcggctcggccgctggtcgcgggccggggacgtgcacaatccggacatgctgcgcgccgcatgggaccggatcccgggccgtgggggcacgtacgacgagtatctgcgcgccgtgtccgacattctcgacaaggcccacgccctcgcatagcgaggcgatgaacgttgtcttcccggggaaaggagacccgtcatgaccattgacgcgcatgggagaagccacaggccgtccggactgccccaagggtatgcgggcacgtatgacgggagcacgggcgcgtccgggggcatggacgtgacgccgccctcctcctattacgacgggcgcatgggcgaggcggaacatgccgaccggccggccccgatccgaaactccatccggccgaaaccctcgcatgcaggacaattgcgccgtcttctgggcgacgatccggtcgagggaagcgtttcgagcgtcgccggatcgtacccgggcccgaacgcgcgcctgtacgccgatttcgtgcgtcatccgcgccgccgcacctacacgctggagggcgagaccatgacccgctcccaggcccgcgactacgtgcgaggcatgttcgtcgaatcggcgcgcaacgatgccagggcgtggggcgacgggtatgatccggacgtcatggccgaacaggcaggcgactggttcgacaggacatatcccatgccgaaacgacgttgacggacggaaacggtatcatgggcgaccgtgaccggattcatactgatctttgccctactgttccttctctgcatgatcgccatgccgttcatccccgtcatcgtgatcatcctccagcgtcggcataacaggaaacgcgcgcaaggaggcgtgttcgtctcgcatcggagcgaatacgcgaacatggagccttcgcccgcggatgtggcgcccgtcgccgcacgatacgggataatgcccgatgcgcgtggatggatgggatggcggtgcgtgacgcatgatgcgggcggcatgggggacaacattcgcggggtcgccgcggccgtggatctgaacggtttggcggcatatgggcttgtgcgcggcgtgcccggctcgggtctggaagattcctcgttcgccgcggatcagataggcgcgggcatatggggggaaagcctgctggcccgcgcgatcatggccggccggccgcgagtcttgtcatggtggagcctgtacggtttcgacgaatgcctgcgcctgtcggacagtgacatcgactgcgtgctggtcgggattcgtcccgacggcaggcctgtcgcatggtttgtcgacgcgaaacggtacaagggcggttcggatacgagctatgtgaatgtggatgcgtggcatctggcgcgcgtcagccgggcgagacgcgcgttcgtgcttgactccgagggccgcgcgtggacatcgatgagtccgaacatgtgggagcagcgggaacggtggcagggtctgctggcccgatacggcgtcgtatcgtattgggtggtgtgcgtgaccccgccgggcgggcatgggacccccgatatgaccactgccgtatggccgggtggtgtgacctgcatggacataccatcgcttcgcgcgatggtcgattccgtgtgtgttccggacatgttcgccgcgatcccgcccggactggtctccctgcttgattcgcatatcaaatattgatgcccgccgtccctccttccaatgcgtccatgaccgcctcgtgcagcatcatgcggccggtcaatacgtcgagcttgcgacggtccacggtgttcgactccaataaccggtggacgcgcaccgtccttttctgcccctgacggtgtaaccggtcgcatgcctgccggtagtcgtcgaacgaccagggcagggaggtccacacgatctcgtgccccccgtcctggatgttcagcccgtatttcgcggcctgggggtgggcggcaagcagcgggacgcggccgttgcgccattcctccagcacgccttgctcatgcacctcgcgcatgccgggaaagcgtgcgcgcatgcgctccaattcgtcggtgaactggtagaacacgagcaccggaccgtccgccgctgatatgatgtccgccaacgcgtcgagcttcacgttgtccacgtgccggatcgtgccttccggatcatccgcgtccgggtacaggcagccgcacgtcaattgggccagcttcgcggtcaggacgcccgcgttggcgacggtgacggtcatcccgtcatccaggtcggcgaccatttcgcggcgcagggcatcgtacgtgccgcgcgtcgcctccggcatgtcgagccaatggtccgtctcgatcatggacgggagcccgggcagcctgtcggatgccttcatgctcaggcagaacggttcgatgaggtcgaggatctcccgttgggcgccgtcgcggggcgtgtagtcgatgggctgccggcggccgcccatgtcgatgtaccgggtgggcgtgaaccagcggtcccggtagcgggtcatggaccgttccaacgtttcggaccggtcgatgaccgcgatttcgccccacaggtccaataggtttttggtggcgggcgtgccgatcagtccgagcgtccaacgggccttcctcgcatgacggcgcaatacgagcccccggttggagcggggcgtcttgtagccggacagttcgtccacgatgaggcccgtccacggccagtcccccaccttcccgtccagccatttgaggttgtcctgtccgatgacggtcacgtccgcgccggcgtccagcgccttcgaccgttgccgcggcgtgccgacggcgaccgcccaggtcagggagtgcatgcccttccagcgttcgagctcgtcgggccacgagttgcgggccaccagtgcgggcgctatgacgaggaaccgggcgtgcgggtcggccgcgtgcatgatgtccatgacggcgatgctggtcagcgtcttgccgagcccgggttcgaggaacaggccgcatccgcgggacggggaggcgaacgccttcagggcgaagcggacggcctgccgctggtagtcgtgcaatggggtttccatgcacgcgcgtatgcgtcagagccgggacgcatatgacgggttcggtggaggatgtccggaaaggggttccgtcatgtttgattccgtcgtggcctggtatggttcgctgcccgttggggcgaggggtgcggtcactcttgccgtgggcctgctcgtcgcctggatcgcgttcagggtggcggtcaggctggtgaagggtctggtccgttcgatcgtggccgcggtgctcgcgttcctgctggcgaccgtgccgggcaacatgatcctgcacgacgcgtacgcgcagctgagggagaaggcgtccatgtcggccgtcatgtgacgcatggcgtccgtccgcctccggacgcgggtcccggacgtcctttgcgggaaacgcatatccatgggtgtccatcgtgtttcccgtcgtaaggagcctgacatggccgacaagccgttcgtccccgtcgagcatcgtctcgcgctgaccgtccccgaggcggcggccctgtgcggcatcccggagaaggtggtgcgcgccgcggtcgtgcacggcgatctgaggcatttcgagaaggggtccacgacggcccgcatccgcaggacggatctggaggactgggtggccttgctgtgagcccgacacgggataggcacacttaggcacacatgccgtgtatgatgttctccagatgcgcgtgattccgccattccgtggtgccggctggcttaacgtacgttatgtcagattagttatccttgacgaggattcagtcgcctgtatcaactagtccacgcataccaggccgacagccaaaaggccgacagccaaaggagcaccggagcgaccaccgcaattgcaagaatcgccgtgcctttcagccaatccttgtcatctcgtttccagtggaatgctcgccaaatgaaccatatcagcatgggaatctcatacagcgacagcaatggcaaaccgatgaaaaccaggtcgaagcccgcggcgcaggctccatcgcatcccatcatgaagaagtcctcgccgttgtgtttcagtgcgtttggaaataacggtttacggcgtcttcgagctgctcaggttgctcaataatttcgtaggcaccgtgttcctccatctcaccggccggagcgtagccccagcggcagccgatggcgtccaaattgcaggcgtgggcaccgtcaatgtcggtgtagcggtcgccgatcatcacggccctgtcccccgctgcagcatcaaaaccgattttgtcgaagcagtaccgaatcacctgatctttgtccagacgggaattgtctttggaagcaccatagatgccgtccaacagttcggtcaggtggaaatggtcgcagataggcatgcactggtattcgggcttgcagctggccagtgccaggtagtaaccgtcggcatgcagtttgagcagctgttcacggatgcctgggaatacgacgttcaccagtcgtccgggcaccttgttgccgggctcgttcggatcgtcgaacacggcacggtctccgtagtagctgcggtagatgtccacggcccgatccagatcttccgcaggcacatgattgcgacgcagagattcaataatcgccggtccgatgaagcgtcgcagttcggcggcgtccggaaccggtcgaccgatctcttcgaaggtcttgatgacggagccgataatgccgccgtcggacttggtaagcgtgccgtcgagatccaacaggaccactttcatcggatgctgtgccattgagattccactcccccttgttcatgtcgactgctttgaatggtcgtcaaacaatgcgacttgttccaacaatgattatgcccagtcgggatgactgggcatcaagttcacgtgttgttcagtaggagatcactcgtagtcgggaatccaaccgtcacggtgcatttgcaggcgcttttcgagcagggtggccagttcctcttcgctacggcgttccagcagcatgtcccagtgggtgcgggtgggtttgctgatttcgtcgccctcacggtcggcgtcgccctcacggtgggccacggaaccacaacggcactcccactcgtccgggatttcggcaccctcggcaaacggcaggatggtgcggtggcccttcgggcatacatacgccacatcgtttcgcgcggcgaaatcgacgttgtcgtcggactccagcgatttcgctccgatgctcatgcccctgaggctacgttctgccatatcggcatcctccttgaaagatctttaaccctactaatttacgcaacagttcggacttggccgctattccaagcttccgacgtcggctgacaaactcccgtcaaacagccccgtcagtccacgccggagtaggccaccacgccacgattgacccggtcggccgcttcgtgggcgaggcctgccagccgctctcccccgtcgaacggcagcggctgggcgacagcaatctgctgcagcacgtcagccagtcgtttggcagtgcgcacgaagtcgccgccggtcatgtcggtgccgtacaggcacgatcccagcgaaccgccatccgcccattcatacatgatgtcgagaatgccgaaatccggccgctgcatctcgtccagaccgtgatcctcgcacaggatatcgatgtcttcacaaatgcccttgagcttggacgaagcgatggcgatgggcccggagatgccgcccgggtagtgcctcggttcgccgtctcccccgcgtctggcctcgtataccagtgaagagagcacagcggccagtccgttggcgtcgagcttgtcgaacgtgccggcgagcagcgcctcgcacagttccaggtcatgttcactgtagatgcggcgcagcagcagacctttttcagtcaacgtcatgtcaatgtggccggccgcattgacatgacgttcgaggtaaccaagcccggtgagaatatcgcagatgcaatcgaactggcgtgccacggacccggtgcgggagtcgtagcgatcggtgacgcgctgcagttctcgagtctcgcgggcccagcggtggccccatttgaggtgttgctggaggtccgggcagttgcggcatggatgctcgtgttccgccttgcgcaaatcgcgaatgcgctggtcgaggttctggaaagcgcgtgaacgctcctgatcggtcaggaacacttcgtgcttcagtttgcggcggccttccttttcgatgtcgctcagctccatacgcagggtcatgaactgtttgaagtcgccgtgttcgcatgcgaacgcctgttcgtatccggccagcgcgttcttcagtgtgttaatctgcgattccagctgccaggccgattcgttggcctcccactgggcaaacgactggtccagggtgacgcgcgcggtctcgtagtcgctggagttgagcaggttcacggccatgttgaacgtgggtcggaagctcgagtgcagcgggtagacacgcttggatgacagcgaggcggccgtggcgggcacaaaaccgtgatggtcgaccacgatggcgtggccgatggtgtcgatgccgcgccgaccggcacgaccggtgagctgcgtgaattcgccgggcgtcaggcccacatgaccggtaccgtcgaacttttcgagtttctctaccaccacgcagcgggccggcatattgatgcccaatgccagtgtttccgtggcgaacaccattttgaccagaccttcttcgaacaatcgttcgactatctgacggaacagggcaatcatgccggcatgatgcgaagcgaagccttcttccaatgcaaagcggaacttggagaactgcagggctttcaggtcttcctgagtgagttgcccctccaccatctcatccacgatgcggcgaatcctggtcacttcctcatcggtggtgagctccagtccagcgttgatacactgttccacggcctggtcacagccgttgcgcgagaagatgaagtagatgccgggcaacattcccaggaagttaagctcgtccaccacggcccagcggcgcggggtgtggcgttccgctttcggggcacggtctttggcgcctttgccgccgcggcctctgccgaagcccttgcgcttatcggggcgttcctcgccgcgccggcgtgcggccttgcggtccaactggtcgagccggttgatgagttcggcgttgagtttggtggtctgctcgccgttgccgtcgcggcgatagaggtccagcacctcgggctcggtgtgttcgtccgcctgcacgatgacgtgctgttccaaaggcacggggcggtgttcgctgatcaccagttttgtgtcgcctcgcaccgaggcaatccagttggagaaatcctccacgttggacacggtggcggacaggccgacgatcttgaccgtcttgggcaggtggatgatgacttcctcccacacgggcccgcggaatcggtcggccagatagtgcacttcgtcgagaatcacgtagcgcagtgcgttcagcgtggtggaacgctcgtagagcatgttgcgcagcacttcggtggtcatgaccacgatgtccgcctcggaattgatcgaggtgtcgccggtgagcaggcctaccttgtccgggccgtacacgtcgaccagatcatggtatttctgattgctcaacgccttgatcggtgtggtgtagaaggctttgacgttgcgttcctgggcgaggtaaatggcaaaatccgccactacggttttgccggcaccggttggggccgcgaccagtacgttgctgccggcttcgagcgcgtcattggcttcggtctggaagtcgtccagttcgaaaggcagggattcggcgaatcgcgctgctgcggacgcccgatggcgttggaccttttggaatgatgcgtaccgctgcgaagggctcagcgtctgggaatcggcattgcccttatggtgttggtgacgtgccattgctgctttccgttagttgttgaatcgcttccagcgggcccatgcctgggtgtggcgttcgcgcttggcggccttgctgcgaatcacgttcgcatgggcctcggcataacgattctgtgccacgctgagcggctgagtgaacagaggcggctcgctggtatcggcagaggtgccgggctcccccatcgcggccacgcgttcaccgagttggccgccgatgtcggacatgtctttcaaggcacggagtccatgaagggctgcatagatgagtccggcaacaatcatggccagcatgaacagggccagaatcagccatatccaccaaggcatgaaaggctccttacttgttctcgctgatgctcagttcgcgttcggcgcgtgccacgatcatggtgcgcaacgtttccggggcgaccgccgtgatatgacgcgcgtgggcgatgcagaaggccacgaaccaggaatcggaggaaacggtcagatgcaccttttcaccggcaccgcattgttcgacggtagcgcccggcaatgtcttgatgaatgccagatcgcgctgatcggtgatgaacaccgcgtcggtaccgttgtcgaaactccacttgcgcagttcgctcaccggcatgttcgggatgttgatctgcttggtgggcttgaccagttccgccttttcgatacgggccaatcgcagtacctgccagatgcgcggcttgccgttggccttgtcgagggtcttgtctttggagacgtaggcctttttgtccttgggtgcggcggaaccaacgtccgtgtagacggcggcataatacacgccttcgtcaatgaagatcttggcgggggccaccagcttgcggcgggtacgacctgtaccgtcggtgtactccatgtccaacagcgaatcggtgttgatcgcacgcttgacgatggagaagcttcggggctccagctcatagccggtcaggctcagccacggggtctgaccgggactgacatgacggcgcaaacgctcatacagggattcggcctgcccacgctgcttgtccggcagcaacggcgaatgcgccaggtagctgaccgaggcggtgagcatgctgaggtattgcggcgaaatgccggcaagacgttcaaggcccagcgaattggtggcggaaacaataccctcggcatccagcagcggccagtcaatatcgaagaactggctgccggccatctcaccatcgtcggaaacggtggtcagggtgttgatgtccttatggatgatgttgacgaatttcttgagttcatcatcgttctttggcttgccgataaagcgttcgcccagctcgctcatcgagaattcctcacccagatgagcggagaggaacagcatcagacgcaggcgacgatcaacctcactgcccgtttggaaagcggagccgttcttcttgttctgagccttgatagactcgggatcacccggctctcgcacatcgcgactaatcgacggggaaaccaccgaagcgctcacaggactggcggattcgtcggccagagtgaaccggctggcggcgtgcaaacggcgatgataagcgtccacagcctcttgcgggctgacaatcgtggcccccggatgctcaagcacaaacatggccaaatcgtcggaatcggtgtatgccacgttcaggtgttcgccatccacgtcaacggtggcggcgaaacgacgcgaatcaataaccttgaccagtgaatccggaatgggctgcgtccccaagccaggcgcaatcgaatccaagccaagcccgggaatcggggtctgcggcacacgcggcgtagtgcgcgacacatgctgggtgagctgggactgatccggctcggaagaaatcgacatcgaacgagccagatagttggcggcggcaagcaccggcatatcttccggctcgaacatcaggcggatgcgcggttcgtcgcccaactgcagacgataggacgcgaagtcctggccttccgacttggacgagtactcaggctgccgtgattcgatggcaatgcccatcgcagcgagcttggcgcgatcacgctggaactgcttggcgaacgcggccttggcggcctgatctgccagctctccatacgagtcggcgtaagccttgacgcgctgcgcaatttggcgggatgtgagccattgcgggaacgcggatgacaacacagccagtacgtccagctcgtgcttgccccatttgtcggaaaaacgccgacgtccgcttgtgccctctgccattagtcctcacgtatagttattgtttcgttataagtgcgtatgagtgtccccacactcactctatcttagaggctttttccacagttgagcgccatttcacaaaaataatatcttttttatcgttcgaccgtgttgtaaatcacacccaatcgtccggttcgatgccttgcgggccaacgtattcgccgttcggcacgtagctcggctcacccttatcttcaagtttggcgtcggcgaacatcatgacgtcacgtccgaatgtccagtcgccctgaatggaaaccgagttggctgcggccaaagatggcacggcgtaggggaaccgttcgtcgaaatcgcggatgttcttgtagtatcgcggatcaagttcgacgttcgggaagatgtaattgccgtcttccatctcatacgtgtccgtcaggtggaagcgatcggaacgcataatgaacaaatcattggtggttttcaccggaaggaagcgcatacgatccacttggacgcagatagaaccgttgaacagaccgattgcggcacccatggcggtttccagctgaatcacctgttcggagttcgggtccgtgggattcacggtctttttgttacgaatcaccggcaacggcaacacaccatcgcattcggcgagcttgtctttcaaagcgtcgatgcgaatccagatcgagttggtgttgaagtaaggatgcttggcgatgtcttgggccgcttccttatcatccggatggacctggctcatttcacgcagtatcaggcgaccagtggccttgtctcgcacgatatgacctcccttgcgatcggccttggtgcggatagccacttcggccatgaacggggcacctgtgttttcgaagtgctgggccaacgtacgcgaggggcgtgcaccgagattgtcggaattggagatgaacaggtacttgaagccgcgctcctccaatacgtcaagcaggccggactcccagatggtggagaacaggtcgccgtggccgggcgggcaccattccagctccgggtccatggggtagctcaccggttcgccggtggcggccacgagtttgggttcctgatgctggatgatttccatcggcacgtcatgctggctgaacttgcgatgatgcttgagcgccttcatcgtgtccgccgaagtgcggaaagaattcatgaacgtcagcggcagttcgacgtccaggcgggtgcgagcggtaagcacctgaccgatgatgatgtcgatgaagcgcatctgcttggccttgtgcctacgcaccggcaacagcgacttggccttgtccaatcccatggaggtgcccagaccgccattgagcttgaggaatgcggtcttggcgaaggcgtccacggccttgtcgtggttgatggtctcatagacgtcgtggaagctgggcacgtggccaagcggctcgatgtcgtcctcacgaatccagctggaggcttcttcatggcgccatacgtcatacaaatggcggaactggttgatggcggtttcgctcatgccgtgctcgcgcatcttggcggccgaaagctcgaaagtctcatccacttcgggggtgtttacggtttcttcggggatatccgaggtgacggcgtcggtgtcgtcagcggcggcgatatccagttgggccttatcgtttatttcggtcaattcgggtccctttcatcaaatcaataggaaccagtctagcccctgtttggggcaaacacatacgacggggggcggaggcggtgaattgtcggtgataattccaataacacgccaagatgaagtccgtgtttaatccattacgaatggcttacaaaggtaagtccgtcgtcatgttgtctcatgttgtctgaaaacggaaaagccccggaaggcaaccactcagaagtggcggaattccggggctaatcggtcgggccggcgggatttgaacccgcgaccccttgacccccagtcaagtgcgctaccaaactgcgctacggcccgatggtgcaaaagcaccgagtagataatctaccagatatatgaaatctggcaaattacgcgcgtgtcacttccgcttcttcttctcgcggatgttcacggagatctgaatcggcgtgccttcgaagccgaattcctcgcgcagggagcgttcgatgtagcggcggtagccgtgctcgaggaagccggtggcgaagatcacgaaacgcggcgggcgcgtggacgcctgcgtggcgaagaggattcgcggctgcttgccaccacgcaacgggtgcgggtgggcggcctggatcttgccgaggaaggcgttgagcttgcctgtaggaatacgctgatcccaggattccaaggccttatccatggctcgcgtcagacggttggtgtgccagccggtcttggcggacaggttcacacgctcggcccacatcacacggtcgaattcggtgttccacaggcgttcgagacgctgcttgtcgaactcgtccatcgcatcccacttgttgaatacgagcacgattgcacggcccgcatccacggcggtggacatgaccttcaaatcctgatcggataccggctgcgaggcatcaaacagaatcagcgccaattcacagcgctcgatggcggcctgcgtgcgcagagaggaataatattccgcgcctgtgagcttgtgctggcgtcgcttgatgccggcggtgtcgatgaacagccagtcctcgccatcgatgttgacgatttcgtcgacggggtcgcgcgtggtgccggccaaatcgttgacgacggcacgttcttcgcgcgccagctgattgagcagagacgacttgcccacgttcgggcggcccaccagagccacgcggcgcaggccggaaggcgtgaggtagccggaagtcttctcggcctgcttgagcttgtcgagcgcgacgtccagcaggtcgcccactcccctgccgtgcatggcggaaatcgagtatggttcgccgaggccgagtttccagaattcggcggcaaggtattcgctggcctggtcgtcgatcttgttgacggccagcacgacaggcttgccggcggcacgcagcatcttgacgatgcgctcatcggtggtggtcatgcccacttgcccatcgaccacgaataccacggcatcggccaaggtcacggcaatctgtgcctgtgaggcgatggcggattcaatgccttccacgtcggcttcccagcctcctgtgtccaccagcttgaagtcggtgccggcccattccgcgtcatagctcacacggtctcgtgtaacgcccggcgtgtcttccacaacggcggcacggcggccgaggatacggttgaccagggatgatttgcccacgttcggacggcctacaacagccagcacgcccaccggcttgggaccggccttgcgcgcgccttccgtgaaaccacggccggaaatcagatcctcatcgccttcgtccagctcatagccttcgagattggcggcatactgctcgtattcttggttctcgatggcgtcctcgaccacaccgatgagcagatcgagcgtgtgggcgaagtccagatcggaattgtcgatggtggtaacgccatcggcggcggtcaggaagctggtgaccttggaatcggccttgtcgcgcgcggccacatcctcagcgcccacgcccttgacagcctggccggtgcgacgggcctgacggacctcctcacgggcggtcagcagcacgcgcacctcggcgtccggggacaccacggtggtgatatcgcggccctcggccacgatgcccaacccgccggagaaggagtcggccgacgcctcgcgggcgatgtaggcgcgctgggcggcgatgagcacgttgcgcaccgggatgacgttcgacaccttggagacatggctggagacttcggaggaacgaatggcctcggagatgtcctcgtcgtcggcgaatacgcaggggttgtccgggtccacggagatatcgaaatggtcgccggtgaagaactcgcccaccgcttcggtgatgacacgctcatccacggtttcggcgtccagatcgatgccctgcttcaggcaccaccaagcgcaggcacgatacatcgcgcccgtgtcaaggtaggcgtatccgaaatacttggccagcgccttggacgtggacgacttgcccacgccggcggggccgtcgatggcaacgcgaatcacaggccaacctccttggacagcgaacggacttccgtctgggacagcacgcggtaggaaccgggcttcaaatcaccgagtttgatcgggccgatctgggtgcgcaccaagcgcttgaccgggaagccgattgagccgaagatacggcgcacgatgcggttcttgccggagtgcagcacgaccttgaccatcgtgtggtcgcgtgaggagtcgatgatcgcgcagtggtcgagcttgatccagccgtcgtcgagctgtacgccggtggtcacgagtcgacggcatacggtgccggagatcttgccttccagtgtggcgacgtaggtcttttcgacctcgtacttggggtgcatgacgtgctgcgagagttcgccgtcgttcgtcatgaggataagaccctcggaatcgtagtcgagacggcccatgtggaagatgcgctcgtacttgtcgcccacgatgtcgcgcaacgtgtagcggcccttcgggtcgtccatggcggagagcaccttgcggggcttgttcagtgccagagtgacgtggttcggattgacgcgtacgcgcgaaccgtctacgcgcacctgctgcttatgggggtcgacgcgagttccgagctcggtgaccagttcaccgtcgacctcgacacggccttcggtaatcatgtcctcgcacttgcggcgggaaccgaatcccgcttgggcaagcagcttctggagtcgaatggaattggaatcgtcttgcgctttcgcagcgcgggaatatgcgtttggcatcgttctcccaacgtggccggacagactctgtcatcgcagagactgtcgatttgtatacatacttcagagttggcggactggaatcccagccaattccaacctatatatcataccgcaacgtaggactgctgctagactggcaaccgtttgtgcgggttcgcccgtcttccaacagatgaaaaggaatgaacaatcatggaagaaaccaagcaacagccgctggccctgcgcgtgtgcgccgaattggccggcagcttcctgctgtgctttgccatttacgccttctccacatggggttcggccgtgtatggcatcaatatcgtgttcttcgcgttggctaccggcttggcatatgccgcagtcaccgccatcttctcccgcgtgtccggtggccagctgaatccggccatcaccgtagcctccgtgctggtttccaagacgaaaatcctggatggcatcctctatgtgatcgctcaggtcatcggtgccatcgccgccggcttcgccgtggtcaagctgctgcccacatccgagcaggtagctgccaaagtgtggctgactccggccgttaacggtttcgagaacggctccgtgtcttactcgctgctgacccagtatggcattacgttctcgattacgctggcgattgtcgtcgaggtcgttgcctctctgattgtcgttgccaccgccatgtcttctctgggtgatcacggcgagtcctcggaccgtcatgtcattgccatgggtcttgcctatggtctggccgccgccatcagctacccggttaccggtgccggtctcaatcccgcccgttccaccggtatcgcactggccgcgatgaatgagggtcttacgcaaaatccgctgcaacagctgtgggtgttctggattagcccggtcttggccgccgctgtggtggcgttggtcatgatcatcgcgcagatgatgaccactcccaaagtgccggctgccgccgatcttccacagacggatgccgatgcgaacgcggacacgctcgacgatggcgaattcttcgatcaggccgcctcgtctgatggcgattcagcggaaaaagatgttgccgaagagtccaaagaagctgaagtaggtaatcagcaggccgattcccaaggcgatgccgatgaaggagtcgaacgccactgagcgcactttccatgggcttttgtcctgaagaatcaggcgaacaagcccggtgatgatggccgtcacggcaagtatgaccgtggcggccatcgtatatccgaaagcaaccagcagtgtgatgacggcgacgacgccgagtacgcaccattcaaaccatggcttgccctcatgcgcttcggatacatagggatggttgtgcatgttgcgattccttctgtcgaacggttacgtgaccacaatagcaggcgaatagcaaaggtgggattccgcttggacccgttgacgggtcaggcggaatcccacctttgtgcgttttggctgagctgctcccctcagagagtcccgatcagtggaagaagtggcgggtgccggtgaggtacatggtcacgccggccttcttggccgcttcgatgacctcctcatcgcggatggatccgccgggctgcacgatggccttgacgcccgcgtcgataagcacctgggcaccatcggcgaacgggaagaacgcatcggatgccgcgaccgcaccggtggcgcgatcggcaccatcggccagcgtgttggcgcgctcgacggccaaatggcaggagtccacgcggttgacttggcccatgccgatgccgaccgtggcctggtcgtgggccagcaggatggcgttggacttcacgcagcggattgcacgccatgcgaacacgaggtccttcagcgtgtcggcgtcggcggcatcgccggccacgagcttccaggcgtccggatcgtcgccgacggcgttgatcagatcggtgtcctgcacaagcaggccgccatcgatctggcggatggcctcgtggcccttcggtggctcggccaccttgaggatgcgcaggttcttcttcttggtctgcagcagttcgagcgcggccggctcatagtcgggggcgacgatgacttcggtgaaaatcgggcgcacgctttcggccatctcaagagtgaccttggagttgcaggcgatcacaccgccgtaggcgctcatcgggtcgcaggcgtgagccttcttgtgggcctcggccgcggtcgcgccgatggccagaccgcacggattgttgtgcttgactacggccacggcaatggcgggagccatatcccatacggtgcgccaggcggcgtccgcgtccacgtagttgttgtagctcatcggcttgccgccgagctgctcggcgtgggcgaaaccggtctggttgagcgggtcaatgtagagggcggcctgctggtgggagttctcaccgtagcgcagggtgtgcgcacgatcccaggtgcgggtgaactgggccgggaacttggcggaatcgacttcagtgccctgatcgtccttgtccacctcgacggcgtccagagaggccggcttgggccagtgcttggcggtccactcgttgatggtggcgtcataggcggcggtgtgcgcgaaggccttggctgcaagccacttgcgctcgtccagagagaagccggtgccatcggccacgcgggaggcgaccagtgcataatcggccgggtcggtgacgatggccacggtggcgtggttcttggccgcgccgcgcaccatggaggggccgccgatgtcgatcttctcgatggtatcggcctcgttggcgccggagcgcacggtgtcggcgaacgggtacaggttgacgaccaccaagtcgaacggcttgatgccgaactcctcgagctgcttggcatgctcggggttggtcatatcagccagaatgccggcgtgaatgtacggatgcagcgtcttgacgcggccgtcgaggcattcggggaatccggtgacatcggacacctcggttaccttgacgcccagctcggcgagcttcctggcggtcgaaccggtggaaacgacttcggtgccggccttcacgaacgcttccgcgagtacttcgatgccttccttatgaaagaccgagaccagtgcccgacggatcggtcggttcgtgtttgtcatcctgttcctccttggattcttgtggttgtgacgccagggaccgcgcctgacggacgatgacggtcttcggggtcgcggcggtggtgcgggaatcattgatcctcccaaccaaccagcctatcgaaaaaacgagcgctgtgccaatcagcgcgaatagccatgccgcggtaaatcccaatgcggtcgaatgaccgacgactctggtggaggccatgacgtcgacgccaatgtgagcgagacgatgatcgccaagcgatccattggacagagcgaacagcaatgtggatgccagtgagatcagcatcgcgctcaggcagaatgacccggcggagtagatcagcgaaaccaatactgggccgcgggtggacgcattccgtatattcaacggtctgcaggcgaatccttgcggcaggaatacagccagcaggcccacgagcgcagcgatggcgagaggcgcgttcaaggcaacggtacgccatagttcgctgctgaccggttcgggcagaataccgaataccggtattgcaggaagctctttggattggccgagccataacgtgaaactggccaaatcaccgatggcgaatccgccgccgaagagccaggaaacagcccagagcatgacgttgggtagccagatcagcatggcgacggtggtgagaattcgtgaaccggtttccatcccggacaattcgaacaacgatacgacagcggcatggttgcgtaccgcccatacgatgacggtaatcaatccaattgccaggtatatgcccagtatcgcgacggccaaggcgacgccgattttcaggcagtggcgtatgtccgccggcacctgcttgcgagtccagtccctgaatgctcgcatcttggctgattccggtacggctgcgcataggaaaccgatcgagaatacgatggctgctttcagcaacaccagccactggtcatcgacaagacctaggtgtacggattgccggaatgcctcgttcaacccgagccaaacattcaatccggcaacatacgcatgcggcccgtatgctttgattcgcatggtgagtgcattgatcagccatatcagcagtatggtcaacatcaatggcgtgatggtgagggtgaacgaatcggttctagagcccgatccctcactcagaagcacaacggcctgtgtcagcgaggttgtgccgacggtgagattgtcgccgccctcttccatggagacaaccaataacatcagcgctgtatagcaacctaatgcaacggcatagatggccatggatgcgagggcgactatggctccccgcacccattggcgaatcacggctttcatcacgattggttggaaccgattagtcgatgttggccttggcgagtatgtcgcgcatgatttcagcggcctggcccggggtcttgcccacggggatacccgccgcttcgagcgcgttcttcttgtcctgggcggtgcccttgcctccggagacgatggcgccggcgtggcccatctgcttgccttcgggggcggtgaaaccggcgatgtaggcgacaaccggcttggtcatgtgctccttggcccatgcggcggcgtcctgttcggcgaagccgccgatctcgccgatcatcatgacagccttggtgtcggggtcggcttcgaatgcctgcagggcttccagcagcgtcgtgccgacgatcggatcgccgccggcgccgagacatgcggtgaagccgatatcggacagttcgcccatgagctggtaggtgagggtgccggatttggagaccagtccgagcgggccgcggccgacgatgccgtcggggatgatgcccaagttgacgccagggttgccgagcgtgatgaaaccggggcagttcggtccgatgatgcgcacgcccttcttgagcgccagctcgacgaagtatgcggaatcggccaccggaatgccttcagtgatgaccacgatgagttcgatgccggcttcgacggcttcgaccacggcggacttggcgaacttcggcggcacgaacaccacgctggccttggcgccggtggcttcacgtgcttcgccgcaggtggcgaacacggggatgtccacgtcggcaccgttcttggcaccggggaaggtgacggatgtgccggccttgcgcgggttcacgccgccgacgatattggtgccggccttgagcatgcgagccgtgtgggtcatgccctgatggccggtcatgccctggacgataacgggagcgccgtcttcgatgaacagcatcagcgaacctccttggactgggtcgcctcaccggcgagctgcgcggccttggctgccgcgccttccatggtttcggacacatggatattcggattgttggcggaagcgaggatatgcagaccctcggcggcggcgttgccatcgaaacgcacgacgatcggcttggaaccgccgagcttggcgaccgcttcgaggatgccgttggcgacttccacgcaggaggtgatgccgccatagacattgatgaacacggattcgacctgagggtcggacagtacgatctccaggctttcggccatgacggctgcggaggcgccgccgccgatgtccaggaagttggcgggcttgatgttggtgccctgttcctcgccagcgccggagacggcatccagggaactcatgacgagtcctgcgccgttgccgatcacaccgacctcgccgtgcaggtgcacgtagtgcaggccgtgttcgcgggcgcgctgttcgaaggggtcgggaacgatgagatccacgaaacgcgcccagccatcatggcggaaggaggcgttgtcatccaaggagatcttggcgtccaaggcgctcagctgcttggtggattcgtcatccgggtcgccgatcttggcgagcggattgatttccacgagcgtggcatcgttgtctttgaagcagcgccacatcttgagcagaatctgtgcggcctgatcgacgtccgcgtggtagaagccgatgctctgtgccatttcggtggcagcggccaggtcgaagtcgccgagcgcatcgatgtgcaggcgcttgacggcctccggatgttccttggcgatttcctcgacttcggtgccgccgttggcggtggccagcacgtcgaagtcgcgcgaggtgcggtccacggagatagacacgtaatattcgtgcaggatgttcttggcttcggccacaagcacgccggaaaccttgtgcccgtggatggtcatcggcaggatggactcggattcaagaatcgcctcgtcgcggttatgggcgatcttgacgccgccggcctgaccacgatgaccgatcttgacctgcgccttgattacgcagggatagccgattttgtccgccgcttcggcgacttcatgggagttctgggcaaagatggcgtccggggtgggaatgtcctgttcctcgagcagctgacgcgcctggtattcgtaaagatccatcgatccttccctgactatgtaattggtccggcatataactgtacacagtacatgccggaccttgaaaactaactgtacgttgggtgagacggaatctcaggccggcatcgcgatcagcgagctgctgggcttgccgccgagcttatccagaccgtcgagaccatcgagccgcatcacaaaactgaagcccaccacagtgccgcccgccttttcgataaggtcggcgccggctttggcggtgccgcctgtggcgatgagatcatcgacaatgagcactcgctcccccgcctgtacggcgtcggtttcgatttcgacgctggccgtgccgtattcgaggtcataggatccaccgatggtttcgggcggcaatttaccggccttgcgcacggcgatgaaacccttgcccagatgggcggccatggccgggccgaacaggaacccgcgcgattcgagaccggcaatggagtcgaattcgctcggggacaccggcagagccgtttcaagcgccttgagcagaatcttcaagcccttggggtcggcgagcactggcatgaaatcacggaagataatgccttccttgggaaaccccggtatggaacgcaccaaggacaccagatattcggcgtcctgttgccctaccttgctcaatgcgtcgatggtgatgtccgactgtgccatagtgctcgccccttttatgcctttgcgatgcgatactcggatggtgctaccgaatcgaacagcttacttcgtcttggtttcgttgtcgtcaccggtctcgtcagcggtgtcttcctcggacacgacggacgcctcgatcggaacctgaccagcctcatcgttagccggagcctcggtgtcttcgtcgggcagcgggttgccgttctcgtcgacctcatcatcggacacataggccgggcgggtgtactcacgggcgatggcgttgaagccgaaacgcagcttggagccttcggagtcgatgacgatctcctcatactgctcgtcgacttcgacgaccttgccgatcacctggccgatggtgatgacctcggtgccgggctgcaggttgcgacggaagtcctgcttctcctgctgttgctgcttggccttcttggactgccaccacatcatgccgccgaacacgacgacgatcacgatgagcataatgtactgttgttccacgaaacaactccttcaaacgagcgacattgacgaaacgccgccaagtgtgcaaacaggagaaagtctagaagagcttgctgacatcatctttgggcgtaattcccaaatgctgccatgccttctcggtagccacgcggcctttgggcgtgcgaatcataaaaccttcgcgcacaagatacggctcgcacacggtttccacggtttccgattcctcgcccaccatggccgccagattgttcaggcccacgggtccaccgttgaagttgcgcacgatggcattgagcacggcgatgtccagccggtcgaggccttcggagtcgatctggtacagggccagcgcctccttgacgtcgtccggccgcaccacgatcaggtcgtggacgatggcccagtcgcgtacacggcgtagcaatcggttggcgatacgcggcgtgccgcgcgaacgcaacgcaagctcatgagcggaacccgcatcaaggtttacgcccagtacgttggccgaacgttcgatgagcttttccaactcctcatgcggatagaagtcgagatgtgcggtgaagccaaagcgtgcgcgcaacgggcttggcagcataccttcgcgcgtggtggcaccgatgacggtgaatcgcggcagggtcagcgggatggagcttgcgcccgggcctttgccgaccatcacatcgacgcggaagtcctccatcgcgatatacagcagctcttcggcggcgcgcggcagacgatggatctcgtcgatgaacagcacttcgccgacgtcgagggagctcagaatcgaagcaagatcaccggcatgttgaaccgcagggccggaagtcacgcgaatcggcacttcaagctcattggcaacgatcatggccaacgtggttttgcccaagccaggagggccggcaagcagaatatggtccggtggcacatcgcgtttgcgggccgcgtccaggaacagttgcagctgggccttgagccgtggctgtccgataaagccttcgagaacatgggggcgcagctcctcgtcgctgaccggctcgttgccgatcggctgggaggagaccatgcgcaacgactcttcgttggcaccggtgtttgaggtaccgtaatccgttgtctcgctcatcagcggcccctatccatcagcgccaaagccagacgtagcacacgcggcacatcgtcggtggcaagcggcgtgggaatatcgttttcggcgcaagcctcgacaacggcctgctgggcgtcctgctgacgccagccaagtgaaatcagtccttcgacaacctgttccgtaccggtatccaccggagacttggatattgccgcctgagcggaagcaccctcgatctgactcaaatcaatagagcccttaagctcgaggatgattttctgtgcgcccttcttgcccagccccggagccttggccagcgcggtggcgtcgttgtcggcgatggcgtgggccagctgactcggcgtcagtgtggagagtaacgattgggccactttaggtccaatgccggagaccttgatgagttgcagaaaggttttcttggcgtcccgatccaggaatccatgcagggtaatggcatcctgagagaggttcatataggtgaagacgcgggtgtcttgcccggcgtgcagacggctcaggtcggtggcggacatgcgcacttcgtagcccactcccccaacatcaatcaatgcggtatcggtttcgaccgattcaacccgcccggtcagcatgccgatcatacaggtactccttcagggctccaggattcaagactcgaacaactgttcgaaagtatactacatgcctcggtcgtggttgatgcggcggcgcgtggatttctgtgcggcctcagcccactggcgttgcgcggcggtcagatgttgttcgcgttcgccgccctgcaatgcgcctgccgggcgcagcgcatggcaaatggccaaagccaaggcatcggcggcatcggcgggagtcggcattttggtgaggttcaaaatacgtgtcaccatacgctccacctgaatcttctgcgcctgcccgttaccggtgatagccagcttggcttcggtaggcgtatgcaacgccacgggaatattgcgttgcgcggcggcgagcatggcgaggccggcggcctgtgcggtaccgagtacggtgttgcggttggattgtgcgaacactcgttcgatggatacggcatcgggtgcgaagcgatccattttctcggacaggccgttgtagatggccagtagacgcagatcctgggtgatatccggtgaggaccgcaccacgtccacgtgaataaacgaaagccggcggtgctcgccggcttcgatcacgccgaccccgcaacgtgtgagcccggggtcgacgccaaggataatcacgaggattactcctcgtcgagctgggccatcacctcgtcggaagcggtccagttggagtagatgttctgcacatcgtcgaggtcatcgaggttgtcgatgagcttggacaccttgcgggcatcgtcgaggctcaactcgacctcgttcttcggctgcatgacctggtcggcggaatcgtagtcgaagccggcgtcctgcagagccttgcgcacggtgaacaggtcggacggaccggtcacaacggtgaacacctcaccgtcatcggtaacgtcctcggcaccggcttcggcggcggtttcgaacagcttgtcgaagtccacgccctcggacggcaccacgatctggcccttgcgctcgaagttgaaggacacggagccggaggtggccagggagccgttgcccttggtcagggtggaacggacttcggcggccgcacggttgcggttgtcggtaaggcattcgatgatgaggccaacgccggcaggagcgtagccctcgtagacgatgtcttcgtagttggcggcgccgtcttcagcaccggcaccacgcttgacggcacgagcgatgttgtcggccggcatggaggccttcttggccttgtagatggcatcgtacagggacgggttgccgtccgggtcgccaccgccgaggcgggcggcgatttcgatgttcttgatgagcttggcgaagagcttgccgcgcttggcgtcgatggcggccttcttgtgcttggtggtcgcccacttggaatgacctgacataatgctcctagcaattattgaaacggatgatgtcaaacgaaacgattgtaggccgttaatcagacatacccgtgatgtttccgatgattgtcttgttatgcgtaccgataagaccggtcacgcggggtgccgcacctgtgttaggcaagcggcagatgatactgcggagccagctgttcgaatgcctgggcataggcttctcgctggtcggacagcagaataggcatggtgcgtgtctgggcgacgatgggcatgaagttcgcgtcaccattccagcgaggcactacatgctgatggaggtgagcggcgactcctgcgcctgctacttcgccctgattaatgccgatattgtaaccgtgcggacgggagacggtttccatcaccttcatggcgagggtggtggccttctcgaattcgaacagttcggcatcgtcgagttcggtgatgaatccgacgtgacggtacgggcagatcatgagatgcccgacattgtatgggtagaggttcatgatggcgaacacgtgcgtgccacgccaggcgatgaggccgtcttcgtcggatttcttgggtccggcgcagaacgggcattccttcgtcttgggcttggttgggcgatcctcgctgttgcgcagcacataggtcatgcgctgcggagtccacagtcgttcgaccgtgtcctcctgaggcggaaagtccgccggattatcgacacgcacgtcagtcattttcgcaccctttcttggctcccctctctgaggggagctgtccgtgaaacggactgaggggagtgcgagccatgcaggactcccctcagtcgcctacggagccagctcccctcagagaggggagccagtaccattcacatcactcagccacagcggcgttgaagtcgtcggcggagttcacctggacgcgcttcttgatgacagtgaggatctgctcgcgggccttgtccaccggaacgccgttgagctggctgccgtcacggaagcggaagctgaccgcgttgttgttcatgtcttcctcaccgacgatgaggatgaacggcaccttggacttggaggcgttgcgaatcttcttgccgaagcgatcgtcggagtagtcgatctcgcaacggaccatctcgtcctcaagggacttgacgaaaccggccagatgcggggcgaactcgtcggcaaccggcacgccgagcacctgcacgggggccagccacgccgggaaggcgcctgcgtagtgctcgagcagcacggcgaagaagcgttcgatggagccgaacagggcgcggtgaatcatcaccggacgctggtgggtaccgtcctgcgcgatgtactcgagctggaaacgctcgggcaggttgaagtcgagctggatggtcgagacctgccaggtgcggccgatggcgtcgcgggcctgcacggagatcttcgggccgtagaaggcggcgccgcacggatcgtcgacgagctcgaggttggattccttggcgacctcggcgagcgtgttggtggcctcctcccagatctcgtcggagccgacgtacttgttcgggtccttggtggacagctcgaggtagaagtcggtcaggccaaagtccttgagcaggttcagcacgaaggtcagcaggctggtgagctcgtctttcatctgctcgcgggtgcagtagatgtgggagtcgtcctgagtgaggccgcgcacgcgggtcaggccgtggacctcgccggacttctcgtagcggtacacggtgccgaactcgaagaggcgcagcggcagctcgcggtaggagcgctggcgcgacttgaagatcagattgtgcatcgggcagttcatgggcttcaggtagtagtcggcacccggcttggtgatgttgccgtcggcgtcgtactcctcgtccaggtgcatcggcgggtacatgccgtccttgtaccagtgcaggtggccggaggtctcg

SEQ ID NO: 1251 - DNA, 3927 bp, Unknown
  R81_24m  MAG No. k141_31326
acgaacactgcggaaaataccgtgggcacggcaaccccgaagcaaaatggactcgccgtgttgggcaagtatatgggtgtttccgccacgcagaccattgtggagtatgcgacgttcgccatcctgcacttgatcggcgtgccctcgcagatctccaacggtatcgccgtggtgtgttcggcgacctacaacttcgtgatgaaccgcaacgtgacgttcaaatcgtcaagcaacttcacccgttccgtgatgcttttcgtgctgctgtggatctggaacttcacgttcagcacactgctgatcggctggatgccgggcgcgacggacctgagcccgtatgtggtgaagttcattgcgatggcctgccagttcggctggggttatccgttgtgcaagtacgtgatttttaggtgacgcattccaattgctcactgtcgttcgccttcgcctatttgtatttggagcgcttatcagaagaacagcatcgcaacacctgcggcgaagcacatgagcagaatcgatgtcaggaagctggcgagcatcggcttcttgcccttggaagcgatggccttgaagttcacgttgatgccgagcgcggccatggccatgccgagcacgatgtacgcaaagtccacgagctgcggggtgatggaggcgatgagcggcacgaaggtgccgatgatcgaagcgccgatgaagccgagcatgaaccacgggaaggccacagtcttcttgccggtgttctccacctcggagtgcttcttctcccaccagatagcgatgatgatggccgcgaacacgagcatgagcacgcgggaaagcttcatgatggtggcgatgtccaccgcgccgaaagcgtcgccggcggcgaccgcgtgggcgatttcgtgcagggaagcaccggcggtgatgcccagctggtccttggtcatgccggctagcgggccgagcgcgatctccagcaacgcgaacacagtacccataatggctacgatggccacggccatggtcacgtcgttgtccttctcgtcctgcttgtcctcaggcaccttgatggaaccggctaggcccatgacggcggccgcaccgcagatgccggtgccaccggcggtcaggatggcgagcatcgggtcgacaccgagcttgcgggcgatggcatagcacacgatgatggtcagcgtgacgaccacagctgcgatcggcagacacttgatgccctgcgtgaacagcacggcgaggttgagcttgaaaccgagcaggatgatgccgaggcgcagcagcttgttggaaatcaggccagcggcgtccttgacgcctgccttgcggccatcattggaaccgacgtaggcactgcggatcgggaactggatgatcataccgatgagcagcgcgatgataagcgcgccgaacaggctgaatccggggaactgcttgagccaggaggcgaacagcgaggccagcagagtcagaacgccaatgaacaacatgtcaacggtggtaatgcgcttccaccattttgtacagaactctctcacggtgtctattgaagctcaagcatttacatcggtcaaatcattgcaaccaatacatatcatcgattttgtcgatacctaattgatctccctctgatgagggaggtggccgccgcaggcggacggagagagaaacaacgttcgcgacctcccctcagtcgactatctgactacccgcgcagcgcagcaataatcatctccgccaactcccgctgatcgtgcgtcagaccggatctcggcaccagcgcatagaaccgccgcacaaactcatcgccaagctcccgctgcaccggcacgcccgccggcacggcggcttccgaaatcaacgactgcccgaacccggcggacagcgccgccacaatcgccgcattactggacacttccatcgtgcgtgcaggcacaacctgagcggtcttgaaatacaaatccgtgtaataccgcacgccggaaccgtgctcgcgcaccatccacacgccgtcgggctcccccgccaacaccagccggtcctcgcacagggtgacgcggtccaccgaatcgttcacgatcggcttttccaccacgccgagctgcacggccttcatgctgacccgttcgagaatcgcatccgagttcatcacgtgtacggcgaagtcgaaactgtccatgttccgagccatcaccggcaacgccttcggcagcagaatcgccgcggtcgtgtgcgagaacgaaacggccagcggctcacgcgcctcctgcacgcgggcgatctgctcacgcgtatcccgccataatccgtcgatgccgatggcggtctggtacagcatccgcccggcctgtgtgggcgtcacgtcgcttttcgcattgcgcacgaacagcggcgcgccgaccatctgctccaattgggcgatacgcgacgacaccgtcgactgcgacaccttcagttcgtcggcagccagcgtgaactggcccacctcgtatacggcgaccagggtttcgagcagagggaacatggtttaactgtacgctgtatgatgcacgaatatttcaattagcttgggcgtagccctaggccacggacctggaccaccctcagtctcgctttgcgagccagctcccgccagcgggaccccaatggttttcatatcactatgcttcgcgcagttttgcgagctgtgttttggccttgtggagcttggcatagatttcattgcgctgaacaggattcttgacgcgctgatggtcgcgggtgagcttgtccacttcggattcgagccgagcaatttcagtatggcgaatgatgcgcgcatccagattttcgatctccggcgtgcccagaatggtctgtgagcacagcgaggcccacagctcatcaatagtagagccggccagctccagctgggcctcccccgccggctgccaatcgccggcatatacccgatagatcggcgtgtggccggcacgccccggtatcgcccgacgcacggcgaacgcacattcctcacgtgtgctgccctcgaacggcacgtcgcgtacgcacacgaacacgatgcccgatttacgctgcccggcaatcaaatcgatgacctcgttcggtatgccagtggctttggccgtaagcttcagtccgatgaccagcacttccggaaccagtttgccgtccgcaagcccagtgttaatcgaccggaccaacgccagcatggtaatggattcgatttcgttcaccaatcgctgcttgagtttgcctgaaatcggtgccttgcccacgaacaaggctttcggcagtgtgcctttggcttcgggaatcgccgtggagacgggcagtcccagtgaaagcgcggatacggaaccacagtgtgcggcttgcgaaccagtcatcatcgaccttctttcccggcctgccatcagtgtcatgccctcgcagtgcagcagtccgtttatctattggaaagcaacactagcgcatccaggccggaagtcgtggtacatatccatatcctgctgcggttataggaaatcccctccgagtttcctcgaaggggattttctataacgctagttcaagcgaagattcttgtctgatgaaaatcaggcgaggatcttggtcacacgaccggagccaacggtgtggccgccttcacgcacagcgaaggtcaggccctcctccatggcgatgggctgaatcagctcaacggtgaaggtggcgtggtcgccgggctgaaccatctcgacgccttccggcagctcgatgacgccggtgacgtcggtggtgcggaagtagaactgcggacggtagttggagaagaacggcgagtgacggccgccttcgtccttggtcagcacgtagacttcgccctcgaacttggtgtgcggagtgacggagcccggcttggccacgacctggccacgctcgacatcc

SEQ ID NO: 1252 - DNA, 17601 bp, Unknown
  R81_24m  MAG No. k141_31473
aatccggccgcagcaaggcgcgcgtctgatgcaggttaatccggctgcggtagaggccagcggctggggatggcggcacgccacgcgtaaggacttcgcgttgcgtgccgtcgatttcaccatccggccaggtgaacgtgtgttgctgctcggtgcttcgggggcgggcaaaagcacgatgatggccggtctcgcaggcgtacttggcggcgatgaggaaggcgagcaggagggctcgctcaccatcgatggcgtcgatgcgcgcgaggcgcgaggccgcgtgggactggtgcttcaggacccggactcgcagatcattcttgaacgactgggcgatgacgcggccttcggctgcgagaacctcaacgtgccgcgcgaggagattcggcagcgagtgcgcgaatcattggatatggtgggactcggcggactcgaactggatcggtccacccgccatctgtccggcggtcagcgccaacgtctcgcgttggccggcgtgctggctatgaagcccggtctgctgttgttggacgaaccgaccgccaacctcgaccccgaaggcgtggtcgaagtgcatgacgcggtcaaaaaggtcatcgaggccaccggacagaccatggttgtggtcgaacatcatatcgatgtatggctcgatctggtcgatcgcgtgatcgtgctcggccgacccgatgcaagttcgcccacgggcgcggtcatcgccgacggcaagccggacgaggtgttcgccgagatgggcgacgtgttggccgccggtggcgcgtgggtgccgggccgtgcgattcccgattactcgccgaagcgggagcctgcgcacgatgcgccggtgctcagcaccgagaacttaagctttggccgtgggaccgctcttggcgttggcatcaatctggatttctatcccggcgaagtaacggctctgatgggtccgaacggcgcgggcaaatcgaccttggccctgaccttggccgggctgctcgagcctatcgccggcaaggtgctcatcgccgacaacctcaagcccgcgcatgccgggcgtgagccgattgactggaaaagcaaggaactgctgggccgtatcggcatggtgttccaggagcccgagcaccagttcgctgccaatttcgtgcgtgacgaagtcgccatcggccccaagtcgatggggcagagccaagacgaggcttatcggaccgccgaccgcatgcttgagcagatgaatctcacgcgcttcgccaaagccaacccgtataccttgtctggcggggagaagcggcgactgtccgtggcctccatgctggccgccgcacccaaagtgttggtgatggacgaaccgacattcggacaggatttcagtacgtggaatgaaatggtcaagctgatcgccgccatccgcgaccaaggctcgtgcgtgattatggtgacgcacgatgaggcgctggtggatgcgctgggcgcacgacgcgtgatgttcgaggaggcgaggcatgagtgacgtggtaaccgtcagcccgcaggaaacgcgcgtggagccggtcaaagcctcatcgccctcatggttcatagcgcgcatcaacgcggtcagccgcatcatcggtgcgctgttgctgtgtattccgatgttcatcagtctggatgtggtatccgcatccacggcgctcggcatcgaattcgtgctgctgtggattggtggcgtggctccgtggaccgtatgccgtaagacctggccggtatggatcgccgccgccggcagttttatctccgtgtttctctacggccgtacctcgggcgagatcctgtggcagggcggctggattgtgatcagtgagggatccattaatctggccatcgccacggctatcagggtggcggccattgccgtacccggcgtgatcctggccctgggcctcgatcccactgatttggcggacggtttggttgagattctgcacttctcaccgcgattcgtatacggcgggttggctggattgcgcatgtttacgctgctgcaggaagattggcgcgcacttggcttgtcccagcgttcgcgcggccttggcgacggtaacgccatcgcccgtgccctctcccaagcgttcggactgctggtgctctccatccggcgcgccaccaaacttgccaccgccatggaagcgcgcggcttcggctccagcgccccacgctcccaagcccgtatctcgcgtctgaagcctatcgactggatcttctacgtcatctgtctggctgtcccgctggcctccataggcgtagccatcggcaccgggaattggcacttcgcctttcagggtgtctgaaaggcgacagactggcacagtgcctttcaaggtgtctgaaaggcttacgatgcctccgccagcgggagcgagccacgactgacgtaatgacccggcagtagggtagtggctatgcccatcaacgcccagattcttgataatccgaaatccgaccgcgttcgccgcatcgccgatctgacccgcgccaaaggccgcgaacgttcgggccgttttcttatcgaaggcccgcaatccgtgcgcgaggccgtcacttggcggccggacgtggtgcaggacctctatgtggaggtttcgcaggcgttggaacatccgtgtatcatctcctccacgttggagaagatcgtcgaaacctcgcaggatgccacgatttatgtgcactactgcaccggcgacgtgatgcaccgcatcagtccggacgcccagggcatcgtggccgtcggcaatgccgagtccatgcacgccggtgccgatgacgtcgaacttggcaagaacggccggggcccgcagatcgccgccttctggcaggtgcgcgacccgggcaacgccggcaccgtgatccgtgcggccgatgcggccggctgcgacgccgtaatcttcgtggacgactgcgtggacgtgctgaaccccaaggtcatccgctccaccgcaggctccctgttccatctgccggtactcgccatgagcaccgacgaattcttcacctggacaggcgaccataatatgggcgtctgggccgccgacgtatacggcaccgaagaacgcaagccggaaagcctgcccgcagtactggcggacaaggcggcggtcgaggctccgaaagccgtgctgttcggcaatgaggcgcgtggcttggaaccggacatcctcacacgctgcggccgcatcgtctccatcccgctgtacggcaaggccgaatcgctgaacctcggcacctcggccgcggtgatgttgatgtcgctgtctatgtcgggtcatgttgaaagaatgtgaaaccggtaaaaacgctgtgaaacgctgagaaaacatcagacgaaagggttctcgtggcagaacaaatggtgttcgacgccgaccaggtgaccgctgaggttgccaagggcatcgagaaaatccagaacgcctccaacctggaggagctcaaggccatcaagacaacgtacgcaggtgccgattcggcgatgaccaaggccagcaaggccattggctccctgcccgtcgaccagaagaaggaagccggcaagctcatgggcaagctgcgcgccgacttcggccgtgcctatggccccaaggaagtcgagctcaaggaagccgccgagaaggccgcactcgccgctgaaaccgtggacatgacgctgccggtgaaccgcaagcctctgggcgcccgtcacccgctgcccaagctgatggaagacgtcgaggacttcttcatctccatgggctggcagatctcctccggtccggaaatcgaagccgaatggtacaacttcgactccctgaacttcggcccggaccatccggcccgccagatgcaggacaccttctacgtcaagggcaatcaagccaaggacgccgccggtttcgtcggctccaacatggtggtgcgtacgcagacctcctccgatcaggtccgtgccctcctgacccgtggcgtgccgctgtacatcgcgtcccccggccgtgtgttccgcaccgatgagctggacgccacccatactccggtgttccaccagtgcgaagccctcgccgtcgacaagcacctgaccatggccgacctgaagggcgtgctggacaagctcgccgtcgccatgttcggccctgaagccaagacgcgcctgcgcccgagctacttcccgttcaccgagccgagcgccgagctcgacctgtggttccccgacaagaagggcggccccggctggctcgagtggggcggctgcggcatggtgaacccgaacgtgctgaagtccgccggcatcgacccggacgtctacaccggtttcgccttcggcgtcggcatggagcgcacgctcctgctgcgcagcgacatcaacgacatgcacgacctggtcgaaggtgacgtgcgtttcgccgaacagtttgtgatgggggagtgattcagccatgcctatgatcgatatcgattggctcaaggaccatgtcgaggttctcgaaggcctgacctacgaacagctcgccaaggaccttgtcaaggtgggtcttgaggaagaggagatccactcctcccaggtgaccggcccgattgtggtcggctacgtggtcgacgccacccccgaaccgcagaagaacggcaagaccatcaactggtgccacgtggactgcggcgacgaatggaacgagaccgacgaagacggcaacaaggtgccgcgcggcatcatctgcggcgcgcccaacatgaaggccggcgaaaaggtcgtcgtcaccctgcccggtgccgtgctgcccggcgacttcaagatcgagccgcgcaagacctacggccacatctccaacggcatgtgtgcctccgaacgtgagctgggtctgggcgacaaccacaatggcatcattctgctgcgtcagtacggcttctccgaggctgaatatgaggctctgaagcctggtcaggacgccatgcacctgctgcacctcgaccagcctctgcttgagatcaacatcaccccggaccgtggctacacgctgtcctaccgtggcgtggcccgcgaataccaccactccaccggtgccgcctacaccgatccggccgtggcactgaacgagaaggccccggaacctgctgactaccagcccggcaccccggtggacatcgatgttgaaatcgacgataacaatccgattcacggcgtgcccggttgcgaccgctactacgcgcgtatcgtcaaggacttcaatcccaacgcccacactcccaactggatgcgccgccgcctgattcgcgccggcatgcgctccatctccttggccgtggacgtgaccaactacgtgatgcttgacctcggccagccgatgcacgcctacgacctcgacaagctcgaaggcccgattgtcgtgcgccgcgccaacgagggtgagaaactcaccaccctggacggcaaggaacatgacctgagcgtcgaagatctgcttatcaccgattcgccgaacggcgaacgcggctcgcgcatcctcggccttgccggtgtgatgggcggcctgtatggcgaagtgaccgctgacaccaagaacattcttctggaggcagcgcacttcgatcaggtgaccatcgcccgttcggcccgtcgccacaagattccatccgaggcctcccgccgcttcgaacgtggcgtcgacaccgcgctgcagcccgccgccacccagatggccgccgagctcatggccaagtacggcaacggcgagcccagcgaacacccgaacgacgtgaacaacacgccgcgcgccaaggtcatccacttcaaggcctccgaagtggcccgcgtggccggcctcgacgtggacatcaaccgcatctccgacatcctgaccgacattggctgcacggtggccggcggcggcaacggcgagttcgccgtaaccgcgccgagctggcgtccggacttgaacgagccgtgcgacctggtcgaggaaatcgcccgactggtcggctacgaccagattccgatcaccgtgccgccggcaccggtcgagggtctggtgggcctgaccccggaccagcagcgtcgccgtcgagtggcggacgagctcgccgagttcggcatggtcgaatcgctgagctacccgttcgtgggcgacgacgattacaaggccttcggcttcgacccggaagccaccaagaaggtcagcgtcgagatcgccaacccgctctacggcgaccgtccgtacctgcgtcgcgagattctgccgaccctggccaccaccgtgcagcgcaacatccgccgcggcatcgaaaacgtgtccctgtatgagctcggccacgtctacctgtgggatccgaacgcgcccgccatcccggcactgcccggcggcgtgcgccccaccgacgaacagctcgccgcgcttgacgccggtctgcccgaacagcccgaccatgtggccggcatcctgaccggtctggccgaggacgatggctggatgggcggcaagcgcccggtcgactggtccgacgccgtcgaggccgtgcgccgcatcgccggccgtatcggtgccgcaatcgaactcgaccagcccgccgccgacgatgtgcccgtccaatggcaccccggccgcgtcgcccgcgtcatggtgggcgacgtcttcaccggctgggttggtgaactgcacccgcgcgtcaacgaggcgctcggcttcccggcccattccgcggccttcgagctgaacctcaccgcgctgttcgccacgctgaccggcaagcccgtccaggccaagccgatctccacgttcccgccggtcaagcaggatttggccttcaccgtggacgagaccgtgaccgcaggccagcttgagaacgtgattcgcaaggccgccggcgcgaacctcgaatccatcgaactgttcgacgtgttcaccggcgaacaggtgggcgagggcaagaagtccctggcctatgcggtggtgttccgttcaccgagcaagacgctgtccgccgaagacagcgacgccatccgcaaggccatcgtggctgaggccgccgaaatcggcgcccagctgcgcgcctgacccaaccgatcatccgaatcgaggagcgtcatgagccaaccggagcaggacaagccgaaatacgggcagtaccagcagcctgaatatggtgctatgtctggccaatacgggccgaattacaacccgtatatttatggcgctcccgagccggataccaagaaggattccgccgcagccgctggcatcaacggtggcgcggcgcaatcccagcaggccggccagccgtacggtcagcagccggcgtggcccggcaatcagcaggcgggcggctggccgtatgctcaaggcggccaacagtccggtccgggcgcatatccgggcgggtacccgggcatgcaggggcagtcgtatggtcaacagccgaacggtcagcctcaccagccgcattattaccacggcatcgacctgaacgatccaaaccagaacccactctacgggcactgggattcgtatgcgatcatctcctttatcctcgccctgttcttcccggtgccagtgctctcggcactgatgggcgcggtggcaatgtggcgcacgcgcaccttccatatgaagggcttcggtttggctgtggccgccgtggtgatcaacgtgctgtacaccatcgccgtcatctggatggccttcaatggctatgacgccatgagcctctaccaggaagccctccagcaactcaccggcggcaccggctcctcctccgactccatctccgcataagtagcgttcacataccaacacacccactgcataaatatgcaatagtctgcataatcgcgtatactcatcccaagacacatcagtgaaaagagatgagtatggcgaaatatacagtggccgtggccggtgccacgggctatgccggcggtgaagcgctgcgcattctggccgcgcaccccgacttcgacatcacctgcgtggcaggccattcctcagtgggggagtcgatggccaagcacatgccgcatattccccaactggccaatctggtcgtcgaagataccacgcccgaagtgctgaacgggcatgacgttatcatcctcgcactgccgcacggtgcttcgggcaagctcgcctcgcagctcgatccgaatgccgtggttgtggatttgggcgccgaccatcgtctcgaagagcaggccgcttgggatgagttctacggcggcgatttctatgagcattggacctacggcatgcccgagctcatcaccggcaaagccgcggacggctcatacacccgccagcgcgcggcgcttcctggcaccaagcgcatcgcaggccctggctgcaacgtcaccgccaccacgctggccctccagcccggcatcgccgaaggactggttgaatcgcaggatatcgtggccgatctggtcgtcggatactcgggtgccggcaagaatctcaagcgcaccaacctgcttgccgccgaggccctgcaatccgccctgccgtattcggtgggcggcaagcaccgccacattcccgaaattctgcagaacttcgcccacgcggccggcaagagcgcggccgaagccagcgaattcacgctcggcttcacgccgattctcgcccccatgtcccgaggcatcctcgccaccgtgtccgcccgcatgacggacaaggccagggcgctgagcgatgaggagattcgcgccgtatggtccaaggcctatgaaggccaggacttcatggtgctgctgcccgagggcacactgcccgccgccggcaacatcatcggatccaacgcagcccacctgcaggtcgtcgccgaccgcaaggccggccgcatctacgcttttgccgccatagacaacctcaaccgtggcaccgccggacaagcggtccaatcactgaacatcgcactcggcctgccggaagacgcgggcctgaccaagatcggagtagcaccgtgagcgttacatttgcacaaggtttctccgccgccggcgtggcggctggtatttcatccgtcgaaggcaagaaggacttggccctcgtggtcaacaacggcccgctcgacgcggctgcaggcgtgttcacctcgaaccgtttctgtgccgccccggtgcagtggagccgtaaggtcgtcgccgacggtcacgtcaaggccgtgattctgaactccggcggtgccaacgcctgcaccggcgaggccggttacgcccagtccgtcaccaccgcggaaacggtcgccggtctcatcggcgccgaaccgaatgatgtggctgtctgctccaccggtctcatcggtgaactgctgccgttggacaacgtgctggctggtgccaagagtgcccatgaggctcttgccgccaccgccgaagccggcgccgccgcctcccacgccatcatgaccaccgacaccaagccgaaaacggtcgaactgaccggctccaacggctggaagatcggcggcatggtcaagggctcgggcatgattgccccgcagctggccaccatgctgtgcgtcatcaccaccgatgcggtcgtctccgccggccagatgcaggccgcactcgccgtggccgccgaacattcgttcaaccgcatcgacgtggacggctgcatgtccaccaacgacacggtcctgctgctcgcctccggtgcctccggcgtcgaaccggacaaggacgaattcaacaagctggtgcgtgaggcctgcgcatccctgtcccgccaaatcatcggcgacggcgaaggtgcctcccacgacatccgtatcaccgtcaccggtgccaccagcgaagacgcggcacttgcctgtggtcgtgccgtcgccgcctcgaacctgctcaagtgcgccatctccggcaacgatccgaactggggccgcatcgtcagctccttgggcactgtgccgcctgaagtcgcgccttacgattcgaacaaggtgaccgtggacgtcaacggtgtgcgcatctgcgagaacggcggcgccggccgcgaccgcagcgaggtcgacatgaccccgcgcgaagtccacatcgacatcgacctgaacaccggctcggacgccgaggccaccgtctggaccgacgacctcacccacgaatacgtccacatcaacgccgactacgaaagctgacaaacagcccagtgggctgtttgtagcagccggcagcgatagcgtcgccggcgtcgcatataacgcaaacagcccagtgggctgtttgtagcagccggcagcgatagcgtcgccggcgtcgcagaaaagagaaaaattggctacagaattgaagggacctgggttccatttcgacgtgcacaccgatttgcgcgccgatcagaaggcagaagtgcttattgaagcgctgccttggctggaggagttcgccggccagcgtatcgtcgtcaaatacggcggcaacgccatggtcgatgaccatctgaagcagtgcttcgccgaagacatggtcttcctgcgtcaggtgggcctgcatccgatcgtcgtgcacggcggcggcccgcagatctcccacatgctcaaggccctcggcatcaaatccgaattcaaaggcggcctgagggtcaccacccccgaggccatggacgtggtgcgcatggtcctgaccggcaaggtgtcacgcgaactggtcggcctgatcaacgcgcacggcccgctggccgtaggcctgtccggtgaagacggcggcctgttctcggccatgcagcgcaggcccatcatcaatggcaagcccaccgatatcggcttggtcggcgatgtggtttccgtcgatgcctcggcagtcgaggatctggtggccgccggtcgtatcccggtcgtctcttccgtggctccgaacgaagaagatgccactgaagtgctcaacgtgaacgccgattccgccgccgccgctttggctgccgctgtgggcgcacgcaagcttgttatcttgaccgatgtggatggtctgtacgccgattggccggacaagaattctctgattggccggatcggtgtggaaaacctgcgcgatatgctgccggacctggaatccggtatgcgccccaagatggaggcctgtgtcagggccatcgacggtggcgtgccccaagcccatatcatcgacgggcgcaagccgcattcgattttgaacgagatattcacctccgcaggcatcggtaccatggttatgcccgatgaaggactggaaatgaggagctcttatggctactgagcatgaggaaaaactaggtacggaagacagcaagtggctgggagagtactctcaggtccacatgaatgtgttcggtacgccgttgcgcgtcatggatcacggccaaggtgcccacatctgggatgttgacggtaacgaatacctcgatttcctggcaggcatcgccgtcaattccctcggatacgcccaccccaagtgggtcaaagcggttgccgatcaggctgccaaggtggctcatatcagcaactatttcgcgtccgagccgcaaattgagctggcatccaaactggtcaagctggctggtgcacctgaaggctccaaagtctacttcggcaactccggtgctgaaggcaatgaagctgccctcaagcttgccaagctgtatggccgcaccttgcctggtgccctgccttccatcggcggcaagcccgcacgcattctcgcaatgactcacggcttccatggccgtacgatgggtgcgctgtccgccacatggaaacccggtatccgcaagccgtatgatccgctggtgccgaacatcgaattcgtacgcgccggcgacaaggtcgccctgcacgacgcttttgcacagaccggtctcggccgctatggcaagggtccggtggctgctgtgattctggaacttatccagggcgaagccggcgtgcagccgttgggcgccgattacgtcaagttcgtgcgcgaactgtgcgatatcaaccacgcgctgctcatcatcgatgaagtacagaccggtatcggacgtaccggcaagtggttcgcattccagcgtgacgatctgtccggcggcgtgacgccggatatggtgactttcgccaagggcgtggcaggcggattcccgatgggcggcatgatcgctttcggcgagaaacttgcggctctgttcactcctggttcccacggctccacctttgccggcaatccgctgggtgcggctgcgggactcgccactcttgacgtgattgaagacgagaatctggtgaccaacgccgaagctcgcggcaaacagctgcgcgatggcattatggccaccggtaatccgctgttcgtttccgtacgcggccgtggtttgctggacgccgtcgagctcaagcatccctgctcccacgcggtgatgaactactgcctcgaacacgggctcatcgtcaacgcggtggctcccaatgcgctgcgtttcgcaccgccgctgattgtaaccgctcaagacgtggatcaggcacttgccatcctcaaggatgtgcctacggacctgcccgacgactgatttctcgccgtcactgccgacccaccgatccaaggagatcatcatgaccccagaacttcgccacatgctgcgtgacgacgacctcaaccatgaggagcagaagcaggtgctcgaacttgccatcaagttccaccatgaccgcttctacaagcagccgttcgccggtccgcaggccgtcgccgtactgttcgacaagccatccacccgcacccgttccagcttctccatcggcgttgccgagcttggcggctacccactggtcatcgacaagtccggctcccagctgggccgtggcgagcccgtggccgataccgctcgtgtgctcgaccgcatggcttacggcgtggtgtggcgcaccttcggccaggaccgcgtcgaagaaatggccaagtactccacccatccggtggtcaacgccctgaccgatgacttccatccctgccagattctcgccgacttccagaccatcgccgagcaccgaggcggcgtcgacaacctgaagaaccagaccatcgcctacctcggtgacgcggccaacaacatggccaactcctacctgctcggcggtgccgtggccggcatggacgtgcgcgtggccggcccccacggctacctgccccgcccggacatcgtggccgacgccaagcgcgtcgcggccgagaccggcggctccatcctggtcaccaccgatgccaaggaagcggtgaaggacgccgactgcgtgttcaccgacacctgggtctccatgggcgaggaggccgaatacgccatccgttccaagccgttctgggattaccaggtcaacaccgaacttatggcattggccaagccggatgcgctcttccagcactgcctgcccgcctaccgcggcaaggaagtcaccgctgaagtgatcgacggcccgcagtccgtggtgtgggacgaggccgagaaccgtctgcacgcacagaaagcgttgctgacttggttgaccggcaaggcccgtggagacgaaagcctgctcgcatgagtgaaaccggtccgtccctgcagcgccctgccaccagggcggcgcggctgagtgccatagaacaggcgctcgccacgcatatcatcacctcgcaatcacagctgtccaaaatccttatcgacgagggcattgcggtgactcaggcgaccctgagccgcgatcttgacgagatgcatgcggtgaagacccggctgaaggacggcacggtggcctacacggtgggtcgcagcgtcgttgcttcagaaggtgaggatgtaggggagcgcggtgaggcacagatgtcccgcgtgctgaacggactggtcacctcggtggccgccgccggaaatctggttgtggtgcacacgccttccggtgccgcacaatacgtggcctcggtgattgacaggcagccgatcgaaggcgtgctgggcaccatcgccggagacgacaccgtcatggtgatttgcaccaatgacgacaccgccgtctcccgctccgactggctactaagcctcgcttccaaataaccaacacgccgtgcataaatatacagtcctctgtatatacttgcatcagtttgtttttcagaccttgaatgaaagggaaccaatggcagataacaagcgcattgttctggcctactccggcggtcttgacacctccgtcgccatctcgtacctgaaggagcgcaccggcaaggacgtcgtggccgtgtccctcgacgtcggccagggcggcgaaagcctcgagaccatcaagcagcgcgccctcgcctgcggagccgtcgaatcctacgtggtcgacgcccgtgacgagttcgccaacgaatattgcatgaaggccctcaaggccaacgccatgtacgaaggcgtctacccgctggtctccgccatctcccgtccgctgatctccaagcacctcgtgcgcgccgcccaccagttcggcgccgacaccatctcccacggttgcaccggcaagggcaacgaccaggttcgtttcgaggtctccatcgcctccatcgacccgacgctgaaggccatcagcccgattcgtgacctgtccctgacccgcgatgtcgagatcgcgttcgccaaggagcacaagttgccgatcacccagaccgagaagtccccgtactccatcgaccagaacgtatggggccgcgccattgagaccggcttcctcgaggatccgtggaacggcccgaccaaggactgctactcctacaccgacgacccggccttcccgccggtcgaagatgaagtcgtcatcgagttcaaggaaggcgtgccggtcaagatcgacggacgtgacgtcactccgctgcaggccatcgaagagatgaaccgccgcgccggagcccagggcatcggccgcatcgacctcatcgaggaccgcctagtcggcatcaagtcccgcgagctgtacgaggctccgggtgccgtggctctgatcaccgctcaccaggaactcgaaaactgctgcctcgaacgcgaacagcaccgcatcaagcgcgacatcgacaagcgctggggcgagctggtttacgatgcgcagtggttctccccggcaacccagtcgctcaacgccttcatcgaagacacccagaagtacgtgtccggtgagattcgcatggtcctgcacggtggccgcgccgtggtgaccggccgtcgttccgactcctcgctgtacgactacaagctcgccacctacgattccggcgataccttcgaccagaagtcctccaacggcttcatcgacatctacggtctgccgtcccgcgtggccgcagcccgcgacgtcaagttcggcaacggcatcgaggtcccgaagaacaccgtcgagtgattcttactcagtcgcccccgctgcgaggctgtcggcatagctgactgggagtggtctttgaaaggactgtcctcagtcacactccatgtgacagccctcgccagcgggggcaactgtatgtttgaacacattgctacgcttaaacacagctattttcacttttcaaggagccttcatgactgagaacaacgaacatctggccctgtggggtggtcgctttacgtccggtccgtcgccggaactggcccgactgtccaagtccacgcagttcgactggcgcttggccgacgacgatatcgccggttcccgcgcccacgcccgtgctctcggccgtgcgggacttttgaccgccgacgagctgcagcgcatggaggatgcactcgacacgctccagcgtcatgtggatgacggctccttcgcccccatcgaagacgatgaggacgaggccaccgccctcgaacgcggactgatcgacattgccggcgacgaactcggcggcaaactgcgtgccggacgctcccgcaacgaccagatcgcctgcctgattcgtatgtggctgcgccgccactcccgtgcgattgccggactcctgcttgacctcgtcaacgccctgatcgagcagagcgaaaaggccggccgcaccgtgatgccgggccgcacccacatgcagcacgcccagcccgtgctgctcgcgcaccagctcatggcccacgcttggccgctgattcgcgacgtgcagcgactgatcgactgggacaagcgcatcaacgcctctccgtacggctccggcgcactggccggcaacacgctcggcctcgacccggaggccgtggcgcgtgagctcggcttctcccgcgtgaccgacaactccatcgacggcaccgccgcacgtgatctcgtggccgaattcgcgttcgtggccgccatgaccggcgtggacatctcccgcctgtccgaggagatcatcatctggaacacccaggagttcgccttcgtcaagctcgacgacggctattccaccggctcctccatcatgccgcagaagaagaacccggatatcgccgagctcgcccgcggcaagtccggccgactcatcggcgatctgaccggtctgctggccaccctgaagggcctgcccaccgcctacgctcgcgacctgcaggaggacaaggaggccgtgttcgaccaggtcgatacgctcgaagtgctgctgcccgccttcaccggcatggtcaagaccatgcacttcgacagcgagcggcttgaagaggaagccccgaccggcttcgcgctggccaccgacatcgccgaatggcttgtcaagaacggtgtgccgttccgccatgcgcacgagctctctggtgcctgcgtcaagctcgccgaaggccgcggccaggaactgtgggatctgaccgacaatgacttcatcgagaccttcgccgcgttcctgccggccgacaaggctccgggagtacgcgaagtgctctccagccacggttcggtcgactcccgcaacggcaagggcggcaccgcttacggtcgcgtgcgcgagcagatcgtcgacgccaaggccgaggtcgaagaactcaagctcttccccgcatccacgtcggatggctccgcctacaaagcccccggcacgttctagtcccaatagagctccctcgtcagagggagctctattttgctgttgtcactgcaacggcatacactgagaaatcgtaacgaacgggagccgtgaggctgagaggaagtcgccagacttcgaccggggaacttgacgcgggtcatgccgccgtaaggaatcgttgttgcagatttgccgggttctccgatacagctttcattccgtttgcataattcagccgtgagacggtcgtgatggagccaatacatcacagcggtcgaacggtcgcatgattgggttcatgaatgggcgcaccacttaaggtacggttcgtttcgtgcacccttttttactatctgaaaggatattatgcaggtcaacggagagcaggtcacgctcgagacgccggtcagcgtcgccgattatctcgaagcgcacggattccgcgccgagcgtgtggccatcgaactcaatggtgagattatcccgcgcgataagcgtgccgacgccatgctcgacgaccagtgcgtcatggaaattgtgcagtttgtacagggtggatgaaaggaaaagctatgagcaatattaatccggttactgaagcatctgttgaggcgact

SEQ ID NO: 1253 - DNA, 15062 bp, Unknown
  R81_24m  MAG No. k141_31848
catcgcaacgccagcgcgggttgcagccgtatggctttgatggccggggcaagagagccgacaagcgaggtgacgatggacgcacaggccgcaatcatcgccgccgtatatgggtatgcgggcggttccagcggcgagtcggcgggcatcatccacggaaatgcccagaccagcaccgcggagatgagcaccgcggcgaaggcgatgatgaggccgagcagcacggacgagccgatgacctgtatggctatgctggctctggtcgcgcccagtgcgcggcggatgagcagctcgtgcgagcgttgctcgatgccggccaatccgatgttgatcatgccgatggcggataccgacaacagtaatatcgcggtgacggtgacgccgagttggagaaaaccgatgacctgctcgtaatcatcggcgttgtcggaacggttccatgacgatatgctgccggtcccgacgtcgaacaacagatcgtccaacacggttttggcgtgttgatcgtccacgccttcattgggatggacgaggatggtcagcccatccggttcccaggcttgcggccagtagcgttgcagtgtggtcgcgttgacgtagatggtgggtgtgtccgtcccgtcggcgatgacaccgttcacccgtgccggcacctgttgcggatttcctgtccgggcgagtgccacggtgccgtcatgcacgtattggcgggcgctttcgttgactgcggtttccagcgtggcgggttcgtccgctccggtcagccatgtgccctcgatgatgggggcgggcatgattcttgtccgttcggcgtcggtgatgatgatggtgacgcggcgtatctccgtgttgccgtcaccggacgacgcccatatggcgaggtcgttgaggtgatattgcgccgatgcgattcccggacggaaatacgcgaggcgttcctgcaaagccgtgacgacttgtatgttcaccgatgatggcacgtcgacgatggcgctataggtgggtgacttgcctcccagtcgcgcgttgaccgcttccagatagtcgcgtccgagcgtgccgacgagaacgccggcgatgagggcgatgatgccgatgaacatcgacagggcggtgaggctggtacgcaacgggttgatgcgcagatccttggcgatcatgcggatcacgacagtcgccccctgtcgatcgtcagtcggcgttcgcatcgggcggcgagctgcgggtcgtgcgtgacgaggatgagtgtgaccccgagttcacgaacatgtcggaacagtatgtcggcgaccatgtcgccggtttcggtgtcgagcgcgccggttggctcgtcgcagatcagcaggtcgggatctcccaccagcgctcgggcgatggccacgcgctgctgttcgcctcccgacaggcgcgacggcatgctgcacaccgtccggctcccgagcccgacggtgtgcagcatgcgcgaggctcgtcttctgatgacccgcagggggatgcctccccggtattgcaatgggagtgccacgttctcccatgcgctcagatgcggtatgagggagtagttctggaacacgaagccgacatgccggcagcggaagcgcgcccggtcggcgtcgttccacgcggcgcagtcccgcccgtcataggagagcgttccgtcatagtcgttgttgagcagcccgacgatggaggcgagactggttttgccggatcctgatttcccgatgatggcggtggacgttcccctctcgaacgatgcgctgacatcgtccaccgtcgtcagacgttcgccgtcgggcagccggacttcggcgctcagatgttccaactggatgagtgtgctcatgattgcgctcccggtgtgagattcggagctgtcgcggacaccatgtcaccttcctcgagaccgtcgaggatgatgatcgacgtgccgtccgatgcccccaacttcacgttcacggtggcgaacgaatctccgtcacgcctgctgacctggccggaggcgagcctgccggcgactgcggtgacaggcaggatcaaggcgtcctcgaccgccgtcgcggtcagtaccacggtggcgttctgcccgggacgcgcctgcacgtcttttgggaacaggcattgcagtgtgcgagtcgattccgtcccatgcgcagtcgtcgccgatccggccgtatcttccgctgatgagggcggagtggcgacgccgtcattcactaccgcggcacagtccgtgggcccctgcgcgtcggtgatctggaatcggcccgtcaacggctggtccgggtctatggtcgccagcagcgcggtcgcgtccacgctggcgctcatgccgccataccgtatcgagaacagcggatagtccgcggccatgtcgttgtcctgcgcgaccgtttcgatcacgccgtcgaccggagccgtgacctgctgatcgccgacggtacccaacacgtcgcccgcatgcacgtatgctccttgatcagtcgtggagtggaaccagcctttcgccggagtcgtaagcgagaacacaggagccacctgcacgccggtggaggaagaggataacggcgtgatgccgcccctacgtacctcgaccgtggatgctggccgcttcgccgtggaggaggcgtcggacgatggcgtccgcgacggcgagcaagccgtcatcatcgcgcacatcgtcgtggccgtcacgcacgtcaacaggcatttgaacggtgcgatcgcattcatttcgtcggtccgttctcatgccggtaccatgtgcagtccgtggtgtagaagtcccgcatggtcgaatagtcgccgagttcggatttgccgatcacatcgttctcgtatatgccatccttgtcctcgtagtagttcttgaaccagtcggtatccagcagcttgcgcagctgctggagggcgcctcgggctgcttccgcgttggtctggctgttgtcgagaatgtcgcgttccaccgagcactgccagtagacatacgcctgtccttccccacttcccttggcatacagcgaggacgcggcctgcgccttgggtatattcgctggaaacgcatcgccgttcatcagttcaaaggggaaatcctcgacggtcgccttgtattcctcgttcgcttgctgccaggtcagcatgccgccacttcccgaggtgccgccgttcggagtcgtcccgcaaccggacagcagcatcactgcggtcagaatggcggccctgcgtcgtgttcccgatttcatcatcatgctccttcggacgattgcacaactgtcgccaaccattagcccacagacggcgatccgggagcaaaagactgtcatgcgcgcgcatgacaacgatacgtcgaggagcatgggatgcgcatacgatgggtggcatgacagacctatcggactcgcataccatctccatcggggtgctggacaacgattcgctcgccctcaacgccatagccgtgatgacgagccgtctctccccgcggttccacatcatctggagcaccacgtccccggcgatggcattgcagcgctgcatgacccacggcgcgcgacccgacgtgctggtcgtcgacatggccttgggaggcatcaccggcgcggacatatgcgccagaatccgtcggcgcactccgacgatcggcttggtgtgcgtcacctcctatgaccttgatccatatcggcaagacgcggtcgaggcgggcgcacaatgcctgatagccaaagatgacatcgtcaaagagctcccgcaggccatacgatgcgcggcacagggcgagcccgtccccggcaccggattccccaccgcacgggaagccaatcgcaaactcaacgaaggacacgcgaccgagggccggctgccggaaaacgacaagccatcgctgtcctccagggaacgggacgtactgcgcctctacgcgcatggatcatccaccgacgagatagccgcgctcctgaatgtcagcaagggcagcgtcttcacctacgtcaacagggcatgccgcaagctccatgccgccgaccgcaaggaggccctcgccatatgcgcccgatacgatctgctctgaaccgtatacaccacccagccatactggccgcggggctggtcctcgcagtggcgatccccgtagagatgggcgtgtactcatcccagaacctgctgtcatggtcgaccatacgcatatcgctgctcgtcgccgtcctgtgcgccatgctcggagcggcaccggtatgggccgcctgtctgctgttcgcggtctcaggatacgcgttgctgtggctgttctcgccgttgacgaccatcatgatcgccgcactgacctccatagcggtcctctcgttcgtcaaaccccgccttggagccgcttccgcactggcggccctcgccgccctcgccgcgaacaacatgcagaacaacctcacctcgtcgaacatcgtaggcatgatcatcatgtgcctatgcccattgtcgctggggttcagtctcaacctgctgttcgcccaacggcaggcgaccgcgacactcaggcaacgactcgaccgcgaacacacggcgcgtcacctgcacgacaccatcagcaacgacctcgcctacatgatcctgcgcatcgaccaggcaagccgcagtgattgccccgccgatcgggagcaatatcagcgccaactcaccgatctgcgcgccatcgccgaaacggcgctcgaccacacccaccaggtgatacgacaacttgaacgcaccgacaaaccagacgatcgcagccgcatcgtcaaaacaaataacgacgacaaaaccgacaggaaaatcgaacagcagcgtgaacggcttgacggcatcattcaatcgcaacgacgtcgccttggcggcctcggattccaaggtgacgacatcctcgggacgttcgaccatccactggcggacgacatcctcgaccttctcgaaggactgctcaacgaactgtacgcgaacatcgccaagcacgccgccccgcacgaatggtacgccgtcacgatctccttcgaccggcggcacgtcatcatttcggcaagcgacgtactaaaggacgaagcggtacggctcggactcggcagcggcctcaagagataccgaaccgttatcgaatccatgtccgggacgttcgacatcaccgatgattccgacaactggaacgcgaacatcaccattccattgtctgtaacacgccggtaaagggaatgacggcctcaagctgccagtgggcttgttcggtgtccggctggcttgcgctggtgtgtgttcttcgagcgagtcgatgacctcgtgcgtgtggcccatggcccggctggcggcgtcgcgcaattcgtcgagctgttgctggtattcgtgttcgtcggcgggcatgccgtcggtcccggcgtgaccatcgggacatccagcatgaggattacgcccgtgacaagcgccggccacaggaaccggtccgggcggaacatgccgccgaccaggccggcaagcacagccagagccaacatgatatcgcgcacggtcgcggtgccggggacccgtgccgccatcgagaacacgtactccgcgagcaccgccacggacaatacggcgcaggacgccgcgatcaccggatgccctgcatgccgcaggccaagccggtcggaaagccggggcagagcagatcgtatctggcgcatgcgtccagcacctccttgcggctggcgactcccagcttgtcggccacgcggtgcacgtacgtgaacacgctgcccgtcccgccgctcctgcgacggatgcgccggcacacgtcagcgcccgtgatttttttcccaacgccatatccaacaccagcgcatccggcctggtatgcgggttatggcagtgctcgatcgccactgcgggcgaacccgtgccccacatgacatggaagtccttggatacggccgagatcatcgcgcacatcgcatccagggcgaacggatcattgtccaatacgggcgatacggatcgaccgcgccgcagccccggtcatgtcatcatgtcccatgccgctcatcgtggccacggtcgcagccggacaaaacctgctgtcatgcgattacttgacacgatgttgcgcttttggccatgcgcaggttgaatgggattgcgccacgaaaggatatgccatgaacgatctgctgattatcgacatgctgcccacgtacgggctgctgttctacctgctgatctcggtattcgtcttcgtgggatgccgtggtctgcgccggaggacctcggatcgtggcctgctgcgttttgccgtaggcgcgttcttggttgtttccgcgctcggcgccgtgttcgctgcgctggtgtatatcatggcagcgcctttggcgcagccggatatggtcgacttctaccgcacgtaccagtcaggagctctgatcttcctgctgggattgttcatcatacaatttgtcttcggcgtcgctgccgtgtatcggggaaagtaacctggtatatcctgcgataaacgcattggcagacacttgctgcctatctgtaaacacaccctagataaggcttgcggccgttggccgagcacagtagtagtgtggtctgctgtgtcaacaggaggagtgtgaccaatgcggctgattgagacatggctggcggaccaggaacgcgcgtttgacttgttcgcgaaattcccggcggaggagacgggattcgagaacccagcggccggcatgaatcgtgaacggttcgccgcatatgtgcgagggttgcgtgatgagtcgcttggcgtcggcctgccggacggctgggtgccagccaccaaatacattctcgtcaacgatgagggcgactatgtgggcatcttcaacctgcgtcaccggctcaccgacttcctgcgcaacggtccgggccacatcggctacggtgtcgcccgcgaataccgcggtcacggctacgcgaccgccgggctcaagctcacgcttgccaaggcccgcgagctcggcatcaaggaggcttacctgagtgtccacaaaaccaatccggcaagtcttgcggtgcagcagcattgcggcgcacgtatcgaccatgaggacaagacggaatactacacacgcatcgccacctgcacggagagcgatggcctctatgcgcgaggcgattgacggcgcctcttgcgtgtaaatggccgattatcaatcggttttaatcgatttcgcctcggtcgataaagtcgccgtcgaggaaccaataatcgtgcggatttccgcgtaacgccatgaacggcgtgagttccacgccctgtgtctcagctctgctcagcagataggcgcggataatccacggatactccagcacgcccgacttgagggtgatgatttgctccactctgctgccgctgacgccaaaatccctgccgccgttcggcggtcagacccagccggctcatgttctcctgaaattcgcggatagtcgccgcgcgttgctcactgttcaaagacatggcttcatgaatgttgcattggcgccttaatcatccatagttaaggcaccacgcaacatacgattcgcttacgcagccatccgacgatggttgggatagattgttcggcgaagcggtctatggcgtcggcggtgacgtaggcgtgggcggtgaggcgcaggtacagttcgccgccgaccgcgctggccgcctcggatacccgacgctccgcgtaatcggcaagatcggacatgtaccggcgcacggcatcacagccccacagtcgctcgatctcgcgcagggactcgggcgcggcgatcggaccgtataaatcctgggtgccttgctcatcgaatcgctccgggaacgggtcagcgaaaccccacgagtcgatcagtggccacaaatcctgaccatcctgaccgccttcgggcggaatcaccagcaatgccgtgccacgcggcgcacacgggaacttatgaaaattgccgacccaccaatcggactgcagtccgccggccggatcggccagttgggcgggagcgtgcgcgccatcaaccaaaatgcggatgccgcggcgatgggcttcggcggcgatgcgctgggccgtaaacagcatagcggtggcggaagtaatctggtccaacacgatgaacgacgtacgctcgctcatctgcgcggtcacggcgccgaccacgccatcctcgtcggcgtcaatggtaactggtgcatcttcctcatccatgcgaatgagacgaatcgcctttcatcccaatgatttcgctctcatggctgatacccgcgtgccgtcatgttccgtaccttggaatcagaagtcgagagtcaaggtccgaaaccgaacggagcgggccgaagcagggagcattgaagatgggatttcttaagaacttttccgaaccgtttgcattcgcgatggcattgtggccgtttgtgtccatgctgctgactgtgccggtgctggcgttgctgtatcaccgcgacaatcgcatccgactgtcatcggccatagtggcgtatggcacggtgctgtacttgctcggcctgctgtgtttcacactgtatccgatgccggccgactcggcggcctattgcgccgcgcaccatctgacaccgcagctcaacccactgcagttcatcggtgacatccgtaccgatggtctcaccgccgtactgcaaatcgcgtttaatatcgtgttcttcctgccgttgggcttcatcatgggccgtatctggcgttggccgctgccggttaccgcagtactgtcgttcgccacgtcgctatttctggagacgatgcagctgaccggcctcatgggcgtgttcccgtgcgcctaccgtctgttcgacgtggacgatctcctgtggaacacgaccggcgcgctgatcggattcgcgctggccatgctttcgctgcgcctgattccggcgcgggtcgccgatatgacgccgaccaccacacctggcttcatgaggcggctgatcacgttcatcatcgacatgacgctgatcgggttcgccgtgatgccgacgcatctgttcgtcatgatcgtccgctcaaacctgccctcgggctccaacggctcatggcagtcgatggaaccgttcgactggaccggctcgatcctcttcctggcggcgctcatcctcttcgagggcgtggtgccatggttgcgcggcggctgcacgttcggcggcagcttcacgcacatgacgatagagacccggccgcgcgaagggtggcttcgcgtggcgttctatgtggcgcgcatggcgacgctgatcgccgtggtgtggtggcatagtggcggattcaatctgctggtgttcatcggcctcggcatcttctggctggtcaagcgtcagatgccgtacgacctgatataaaccggcgctccgctgcttggcgttacaggaaaacctccgaccactggtcgggattcggaatgctgcgcagcgggccggccaacgatacggccaatcccgctacggaacagaccacggctacggccatcaccgccgtgaaaccgagatctggctgttgcaacagccagccgaccatcgccgggcatgctgcgcccagtatgccgaccgtggtttcaaatacggcagaagcccgcccctgcatgttgtcggatgtcttgccgtagagaaagcccagcagaccagcgttcaacgcggggaacggcaggccggccagaatctggcagatcagaatggccgcgtagctgtgcaggaatagcagtggcatctggctgaccacgaacaacgccagcgcgcccgcaatcagtttccctgtgggaaccatatcgactagcttgttggccaacagcgagccgaccaaagtactcacgcccattgccgtgccgagcagtccgatcatgaccgcgttggcgccacgggtggccaacatgatctgcgcgccggtgatactggctacgcaggcgatgttcaccattgcaccgagtatgatcgcgtataggaagacgcgcttgatcagggcccatcgccagccttcgaccaagtgcgtgggaaatggcacaacagaagtgccgtgggcccaaacggcgaccacggcttagcgcgacgagtcaacgcgcattagctgtctgcgaacgacaccaacaccttgtacataacaatgccctttgcaaaaacaaactccaattgttgtaccagttcgagcacgggaccaggcacgtcactgggctcaacataatcggccatcaatggtttctcggcttcgaggggctgatttcgtccggtggggacatctacttggctttcgaggggctgctcaaacgccaaaccacgagtataaacggctttgcggcaacgccattacgccatttcagagccttgtctacttgggcatcagccccttgaaacgcaagtagacctccggcgaacgccgaatcagcccctcgaaatcgagttaggcgttgttttcgcgtttgcgctgccgttcgagtgcgtaataagccgcgtagcagcaggcgacgaacgggatcatgcaatacagggtcgaacgctgcgtatcatcgagcaccacgagcaccagcgcgccgatgcacatcacgatggccagccacggcagcaccgggaaaccgggcgcacgatagccgagctcatcggcgctgtgcccaccccgcgcccattcgcgccggaaacggatatggcacacgcatacggagaaccacaccaccagcgtcgccaaacctgacacggcgaccaacaccagatacacggtcgaggcggcgatcacggaagacagcaacgccagcagtgagcccgccatgctgaacagcacggcccacaccggcacaccacggaaattcgtcctagcaaaacgttcgggaatcagccgctccttggccagcgaccacaccatgcgcgaacacacgtacaggccggagttcgcggcggaaagcacggccgtcaacaccacgaagttcatgatgtcgccggcgaacggcataccgattgactggaacaccagcacgaacgggctcgtatccacgccggcctgatgccaggggatcaaggccgccatcaccagaatcgagccgatgaagaaaatcgccaggcgcagcaccgtggtgtgcacggccttgggaatcgcacgcgagggatccttggtttcgccggccgccacgcccaccacttcggtgccggagaacgcgaacaccacggtcagcagagtcgagaaaatcggcgcgataccgcttgggaaccagccgtcggccacgaagttgcccagcaacggcgcggaatcatgaccggcaatcggtatggcgccgaagatcgccagcaggccgatcacaatgaacgcgatgatggcgaacaccttgattgacgcgaaccagaattccgcctcgccgtacagccgcacggacatgatgttgagcgcgaacaccaccacaatgaacacggccgaccacacccaggacggcgaatgcgggaaccatcgctgcatcaacagccctgcggccgtgaattcggaggcgagcgccaccgcccagttcagccaatacaggatggcgatggtgaacgcggtgccggggccgatgaaccgcttcgcatacatgtggaagctgccggcgtacggcatggccacggacagctcgcccaacgacaccatcacgcagtatacgagcagagagccggccgcgtaagcgaggatcgcgcccaacggtcccgcctgatgaatcgcgtagccggagctgacgaacagaccggtgccgatcacgccgcccagggagatcatcgtcaggtgacgcgactccatcttccgttcaaggccggtatcgtccttgggtgtgccggctgccgccatgctcgggtctcctttggtcgggtgaacagttgtgtctcgtgtcggttgtgcgggcggcgctcgatgccgcctaccatatgatagcggtaacacgaacagcgagtggaacacgaggagtttggaatgatggaactgtatatcggatcgcatctgtcgacggccggcggatggaatgcgctgctggaacgttcccatgaggagggcggtaccgcgttcgcgttcttcccgcgttccccgtacggcaagcgttcgaaggcgctcgacccggccggcgcggcggcgttcggtgcgcgtctgaaggctgagggctatgggccgttggtcgtccatgcgccgtacgtctacaatctggccggcaaggatgaggccaagcgcacattcgcgatcgaggcgttggccgaggacatcgagctgctgaccgccatccgcgaggccggacaggaggtgtatatcaatattcatcccggcgcgcatgtgggtcaaggctccgagaccggctgccggctgatcagcgagggactgaatcaggtgttcgagcgtacgaccggcgtcatggtgcttctggagaccatggccggcaaaggcacggaatgtggccgcaatttcgatgagctcgccacgatcatggatggcgtggagaataaggcgaacgtcggcgtcacgttcgacacctgccatgtgttggatgccggctacgatttggtgcacgactacgacggcgtgatgcgccagttggatgaggcgatcggcttggccaaggtcaaggcgattcacgtgaacgattcgcagtttggcctcggctcgcacaaggaccgtcacgccaatatcggcgagggccagctcggcatcccgttcttcacgcgactggtcaacgacccaaccatggccaagctcccgatgattctcgaaaccaaggagcagacgcccgccacgcatcgcgacgagatcgagttgttgcgcggattggtgcaaaagtagtcgtagtcgaccaatgtcgagcagaagagacctgtttttgactgatggccatacgaggttagttatcagcggggtgttgattgatccgtcttcatatacagctgcatagccggttccagctgcaagagctcaaaacagacgcatgggttcggtggaatccaatggctgaataagacgtttgccgtcgctgttcagtggcgcgacttcgtgaaattgcagatgccgggaaagcatggtacccgcttcccgcatggaatctaacagtgcggctccgtcaacggagcggtccagccatgaggcaaccatattccgaggcgccagcaggggcatgcgatcatgcaccttgatgaactcgtccgcggcagggcaggtgatgatggttgcggtcagctgccatggcgatgcgggagacggcctccaccatgagtacaggccggccaaagacaatagttcatcatgtggtgcgtgaaaatagaacggcctgcgacctttccattcgtagtagccggaagcggggatgatggctcgcatggattttgtggattcggcgaacgccggcttgacatgcgcagactccacacgcgcattatatgtggggtagctcagcactttgctggcgctccatcgcggcactagcgaccaataggcaccggtcagatgacggcggccatccttgccctgtgccaccacgccaatgttctgcatgggtgcgatgttgtaggaaggctgtggcagagtgtcaacgcgcacgtcatcctcgtctaccgcgaactgtgaggccacggcatcccaatccaaatcaagcgcgaatctcctgcacatgcgcccagtctatgccatcaatggaatcaatcccaggccgtatgaccgatattcatggcgattttcctttttgttggccgctctggttccgtagcgatacgaaccaacgaggaatagcccagaatgtaggacgggttcggcaatcgggacggggcgtgacctagagtggcgcatgaccgaacaccaacaaagggaggaccatgtcggttttggacgaactggtggcgggagcgctggaggatcagcgcgcccgtgagctcaccgtatcgcttgaggacgtgaagaaggccgcgctggcggccccggctccgattgacgcaacacgatggctcaagcgcgccgatggcatcccggtgatcgccgagatcaagcgcgcgtccccgtccaagggccacctctccgacatcccggacccggccgcgctggcccgcgagtacgagaagggcggcgcaagcgccatctccgtgctcaccgaaggccgcagattcctcggcggccttgacgatttcgacaaggtccgcgccgccgtgcacattccggtgctgcgcaaggacttcatcgtcaccgactaccagatcttcgaggcccgcgcccacggcgccgacctggtgctgctcatcgtcgccgcattggacgacgcccagctcaagcacctgctcgacctggcgcacgagttgaacatgaccgtgctggtggagacgcatacccgcgaggagatcgaacgcgcccgcaaggccggtgccaaggtgatcggcatcaacgcgcgcaacctgaagaacctcaaggtggacgtgaacaaatacaacgaactcgcggccgatctgcccgatgacgtcatcaaggtggcggaatccggcgtattcggcgcggtcgaggtcgaagactacgcccgcgcgggagcggatgcggtactggtcggtgaaggcgtggccaccgctgatgatcatgaacttgcagtggaacgactagtaaaggcaggagcacaagtgaaagcatccgaaaccaccccgctcagcgaacatcagggaccgtactggggacagttcggcggccgctatgtgcccgaggccctcatcaccgccctcgacgagctggagcgcgtgtacacgcaagccaaggccgaccccgaattccacaaggaattcatgacgctccagcagcgttacgtgggccgtccgagtccgctgaccgaagccccgcgcttcgccgcactggtcaaggagaagaccggtctcgacgcccgtatcttcctcaagcgcgaggacttgaaccacaccggcgcgcacaagatcaacaacgcgctcggccaggccccgctcgtcaagcgcatgggcaagactcgcgtgatcgccgagaccggtgccggccagcacggcgtggccaccgccaccgtgtgcgccatgctcggcctcaagtgccgcatctacatgggccagatcgacg

SEQ ID NO: 1254 - DNA, 24769 bp, Unknown
  R81_24m  MAG No. k141_32461
tgaggtgtgccgcggtcagctgagctggccggcgaagctgagcaagaatggtgcggctgaatgggccgccggcttactggcgttcgactggctgtctcgtcctgatttcgtggcctatgactggaccggtggcgcttcgccgcaagtcaggctcgctcgttcgatgggtgcgatgccggtttcatggaccgtgcgcagcagcgatgaactcgcccagtgcgcgccctacttcgaccgccacatcttcgaagcgttcgtccccgacgcagtgtgaggttgagggcgttattgatgtgcccatggggcggtaacttgcccatggggcggtttgaagaatatgtgaaaccgcggaattaagccattttggcataccgccccatgagggttttaccgccccatgaggcaattaccgccccatgggggatttcccgccccatgaggtatggcgttttacttgtgatatggctcgccagcgttgatcttataagcgcgatagatctgctccagcagaatcacgcgcatgagctgatgcgggaacgtcatcttcgagaaactcagcagaaaatcagcacgacgcagaatcgcgtcgtcaaggccgattgagccgccgatgaccagctgaatatggctggtgccacgcaatccaaggtcgttgattttggcggccaattcttcgctggacagctgcttgccattgatggcaagggcaataacaaacgcgccgtccttcagatgcttggcgatgcgttcgccttctttggccttgatctgtcggtcaacgccttcggaggcgtggtcaggcgttttctcatctgccacttcaatgatgttgagcctgcagtagcgcgaaagtcgcttggaatactcgtcgatggcgtcgcgaagatattgttccttcacgcgtcccggcgcaataatgtcgatttgcataaaaagcccatcacattggctcccctctctgaggggagccaggaaaatcagtcaattacgccatagagacggtcgccggcatcgcccaaccccggcacgatgtagcacttgtcgttgagcttctcgtcgaccgcgcacactacgaccttgaagtcgatggacggatcgatgtgctcttccacgaacttgatgccttcaggcgccgcgatgatgttgatcgcggtcacgtccttggcaccgcgctcggccagatagtgagtggcagcaaccagcgtgccaccggtggcgagcatcgggtcgatcaggaagcactgacgaccggacaggtcctccggtagacggttcgcataggtgacctgctgagtggggtgttcctcgtcgcgcttcataccaaggaagccgacttcggcggtcggcataagacgggtcatgccatcgagcatacccagacctgcacgcagcaccggcacaatgatcggacgcggtttggccagcttcttaccggtcatcggagcgaccggtgtttcgattggtgcggcaactacggacaggttgcgggtggcctcataggcctcgagcatcacaagctccgagacgagctcgcggaaagtggaggaaggagtgttcttgtcgcgcagcacggtgagcttgtgctcgaccagcggatgattcaaaacgtgaagttccatactccccagcctacccgtagttcgcggggaagtcacttgggcggcagtcgcgcgcgtatcgcacaccaatgtaaacagcgttcgacggcgggccgcgtaacaccgttgattttgtaacgtgagcgttatgtatgagacgcatatgaaatattcaggcaacggaaattcacgcaggcactgccatcgtatagtgcagtcggccggaagccagccgtcgatatacggcaagtggttcagcacgatatcaggcatcagggcacggtacggcaatcagcgtagacattccgcgggcgggcaacgttcgcggaatgtagtcgtatgtggggaggaagagtcatatgactcgattgcaaagactgaagatgggtgctgcggtgtgcattgttgccgcagtgcttgccaccagcggttgtggctggggtcgcaccgtggccgagaaagaggcccaagagaacaacgcgactgcggcaagcgacacctcatcatgtgtggacacctcaggcaacaccatcaaaatcggtttcgtgaattcgctgtctggcacgatggccatttccgaacagacggtgagtgattcgctgcacatggccgttgatgagattaacgcaaagggcggcgtgctgggcaagcagctcaaggtagtgcagcaggacggcaagtccgagccggctgtgttcgccgaaaaagccaagaccctcatcgaaaaggaatgcgtggccgcggtgttcggcggctggacgtcctcttcgcgtaaggccatgctgcctgtgttcgaggcggataacgcgctgctgttctacccgctgcaatacgagggcatggaagccagcccgaacatcttctactcgggtgctgcaccgaaccagcagattgtgcctgcgcttgattaccttaaggagcaaggctacaagaagctgttcttggttggctccgattatgtgttcccgcagaccgcaaatcgcgtggtcaaggcgtacgccgagggcaatggcatggaagtggtcggcgaggaatataccccaatgggctccaccgacttcaccaccatcgtcaacaagctcaagttctccggcgcggatgcggtggtgaacacgctgaacggtgattccaacgtcgcattcttcaaggaatacaaggcttccggcctgaaagccgccaccacgccggtgatttccatgtctatcgccgaggaagaggtttccgctatcggcgttgacaacgtcaaggaccagctcactgcttggaactactaccagacgctgaacaatgcgcaaaacaagacgttcgtgaagaacttcaaggcgcgctacggagccaatcgccccacctccgacccgatggaatcggcgtacacatctgtgtacctgtggaagggcatggtcgagaaggccaagtcgttcgatgtggacaaggtcaaggctgcagcagacggcgtcaccttcaatgcaccggaaggcaaggtcaaggtggacggcgaaaaccaccacatctacaagacctcatacatcggcaagatcggctcagacaagctcatccacaccgtctggaagtcggacggtcccatcaagccggacccgtacctgaagacctacagctgggccaagagcctgagcgccagcgtcgagagcaactgagagaagaggacacaacaacatgggtatgttatttccacaaattgtggcaggtctgtccaacggatcgattctgctgctcgcagccctcgggttgtcgttgaccttcggccagatgggcgttatcaacaacgcccacggcgaattcatgatggccggcgcatacaccgcatacgtcatgagcatggtcatcggcaataaaacagtgtccctggccgtggcgctggtggtcggtttcgtagtagccggtttgcttggtttactgctggacgtgttgctgctggagcgtatgcgcaatcgtccgcttgatacgctgctggttaccttcggtgtatcgctggtattgcagcagctcgcacgcgatattttcggtgccactccggtctacgcttcggctcctgaagcgctgaccaatccggtgaccatctttggctacagcttctctgcaggccgactgttcatctttattctgtcgattatctgcgtggctgcgctgtacgcgatcctgaagctcacgccgctgggtcgccagattcgcgccacttccgagaaccgcgacctcgctgaggtttccggtatctccaccaagatggtcgaccatgtgacgttcttcctgggctccggcatcgccggtatcgctggcgtggcgctgagcctgctgaactcgattagcttcaacttcggtacgaccttcatcgtgcaggccttcctggttgttgtggccggcggcgttggccagctcaagggcgcggttatcgcctcgttcgtgctgggcttgtgccagtcgtccatcgaactgccgacctctgcctcgattggtcaggttgccgtgttcctgattgtggtggtgttcctgcagttcaggccgcagggcttggtctccatccgctccaggaacctcgcgtgagtgcttcagaagggtaaggaaacgacaatgaagatgactttgagcgaatacgccacgaaatataaggctttgatcggtgtggtcattgccgtggcgctgatcttcctttctccgactgtgctgagcgtgtacaacctcggcctgctgtccaaatacctgtgctacgcgatggtcgcggtcggcatcggcctggcttggggccaaggcggtatgctgacgctgggccaaggcctgttctttggtctcggcgcgtacgtgatggctatccacatgaagcttgaggacattggcgtgggccaagtgccggacttcatgtcccagtacggcatcaccaaggttcctggattctgggaactcttccgcaatccggtcatcgccgtgattggcgtggctgcggtaccgggcattatcgccgcaatcctcggtctggctgtgttcggccgtggcgtgcgtggcgcctacttcgcaattctttcgcaggcgctggttgccgcgttcgccgtgctgcttatcggccagtcgaaaaccaccggtggcaccaacggtctcaacgatttcaagggattctttggttacgacttgactgataacgccaacaagcagatgatcttctacatctgcgcgttcctgacgctggccatggtgcttatcgtctactggattcgcaaatcgtttatgggcgacctgattatcggcgtgcgcgaccaagagaaccgcatgaagttcttgggctataaccccgcctccatcaaggtgttcgccttctcggtggctgcaatgttcgccggcattggtggcgcaatgttcgtgccagtggtcggcatcatttcgccgtccgatatcggcgtgacgccgtccatcctgatgctcgccggcgtggtgatcggcggacgtgccactttgctcggcccggtggtcggcacgctgctggtgcgctttgcggaaacgcagctgtctgaggcgtatccgtccgcgtggacgtacatcgaaggcctgatcttcattctggtgattgcctttgtgccgaagggcttgggacagttcaagggcgtatggccttggattaaggagaagatcgggctcggaaagagttcggttggagcttcggctggtgctggtgccgttgccggtaccggtactgctactgcaaaggcggtgaacgcatgagtgaggagaagaacatgagctcgaatccatcggctcccgcacctgcatcgcaggccgatttggagcagttgcgcgccgaaatgattgagatgcgcgacgaagccaagcgtatgcgcgacgaagcggcccagatgaaggccgaaatcgttgaagagcgtacgaagctgcacgatcagcttgcggtgctggatgatcgcggcggccagtggagcgattatctggaagttcgtggactgcacgttgagttcgatggattcgtggccgtcaagaatcttgatttgactgtgcagcacggcgatttgcgattcctgatcggcccgaacggtgctggtaaaacgaccatcatcgacgcgattaccggactggtgccggccactggttccgcggaattccgtggcgagcagctgttgggccgcaagccgaacgacatcgtcaagctgggcgtcgggcgtaccttccagaccgcatcggtggttgaagagctgtccgtgttggagaatctgcagctggccgagggcttccgcaagaagggtcgtgagctgttccagccgatgggcggcgtttcgcagaacatcgaatacatgatggacgtgtgcaatctgactgtggatgcaaacaagcccgcaggcatcctgccgcacggcaagaaacagtggctggaaatcggtatgctgctcgtgcaggacgcgcacctgctgctgctcgacgagccggtggccggcatgactccggccgagcgtgtgcagaccggtgagctgctcaagcgatgcagcaagaaccgcacggtcatcatcgtggaacacgacatggatttcatgcgtcagttcgccgattcggtcacggtgctcaaccagggcgaaatccttgccgagggttcggtcgaagacatccaaaacaacgaagaagtagtccgcatctacctgggcggcggagaaaactaactccctgtctcccctccctgaggccgaggcgttaagcaaacagcccagtgggctgtttgtagccgaaggcgagacgatagtcgaaccagcaggttgcaggcaaggcccgtccttaattgcggacgagctgtcaccgaaggtgactgaggggagtaggtaagaggaagaagcgcaatatggaccgcactgacaacaaccatcgcatcccggaatgcgctttttcagtgcatattgagggtgatacaacgcgcctcaacatcaatatgcacgacgccgtagaaagtgaataatcatggcaatgcttgaagtaaaggatttgaacaccggttacggcaaagtgaccgtcgtcaacgacatcagtttcgacgtggccgccggcgaatgggtgagcatcgtcggcaacaacggtgccggtaagaccacgctgttgaaggcgattctgggcttgctgcccgtttcgtccggttcgattagtttcgagggcaaggacattaccaaggctgcaccgaaccaacgcatccgcaagggcatggcgttcgtgccgcagggccagcagtcctttggcaccatgaccgtggacgaaaacctgcacgtggtcgccgaccgctacggttcagaggccaaggcccgttacgacgaagccgtggaaatgttcccggtcttgaaggaatttgctggccgacgtgccggtctgctgtccggtggccagcgtcagcagctttcgattgcccgcgcgctgatcacccgccccaagctcatgattctcgatgagccgaccgaaggcatccagcccaatatcgtcgccgaaatccagaaggccattcgcatgatggccgaagacaagggtatcggtgtggtcttggttgagcagaaggtccaattcgccgtcgagcgcgccgaccgctactacgtcctggcctccggccgtttcatcgccaccggcgaaggcggccccgaccaagtagaagccgccaaggaatccatgagagtgtgattaattcgacccccgtttatggccatagagcgttatgagaaacgtcccgttcttataacgctcttattattgggcgatgttagggctcacattggtgtgcctgaaaaactccagtcaacaacagaggatgttatgagacttacaccacgagagactgacaagttgatgctgtacttggcggggcagcttgccaaagaccgcaaagccagaggcgtgaagctcaactatgtggaggcgattgcgttgatttccgccgaatgcgttgagcgggcgcgtgagggaagcactgtggcggagctcatggcatacggtcgcacgctgctcaagcctgaagatgtgatggatggcgtggccgagatgctggaagtggtggaggtcgaggccacgttcccggacggcaccaagctcgtctctattcataaccccatcgaatccaccgagaagttggtgccgggggaatatctgctggctgacgatgatttggaactcaatgaaggttccgaagacatcgagctggacgtggtgaacactgcggatcgaccgattcagattggttcgcacttccacttctttgaagttaataagtacctgaagttcgaccgtaaggcggcgtatggcaagcggttggatatcgcggctggtacggctgtgaggttcgagccgggtgaaacgcatcgagtgcggttgattgatattggtggcacgcgtgagattcacggcttcagcgcactggttgaggggaagttggatgaccctgaggtgcgggaggccgcgtttaagaaggcgcatgagcttggattctcgggaatctgagctaagggccaccctcagtcagcttcgctgacagctcccgccagcggggagcggactacctctcagtctcgcttcgcgagccagctcccctgacaaggggagctgaaaaacagcaaggacttttgacatgaagattattacgcgcaaggattatgcgggaatgttcgggccgaccacgggagaccgcgtgcgactcggtgacacgaacctcatcatcgaggtggaaaaggactacacgcactacggtgatgaactgaagttcggtggaggcaaatcattccgcgacggcatgggccaaagctccgtgcagctcgacgttgaatcgccggataccatcatcaccaacgccctcatcgtggactacaccggcatctacaaggcggacatcggcatcaaagacggcaaaatcagcgccatcggcaaggccggcagcccgcagaccatgagcggtatcacccccggtctcgaagcgggctccggcactgaagctctcgccggcgaaggcctcatcgtcaccgcaggcggactcgacacccacatccacttcatctccccgcagcagattcgcactgccctcgccggtggcgtgaccacgatggtcggcggcggcaccggtccggccgacggcaccaacgccaccacctgcaacccgggagccttccacctgacccgcatgatcgaggccgccgaagcgctgcccatcaacatcgcctaccttggcaagggcaacgactccagccccgaaccgttgcgtgagcagattcgcgccggtgccgcaggtctgaagatccacgaggactggggtgccaccccggccgtcatcgacactgcactcggcgtggccgacgaaaccgacacgcaggtggctatccacaccgatactctgaacgaaggcggttgtgtggaagacaccatcgccgcgttcaagggccgcaccatccacacctaccacaccgaaggcgctggaggcggccacgctccggacatcattcgtgccgctggcttcccaaacgtgctgccgagttccacgaacccgaccatgccgttcacgcgcaacaccatcgacgagcatctcgacatgatgatggtctgccaccacctcgaccgcaatgtgcccgaagacatctctttcgccgactcgcgcatccgccccgagaccatcggtgccgaagacgtgctacacgacatgggcatcatctccatgatgagctccgactcgcaggccatgggccgcgtgggcgaggtcatcacccgcaccatccagaccgccgacaaaatgaagaagcagcgcggtccgctccccgaagacgaacacgacaacaatcgcaacgacaacttccgtgtcaagcgctacgtctccaagttcaccatcaacccggccatcacccacggcatttccgaatacgtgggctccatcgaagtcggtaagatggcggatctcgtgctttggcagccgtccatgttcggcgcgaagccggaaatggtcatcaagggtggctccatcgcctactctcgtatgggtgacgcgaatgcttctatcccgaccccggaacctgtctactaccgcgatatgttcggcgcgctcggccgtgcgcttggcaagtcctgcgccacgtttgtttcgcaggccgccgtggatgacgatatcaagggcaagctggagctgcagcgccaggtgttaccagtgcatggctgccgcacggtaggcaagaaggatctgaagttcaacgacgtgctcgccgacattcaggtcaatcccgaaaccttccaagtgacggtggacggcgaaccggtccactctgacccggcgtacgagttgccgcttacccagcggtacttcctgttctgagagaactggtggctctcctcaaaggggagagccacttggttttagccttcggtcacgaaatcggtcacgaaatcggccacatctcgaatgaggtcgaaggcgtcgtcgcctcgggtggtcagtacacgcaagcagatgccattgattacgcggctcacgccgagctcgccggtgaagccgatggcgtctgcgtgttcatggatgcgagtgatgagcgcgtcttcggcggcgatgcgggcagtctcgatgcgctcgcggatggcggcggaggatgcttctttagttgcggcatcttgtgcagcgtcgctagggtcgagttcgggcaggtgagcgtagagaacgccgcagtgggtgaattcgcgccacatgccgagttcggtgtagtcaaaagcatcaggttccaacagcatgcggtcagcaaaggccagatgttcgcgcggttgggcagcggcggcttccgccttggaaggccggcctcggcgatgtgcgtgctgttgcgccaattcggctgcggcggccttggtcacggcttcgggttcggccacatatacgcgcatacgattcgtaaaacgtttcatggcccaacgctcatccatcccaacgcggccacatgtcgccacatccgcatacacgaatgctgactcggcggaaatatgcgcggtggtcaggttcatgaatgagctgttcttgaacggaatcactgggaacggcaggaacacggctttggcattgccacgcgccctgagttcgatggtgcgttcggccgagccgtccgcggtgtcgaacaccttctcgtagctttgcgttttgatggtcgaatcggtgcctgggccgaagtcgatatcgatatgggcttcatcgcccctcaggaagccaggggaggcgagcatcacgacgaaatccgaatgacgtccgttggtgaacggggtcatcagtttgaacggcgcctcgaaataaatatcgtcgattttggtacgtccgtggcggaatgcagtggatagacgaaaagtgctactgcccatggacgaatcgctgccttcttatgattggtgcctgacgatgacatgggcaattatgccgcacttggtgcaacggtatgtttcggcccgtccgtttttggatacgggcgggccaaaacatcacatgtcctcgaacagcacgctcttcttgatccatgcgatgacgtcgtccactccggcaccgcccatcaggtcggtgaagatgaacgggcggtcgccgcgcatcttcttggagtcgcgggccatcacgtctagatcggcgtgaaccaacggggccaggtcggccttgttgatcaccagcaggtcggagcgggtgacgccggggccgcccttgcgtgggatcttgtcgccctcatcggtggcgatgacgtagattgtggcgtcggccaggtccgggctgaacgtggcggacagattgtcgccgccggactccacgaacatgatctgcacgtccgggtgggtgcgggccatttcctcacaggcctcgaggttcatcgagcagtcctcgcggatggcggtgtgggggcagccaccggtctccacgccgacgatacggtccggcgcgaggcgtgagtgctcgataaggaactcggcgtcttccttggtgtagatatcgttggtgaccacgcagatgctgtattcgtcagccatcttgcgggtcaggcgttcgataagcgcggttttgccggaaccgaccggtccggcgacgccgatgcgtacgtatgacatggggtttctcctttatgtgggaattagttaggtatgtggtttgcgggtgaggttatcctggctcccctccttgaggggagccaggataattagctcatgtagagcctcgagtacaagatttcatgctgcatggcggcgatgtcgaggtaagctccggagatgccgagatcctcgggcttcaacgtcatcgcgatattcaccgcgcgcacgaggcgcgggaacgaatcatgcagggcgacttggccagcgtactggctgagcggaatcgccttcgcggcgcacatggtaagcgcgctcaacagcgaatatccatacatgatggccgcgtcgcgcacgtcgttcgcatggtcagccgcgtacaggcccatcgcgatcgaatgcaggccacggcagcggcgctcgcgaatcagcccggcatacaggtcgagcgacggcgagccgtacaggccgtcggcggcatcgtgcagctggtggcgttcggtgtgatgctcgtgcacggcgatgatgctgttttcgcgcgaatccgcagcggatgtggtggcattgtcggcaggacttggcttggcgaacccacgatgcccatccgaggtctgcgcctggccggcatccatctgctcggccagcttgaccaggcgggtacacatgcgctcgctgccttcacggatttcacgtgcggattgcagggccgaggccagctcgtcaagttcgatgagtcgctcggccagccctttgcgggagactcgcgaatcggtggcgtacttgccggccagcaccatctgcccgatttccttgtacggtgcgacttcgaggtagttcttcatatactcctcgaaatcggcgccacggcgcaagaagtcgcgctgtacgaaggtctccatgccgttggacagcgcgaacgcgcccacggggaagacgctgtcgcacacctgcagcatggccagacgtcgcgattcggtttcgttgatgttcatggggctatcagtgggtgtgccaggtgcggccgccgtcgtggctgtgggagccgtccgggcggtgcagcacgccgttcatctcatattcggcgggctcaccctcacctgcgtcgtgtgtatgcacatccagatggccggcggcctcctcggccgggaattccttgtcggcctcggcttcctgctcctcctcggccacgtcgcccgtggtcttgttggtgcccggaatcagtgtgccggtgccggcgtgggccttgacgatcaggaagccgtcaaacccaccctcgatgatatgcggttcataaccgatcttcttcgtgtattccatggtcggatggtcgtacggcaccagcacgcggtcgttctcgaccttgagactcaggtggcggttgcccagttcgaagcacaggcgtcccatttccttcatcgagttaaccggaatctcaatcagctgtgcggttttaatgcgtgcgaaatagcgcttgtcttcggtttcggcgagcacatcgccatccttgatggtcttgccaaccatgatgccgaactcggtgccgtcctcggccaccttgcgcatgcgcttcttatcggtttcgaaccagtcgaaggcaatcgacacattaagtttgccgtcgctgtactgctgactgatgatgttgccggtgatttctttggcgatcatccgttctccttggagaaaattgcttgtggcgtgagaatccccacgtccttcatgccacagtgtagagagcctgttgcgtcactttgtaacgaatgatcgaaatatgcaaaaaatatagcggaaaaatatccgaaaacacggaaactggatatatggtacacggtgtgtcgctagtaattgcaagctattttgcatggttgtgcattagacgaatcacagttgtgatattacatatcacgttcctggagcgggaggttgtggtcgagctccgaaatcaacaaaaagagggaagttggatataatcgaagtacctgacaccgtcacattggcgatgcacattccggataatttcatttcgccgtccaccggggcgttgttctacgtcatcatgattccggtgtgggtgctgtgcctacgctacgtgatccgcaacagcacgccggagaagatggcctacctgggcgccggcgcggcgttctcgttcctcatcatgatgttcaacgtgcccacgcccggcggcaccaccgcgcacggtgtcggcggcgcgctgatcgctctgctgctcggtccccagtacgcgacggtcgccgtgtcggtggccctgctgctgcaggcgctgctcttcggcgacggcggcctgatcacgctcggcgccaactgcttcaacatggcgttcgtgctgccgtttgtggcttacggactgtacgtgttgctacgtaaggtgctgcccggcggctggaaggaacgcgtggccgaattcgtgtccggctatatcggcatcacgctcgccgcattctgcgtggcgctggaactcggcgtgcagccgctgctgttcaaagccgctgacggccaggcgctctacttcccgttcacctttaacgtgacgattcccgccatgctgatcccgcacctggccgtagccagcgtggtcgagggtctggtgaccgtggtggttgtcgaattcgtgcgccgtaccgcaccggagattatcgaagacaatgcccgtgtgaacttcgccgagaccgccggtgctgacggcaaacaggtcgcgcacgccggactgcgcaagtctgcgtggattgcgctggccgtggtggcggtgctttccccgatcggcctgctcgccaccggcgacgcctggggcgagtggggcgccgaggacttcatgagtgccacggggctcaactacgtgccgcagtacatcgcccatggcttctcgtgggatgcgctgttgcctgactactcgctgcagggtctgccggacatcgccggctacattctctccgcagtgattggcatcgccgtgctcactatcgtgttccgtctgctggcgctcgcggtgagcggcaacggcaagacatccgcgcgttgacgatacctgcatggatgcgtgagtcggaggattacgatcctccggctgacaagtcatccttcatcgaacacaacctggggcatttcggcagcgtactcgagcaggttggtcatgcgttgccgattgagtcgagcccggtcgacaaggtgctgggctcggtcaatccgggcgtgcggctgctgggcatactggccgcgattgtctgcgtcaacatcacatgcaacatgctgttctcgtacatcatgctggcggtggtgctgctgatgatggcgacccggccgccgcgcctgatgaaggcgttgctcggcccggtgctggccgtatgcatcctgagcctggtcgtggcggtgccgagcctgctgattgggcagtacagtgcgccggtccggctggtggtgcgtgcgttcgtggcggtgtcgctggtgatcgcactggcgcgtacggtgccgtggaatcgcctgattgccggactgcgcgcagttggctaccctgattcggtgatttatatctgcgacgtgacgattcagttcatcgatattctcggtcgttcgatggtggagttgctggatgcgctgcggttgcgcagcgtgggccgcgaccggaccaagctgacgtccgccggccagttgatgggcgcgctgtttctgcgtgcgaatacgcaggcacggcaaatggctgaatcgatggtgtgccgggggtttgacggtacgtatcatatccaccacgagcgtctgctgacgtggcgcaacggggtgtatgccgtgtgcattgctgcaatgattgcgctggcggtgtattcgggatgagggtggttcgaatgaatggagcccaataatgttcggattaaagcgtaatcataaacaaactgcagccatgcagccagataactcatggttccgcggcgacccgctggtcgaactgaatcacatcggcttttcctataaagattacggcgacgccgacgatgaaacctcgtcgcacgccgtgctacgtgatttttcgctgaccgtcgaacgcggtgagcgcgtggcgctgctcgggccgaacggcagcggcaagaccacgctgatgcgcatcatcaatgcgctggaatttccggactcaggcgagtatcggtttggcggtactccggtggttcgcgaggaagtcgaggcgaagaacagcctgttcgccaaagcgctgcatcagcgcatcggattcgtgttccaaagctccgacacccagctgttctgcccgtcggtggaagaggagattgcgttcggtccgttgcggatggggttgccggatgccgaagtacagcgcagagtcgatgacatggtgacgttgttcggcttggatcggatgcgggagcgggcgccataccgtctgtctggcggtgaaaaaaagcgtgtggcgattgcctgctgcatgtcgatgaatccggacctgcttgttctggacgaaccgaccgacggcttggacgagcgcaatactgacgtagtggttgaggtattgcgcgccttcactgatgccggcaagactgtactgttctccacgcatcaccacgacatcgtggagcggctcgacgctcgcatcgtgcgcgtgcatccgtcactatggcaatgacattcacgtggcgtctattggatatcttcatcgaaaaaagcagaaaggcatcggtgaggatcgcgagtccggcgagaactgcgatagtcgctttggtgatggttgccttcatgagagtttccccaaggtgttgacgttgatttcatgagattcgaaaaagagcgtatctaggccgaaccggacagtaagtcaacggtttctggaaaccagctgaaaaagctacggtattgtgaaatatgtctcatcggaatgggtcaagtttggcctagcgctcgcagtcgtgcgcgaagattcgttggattgattctcggtggattaagtcataggaagaaactagacaccttgcggtgtaaaaccgggaatcggaatggtgtaaaaccgggaatggaaatagtgtaaaatcgggaatgagaaaggtgtaaaatctatattgaggcgattgggtagctgagaaaggccggaaaatgaacgatttgaacaatcgtagtgataccttgactcaacctgattatcgtgctcgcgtggtcgatggcaggttaggtaagttacttaaagcattcggtgcggtggaaatcgtcgggccaaaatggtgtggaaagacatggacggcgctttcccgctcacgaagtatggatcgtctggatgatgccgctacctttgcggccgcacagactgatccggcattggtactcatgggtaatgaaccgcatttggtggatgagtggcaagatgtgccgcaaatttgggatgccgctcgtcgtcatgtggatgacaatgcgaatcgcaaggggcagctgattcttacgggctcggccattccgaaggaccgagaaacaattcaccacagtggcacaggtcgaatttctcgcttgcgtatgtggcctatgagtctgtgcgagtcagggcaatctaccggtgtagtgagcttgtctggtttgtttgatggacaattcgagcctgccgaatgtgcaaccagcattgaagatattgccagatggtgctgtcgaggtgggtggcccgcaaatcttgatttggatgacgagtttgctctggaaattccgagtgaatatatcaagagtgtgcttgatatcagcgtgcccaagatgaacaagaaccctgaaaccgcgcgtgcactcatgcgtgcgctcgccgtgaacgtatcgcaggcaccaaaatatgcgacgctggctgcggatatggcctatggcgatgagcgccgtgaaccggatacgcagacagtaaagagctatttgggaatgctcaaggacttgtaccttctgacggatttggagggttgggagccgccactccgcgcaaagagtcgtgtgcgaaccaagcccaagcgatatttcgtggatccttcgttgcctgctgcggttttaggtgccgcgccgaatactctgatgcgcgatacacagacgctcggcgatctgtttgaaacgctgtgcattcgtgatttgaatgtatatctgtcggccatgccgggtgcgaacaatcgcatcgcctactaccgcgatgacaaggggcttgaagttgatgtcattatcgagttgtctgacggcaggtggggtgctatcgaaataaaactcagtgaccttaaggtgaacgatgacaatgcggataagctcaaatccttccgcgacaaaatctgtggcaaccccatggcccaagttcgcgaaccagagttcatgatgttccttaccggccgaggtgggaaggcctatcgccgcaatgacggcatactggtcgtgcccatcgcaacgttcggggcgtgaatcgggtaaaagaaaagaagcgccgaaccgcgaaagcgcctgtcggcgcaagggccgctcgcggcggcaaaaaatggagcccggggcttaagcacggtccgacgcggatacttagtatagcttgcgatggggctcgccgcgccgggggaggtgtggtgttggctggtagctgattgttggggtgcggttggtgggtctctccctcagtcacgggcatcgcccgtgacagctccctcatcagagggagcctggagcagggctactccaaccgtccgcgacgccagaggttggcaccgtgctggaaatccttggcggtggccatgaggctgccggcggtgtgcataaggcgggcggctttggtgcgcacggccttctcatcggcatccgaggagaaggcgccgttggcctcggcccgggtcaccatgcgccgcgcctccacgcgcaagcccaacgccaccacatcggtaaacgccgccgcacgctcaagcgccacggcaaaatcgcccacaaaagcaccggagagaatcgaatcggccaatcgcacgatgtcatcttcactgggagcctgatccacgccggcgatggcggaggcggtagtggccaccggctcacccaagcgccacagatgcgcgatcgagtcgcgattcgatcgcatccacgtacgcaacatatacagtcgccacagcacaccaggcagcgaatccggctcggcatcgctccatagttcggcgatttcatccacgccgaccgtctccaccaacgtgagcacccgctcaacaaccgccgggtcttcgctatggcgcacacgatccagcaatgcggcagcagacagatgactcatctcgctcaacgcctgcgggtccatgccaccggccaatccatcggccacagccgggtcgagctgagccgggcgcgaggggcgtgaagaacccatgcgagcaggtccgaatgccgctccggccgcacgcaacgagccgaagcccgggcccagactgccggcggcaccattgtgcgcggcatgagctgcagcggcagcggccgaggagttggatgaatcaggaaatgcgggtctagtagacaagcggttgaaccttctgaatatcgatgattttgggaccatgaggcgtcggagtgacgaacagcgccaccgccgtgccggtcggcatgaacggtgtcttggcgatcaggcgtttgctcagagacggcgcaacgcacatgctgcgcaggtgtccgaacataccaccaatcaccggccggtgcatgcatatcgctatgggctgacggcgctcaagtgcgaactcgatttcgctgagtagacactcccatgcggtgtccggcgcagcggcgtatgcatcttcggtgagcggatcgagatgaaccatgtctcgtccggtctgccacgcgaacatctccaacgtctcctggcagcgcacccaaggcgacgtggccagtcgggtcggattgaaacacgccagctcgcggttcagcgcgtatgccgcagccgcgccgcgcggcgtgatcggacggttcgcgtccgaccccttccacagcttgcgcgcttccgctttgccgtggcgcacgataatcaccggcaccgcgtccagtgcaccttcttcgacccgatcaacgaatagcgcgaggatgtccttatcggtggaatggctgagcttcttgcgggcctcggccggcgtcagccacaaaacttcgtcgatttcgccgatgtccgcccgatgcaccgggccaaacgcatgggtacgccgcaggttgtcgatggcgctgatcggcgtggccatccagaactggatatgcttggtatccgccgaccgatccttggtatggcgctgtttgctgccttcttcggacagcgggtactcgatgtcgcccagataggggccaagttccacggacaggcccgattcctcgccgatctcgcgtacggcggcatgccggtgcgattcgttcgggtcgaccttgcctttcggccagctccagtcgtcgtatttcgggcgatgcacgacgcacagttcgatgcggttgagtacgttgtccgccgcggccgggctgtcggcctgcgccgggtccggggtgggagccgcgtccgatgtgccgtgtgctgccgcggccttgccgtcagaatccgcggtattcgcgatgatggtgccatcggtggcaatattggatttcgctgatggagacgatgcctgcgtcggctcggcatcatccttccaccggtacagaataccgccggcggcttccacgattcgtctcatactgttcgtacccatctcttgtattgtaggtcacgttggaccgctgctacgtagttttgcgcgctgaacgacgatgcccggcatcctctcgaaagaggagccgggcatcgtaaccaccctcagtcagcttgcgttgacagggagcatcgagtgaaatcagttgtgcgaattggggcggcgctggtgcttgcgaatcagatattcctgactgtcgaccagcgggcggccctcgtcgtccttggtgtgcagcacatacgtgccgtcgggctgcatgtgccagctcatggtggagtcggccatctgcaggtccacgtacttgatgagcccgtcaatctgctccggggcggtgacacgcaccagagcctccacacggcggtcaaggttacggtgcatgaggtcagccgaaccgatgtagacctccgggccggaagccggaccctcgccgatctgcgggccgtccgcattgcagaaggcgtagatgcgggagtgctccaggaagcggccgagaatcgaacgtacgcggatgttctcggacaggccgggaacgccgggcttcagagcgcagatgccgcgttcgacgatgtcgatcttcacgccggcctgagaggcacggtacagggcgtcgatggtcttctcgtccacgatggagttgaccttgatcttgatccaggcctccttgccggcgcgggcggcgtcctcctcgcggcggatgcgctggattagaccggtgcgcacggtgcgcggggccaccagcagacggtggaagctggactttggcgcgtaaccggagagctggttgaacagacgagtcagatcctggccgaccaccgggtcgcaggtcagcagacccagatcggtgtacagtcgcgcggtcttcgggttgtagttaccggtgcctacgtggcagtagcggcgtagaccgtccgcttcctgacgcacgacttcgatgagcttgcagtgggtcttcaagcccacgatgccgtacaccacgtgcacgccggcgcgttcgagcttgcgggcccacgcgatgttggcgtcctcgtcgaaacgagccttgatttccaccaaagccagcacctgcttgccggcatgagcggcgtcgatcagggcgtcgatgatcggcgagttggagctggtgcggtacagggtctgcttgatggccagcaccttcgggtccgcggcggcctgcgcaaggaaggcctgcacggaagtggagaaggagtcataggggtgatgcagcaggatgtcgcgctcgcggatggcggcgaaaatatcctgtgcgcgggaggactcgacctcggcgatctgacggttcgtggtcggcacgaacggacggttcttcaggtccgggcggtccacgctgccgagctcaaagagcacggtcaggtccagtgggctgggcagacggtatacctcgtcctggcttacgccgagctggtcggcgagcagctgggagaggaacgggctcgtggtgtccgtgatctccaggcggatcggcggtccgaagcggcggcgcagcagctccttctccatggcgttgagcaggttctcggcgtcatcctcttccacgtcgatgtcctcgttacgagtcacgcggaaggagcgggcctccttgatgatcatgcccgggaacaaggattccagatgcgcggcgatgagcttttccatggcgatgaagccgtagcgctcgtccttggactcctcatcggtcatgtcgtccaccggcaccaggcgcggcaggttgcccgggatcttgacacgggcgaagtgcgacttgccggaggccgggttctccacaatcacggccaggttgatggaaccgccggaaatgtaggggaacgggtgggccggatccacggcgagcggcgtcaggaccgggaacacctgctggcggtagtagcgcgagagacgctcctgctcggaggaggtgagcttgtcccacgtcagcaggacgatgcgctccttctccaattccggcagaatggtgtcgatcgcgtaatgtgcgtgctcgtcttgcagacggtgtgcggtctcgctgatcgcgcgcagctgctgacgcgggctcaggccggcggcagacggcacggcgatgcccgagtcgatacgacgcttcaggccggcgacgcggaccatgaagaactcgtcaaggttcgaggcgaagatcgcggcgaagttggcgcgctcgagcaggggcatgtcttcgttctccgcgcattcgagcacgcgctggttgaacttgagccagctgagctcgcggtcgaagaaacggtccttgggcagcggtgcctcgccttcctgatcgacgcggcggtcgttgttgtcgttttcggcaatatgctctgcgatttggctgcgcagaattgccttcgagggtgcgtcaaatatctgtgccatagtttatatcgtaagctctggcgtggccggaaaacggctgaacgcgccagaattcaacgggtgttcatgttagttcggtgttggttggttctgagtgtgctagcgtgctcgcgacacgccgtgagcggcggtgaaacgaacgaaaccgaacatcagacgggttcgatgtgaacggttcagctcgttttccgatagccagaaagtgcgattgaacagttgtgataaaaaacgcacaacgactccctgcaggttgcgagaaacgggagtgatgaatagattatgaggtacaagaacaactgaacagagcagagcccacaaatagtgtatggtcacgaggactgttacgttggacgggcattggaaagacttaccgttacgacgatgatgttgtgcagagattctgctccagtagttgaacttgtagaaaaggcccgctccggcgggccttttcgtttgtgtgtacagtggagggcatgacggaaacacagcgtacgccagaggggatgtcgtcgaaaccccgtatcaagccggccgatgccgaagacggccgcccggtctctatctctgcgcgtctcggacgactgcaattccactattccggcaagttccgcgtgctgcagattgccgacattcaggatgggccgaaagtctccaaagacaccatcgccctgattgaggccagccttgatgccacacggcctgatctggtgattttctccggcaaccagatcgccggctacgatccggcctttgccaagagcttccgcaaacgccgttggtgcgaagaggcgattcctgaatctgcgttgaaccatacgcgtgaattggtgcgcaaggccatcggtcaatttacctctcctttggcgtcacggggcataccgtgggcggtgacctacggcaaccacgatttccagtgcggtttgagcaatgccgaactcgacggaatctaccgcgagtttcccggttgcatcaatccgccgagcgatgcgctggccaagcagaccgtatatatgtgtcataaggacggctcgcctgcggcaaccaatggtgaagaaaccgatgcgccgatttccgcgtccaccattcccggcacttttgcattgccggtgatggatgtggattgcacgcgcaacgtactgggactggtactggtgaattccggtgactatgcgcatggaggcggtttcggcacgccttcgcccgagacattggccttcctcaaggctttgcccgaacatatcggagccaaatcaatggtgttccagcacatgccgctgccggagtattaccaggtactcaaaccggtggccgccaatgcggctttcgccatgcagggctaccgcaagcatgcggatacctattatgtgctggacgaggatcgcactcaagccggcgggtatctgggggaaggcatttcctgcccggatgagtcggacgagtttgaggcgctgcgcgaggggtatttcggcgtcgtagctggtcatgatcatcgcaacggtttcgtcggcgaacatgagggtctgttgcttatcgctacgccaacctgcggattcaatacgtacggaccggctccgtccaaacgtgccacgcgattgatcgaatttgatatccgtcacccttacgagccgcgtacgcaattgctggagtttggcgaactggtgggcaagcccagttccaaacgcgcctacacctatgcggtgaaccaaaccgcgcctggcgagggcgagggtgatgatttgctgcgcaagccgtcgctatggagccaactgtccggcctgtttaggtagcgcataacaaaactgcccccgccagcgggggcaatgtatgtgatgactagcgaacggctttgaccagtgcctcggtgaggtacttgccggcggccatcaccagcggcgcatagcggcgtccgggggcggcacccatgcggccggtcgggccggaaatcgagatggcggcgatgacctggccggaggcgttgcggatcggggcggaaatcgagcacacgccctcttcgcgttcgttcacggactcggacca

SEQ ID NO: 1255 - DNA, 13639 bp, Unknown
  R81_24m  MAG No. k141_32557
cgaacagttccacgaactggccgacgccggctaccgtgtgattccgatcgtgcgccgtctgctcgccgactcgctcaccccggtcggcttctacgagcgtctcgccggcggccgatccggcaccttcatcctcgaatcggcggaatacggcggcacgtggagccgttacagcttcatcggcgtcaactcgatggcccagctgcgctccaacaacggtcaggccgactggctgggcaaggtcccggttggtgtgccagtcaccggtgacgtggtcgaagtcgctcacgccacgttgaagactctgaaggccccgcatgtggaaggcctgccgaacctgaccagcggtctggtcggcacggtcggctgggatgccatccgccactgggaaccgaccctgcgcgccgaagctccggacgagaccggccagcctgagaccgtgctcgccctggccaccgatatcgccgtggtcgaccacgtatccggttcggtgtggctcatcgccaacgcggtgaacgtggatgataaatccacccgcgccgacgtcgcctacaacgaggccgtcgctcgactcgaccagatgcagcacgatgccgccaccccggctccgggcgagtcccgcgtcaacatcttggacgaaacggtcgcccagcctgagctgcgcttccgcaccgagaaaagccactacgagcaggccgtcgaacgcgccaagcagcacatcgttgacggcgacgtgttccaggtggtcatctcccagcgtctcgacatcgattcgcctgccgacccgttcgacgtgtaccgtgtgttgcgcacgctgaacccgagcccgtacatgtatttcatggcgttgaccgatgctcggggccgcgacttcaacgtgatcggctccagcccggaaaccctcatcaaggtggacaacggccacgcgatgaccttcccgattgccggatcccgccctcgcggcgccacccctgaggaagacgaaaaattcgccaaggaattgcttgccgatccgaaggaacgcagcgagcacatcatgctcgtcgacctgtcccgcaacgacctgagcaaggtgtgcgtgccgcagtccgtggaagtcgtgcagctcatggacatcaagcgtttcagccacatcatgcacatctgctcgacggtcaccggcaaggtcgacccctcgctgaccgcattcgatgtgttcaagtccgcgttcccggccggcacgctttccggcgcgccaaagccgcgcgcagtcgaaatcatcgacgagttggaaccggccgaccgcggcatctacggcggcaccgtcggctacttcgatctctctggcaacatggacatggccatcgccatccgcaccgcgttcctgcgcgaccatgaggcgagcgtgcaggccggtgccggcattgtgctcgactccgtgcccgctaccgaatggcaggagacgcgcaacaaggccgaggccagcgtcgaatccatccagatcgccgcccagctgcgcgaactgtaacgttcaacgcatagcgatgcccctgctgacaactgctgtcagcaggggcataacaatatgcgtatcagtgggtttcgcccatgatgtcggtggcgtcggttccggtgctcacagcggcctcgatggcggcttcgatgccgcgcgccatggtcgcgatttccatggtcggcgtgccgttcggcttgcccacgccctgcgcggtcgcatacggcacatgaatgaagccgcccttgacgccggggaatttgcggtcaatcagatacaacacgttatacatgatgctgttgcacacatacgtgcctgccgtatacgacatgaatgcgggaatcccgtggtcattgatgttcctgaccatggccttgaccggcaacgtggcgaaatacgcggtgtcgccgtcctcacgcaacggcgtatcgaacggctgctcgccatcattatcgggaatacgcgcctcggccaaattaatggccactttctccacggtcagagccgaacggccaccagcctgaccaatgcacagcacatagtcaggctgctcgcgcaccatggcttcctcaaccacggtcgcactgcgcgtgaacaccgtcggaatctccagtttcaccactgtcgcaccggcgatttcatccggcaacagcttgactgcctcgaatgcggggttaaccggctcgccgccgaacggatcgaatccggtcaccagaatcttgctcatcattagctccttatttcacggattgttgtggtatttggacaacgaggttattgcgcgatcagcatatagacgatctgcaccacaatcatcaccaatgcgggcagcacctgcttcttaatcacgcccatgcggtccttcatatcgagcatcgcgacgggcacgatgttgaagttggcggccatcggcgtgcacagcgtgccgcagtagccacaggtcagcgccagaatgccaatcaccgtcgggtccgcaccgtaggcgagcacgaatggcgcgccaatgcccacggtcattacggtaatcgcggcgaaggcattgcccatgatcatcgtgaacagcatcatgcccacaccgaatacgatgatgcccagcgtgacgttgcccttcggaataatgccgccgaccagcgtggcgatcacgtcgccgacacctgcggctgtgaaaatcgcgccgagactggccagcagcatcggcagcatgcagagcgcacccatggcagacaacaggcgttccgaatcgttgaggaatacgaccggcttgttgtcatgcgagaacgcgaacagaatcacggcggcaatcatcacaccgatgcagcagccggtcagggcgctgacgctgggaatcagggcgccgataatggcgaacacgcccagacacagggcgggaatgaagatgcgcatgccgatgcgctggaagttcgcggccacttcggcggtgctgggagcgctcgaatcggatgccgagcccttacgcacttggcggaagatggcgggaatgaccatgatgataatgagcacgccgtccgcaatggccggaatccaacggccgaacgcgatgacgataccgagcgccgtccagaacacgaaagtgccgtagcgggccttgttggttttatcgagtaggttgcgtacgcccgcatacacggacatgaaacccatgaaaatatagaagaactcgaggattttcgtgccaacggtcacgctggggtccatgaagaacgacatatcaggcctccttgccggtggtggtagcggtagcggcctgagcggcggcttcggcaccgtagtacttcttacgcagtcgtgtgtccttgatgatgtaatagacggcggtgaccgccacggcaatcaccgcgaccgggatctcgataatggccatgcgcaacagttcgacgtcataacccagcggcttcaacgtggactgcacgagcagcgcaccggccgtacctacgaacagcacctggccaaagaaccatgcgacgttctccataccggaagccatgcccttgagctcttccacatactcgtcgttcggctcgtgaccggacgcttcaatcgcacccaccgccatcggcatgatgaccggacgcacgaacccggccacgccaccaaaactcacgttgaacgcggcgaacacgagacgcatcacaccatacagggcgatcaccataccgggcgtcgcattcttcaccttgccgatcagctgcgcggctgcggttttcagaccgttgcgctccaatgtgccggtgaccagcaacacgatgatgaaaaccgccatgctgcggttcgagacgaacgacgtacccaacgtggtcaggaagccgtcgacgccaatgccgccgaccagcgcagtcaccacagccgccacgataatgatcagaatcgcatcaagtttgagggcgaaacccacaatcacgatcacgattcccaataacacgagataatttggttccatgcgggaaatccttcctatactgcacacgcattgcgccgcaagcgtgcccggatatggatagtgtacgacggaaatcacgattcaactgtcttatcgcgcacattgcaggtattacatgagcctacgggcatataagcgtatggacgtatgagcgtcggctgagcccggtcggcatggtgttcgctatgatggacagtcggactttggtaagagacagtattcgtaacaggcaagtaggttattcatggctattgaggtgcagggacttgaaattcagatcggcgcgcgcacgctgcttcaccccaccaacttccatgtggccaagggagacaagatcggtctggtgggccgcaacggtgccggcaagaccacgctgacccgcgtgatcaccggcgacatgctgcccaccgccggcaaggtgcgcgtctccggcaagctcggctacctgccgcaggacacgcacgcctctgatcccacgcagaccgctctcgaccgcatgatgagcgcgcgcgacatcgccaccatcgtcaaccgcatccgcaaggccgaaaaggatatgaccgacccggatccggacgtgatgagcaaggccatgacccggtacgacaaggccatgcaggacttcgacaaggctggcggctacgcggcccagtccgaggcgatttccatggccgcctcgctcggcctgccgcaggaggtcatggagcagcagctcggcacgctctccggtggccagcgccgccgcatcgagctggcgcgcatcctgttctccaacgccgacacccttattctcgacgagccgaccaaccacttggatgccgattccatcgaatggctgcgcggctacttgaagaagtacgagggtggcttcctggtcatctcccactccaccgaactgctggacgaagtggtgaacaaggtctggcatctggatgcgcagctcggccagatcgacatgtattcgctcggctggaaggcctacctgcaccagcgcgtggtggacgaggagcgccgccgccgcgaacgcgaagtggccgagaagaaggccgaccgtctcatgaagcaaggcattcggttgcacgccaaggccaccaaggccgtggcagcgcagaacatgatgcgccgcgccgaaaagctgctggaaaacacctccgaggcgcagaaggccgagaaggtggcggacatccgtttccccgagcccgcgccctgcggccgcacgccgatcatggccaaggacatctccaaggcctacggttccaacatcgtgttcgccggcgtgaacctggccatcgacaagggctcgcgtgtggtgatcctcggctacaacggtgccggcaagaccaccacgctgcgcctgctggcccacatcgaggagccggacaccggttccgtggaatacggtcacggctgcaagatcggctacttcgcgcaggagcacgacaccttggatctgaacgccaccgtgttggagaacctgcagcatgtggcgcccgagctcgataacacgcaggcccgttcgattctcggctcgttcctgttctccggtgacgacgcgatgaaaccggctcacgtgctttccggcggtgagaagacccgtctggctctggccacgctggtcacctcgcgggccaatgtgctgctgctcgacgagcccaccaacaacctcgaccccgcttcccgtgaggagattctgaaggccattgccaagtatgagggcgccatcgtgctcgtcacccacgatgagggcgccgtcgaggcgctcaaccccgagcgcgtgctcctcatgcccgacggcgacgaagacctctggaatgattcgtacctcgaactcgtagccgaagaatagtcctaccgtggcccccctaccgggagctgtcagcaaagaacgggttaaccctaggctcccctcgctgaggggagtctcgcaagcatgcaaaggaatcaaccatgccaaccacaacaggccagaagatcgccatcgtcaccggcagcgcgctgggtttgggctacgagctcgccagccaactcatcgccaagggctggctggtggccggcatcgacttcaacgccgaacgtcaggccgagctgagcgcgcagtggccagccgaatcctaccgcgccttcgtatgcgacatcaccgacgaagcatttgtcaaggaatccgtggcgagcatcgccgcgctcggccacatcgacctgctcatcaacaacgccggccagccttcgttcaaggtgcccaccgcctatgaagccgctgacattgacaaatgcctcaaggggctcaaaggcatgattctgtggacggtggaaaccctcaaggcctgtggcgagcgcgacgtgaaaatcgcccagatcatgagcaccgccgccacgcgcggcaacgcgaacgaaagcgtgtactgcgccaccaagtggggcgagaagggctataccaagagcctgcaggccgcatacaagggcaccagcgtcaaggtggtcgccgtctatccgggcggcatcgacaccgccttctaccgtgatagccacgattacgtgtccgaagccaagcagcacaccttcatgcagcccggtccgctggccgaggtcatcctcttcaacctgatcaacgaggccaacctcaccgtcaccgacatcgagatcaaccgcaacagctgagctggcaggttatacacatatccaccgattcggccgagctggttgcgcgcagaagttggttatgccatcgtgagttgtatccgtgaataacgcggttcacggatacaaccattgggggatggcatggagtcctatgcatacaacacgttcttcacacttgatgaggcgcgagacctcgcccagaaaacactggaacaatgccgtgccagatcgatgcgcacttcacaggagctttgcttcagccatggcaccaggctacagcttgctggcatgacggccacgctgaattacaagcccaactatgaccccaacaaactgcacgttacggtgtccggggctgaaagattgtcgaatctcaccgaaacgcaatgccattattggggtcatggcattgaccagacgatgattgatgatcttatcgccgtggtttcagtggaacaggcgctgtgtcagatcgcacagttcgtcgatgtggaaagtatggtcattgccttggattgggccacctgccgtaatgagcatttgaaacagacaacgaaagacaagatatcgttgttcctcgccgatataggtagattcccaggtatcagattatttcgcaaagcgctctcgttgtgcagagagaacaccgattcgccgcaggaaagcatccttcgccttgaatcggtaaaacgtggattacccgaattggaggtgaatgctccgatatacctcccgttgcagaacaaagaggtggttgtggacatggtgtatccgaatgatcatgtgattctggaatacgacggacggtaccactatgaccgaaaccgatgggaaggagatatcgagaaaaggaacaacctctccttcgcgggctataagacttttcccgccacaagaagaacgttcgctaccacgcagaatctggatgaatacttcagaatcgttggaagtgcaattgcggaataccgcaataccgggtcattttcacaatgagatatgaccggacgcattcattaggtcgattcttcattcattaggtcggtgagctctgacagtcaccactggaatggtgccattccaacaccgacaatcgcagcctcatgacctaatgaatgaagaatcgacctaatgaatgattggaagcgttccgcgcaacgttatggcacccgcaagaagccggaacccggaatatgtctgttatcgtgggggccaagcaacaggtgaaggattgagtatgcacatcggtgacgatgagtttgaacgggccattgaacaggtgttggatgatttgcctgaacggtttgcgcgggtgctggagaatgtcggcatcgtcgttgcggacgagcccaatgagcgcgaactggccacaatgagcaatccgtgcggtgagctgctcggactgtatgagggcatacccatcacgaagcgaaccacgggctacagcggcgtgatgccggacgtcatcaccctgttcaaggggtcgcatgaacgcgtatgctcaacacaggccgagctgcgccaacagattcgcaaaaccgtgttgcacgagatcggccattatttcggcttcgatgacgagtatctgcactcgcacggctactgaagcgctgctgtttcactagcggggagccgtcataccgccgtatgttgccagatctactgcaagtggtgcaacgcacggatgatggcgcaacggtcctcggtggttccctcgttggcgcacatggtgtgcgtaccaacgcggattgcgcaaggtctcggcgccggtggcctcatccgtggcgacgagcgtgtgcagatcgttggcgtactggaaatgcaggtggctgagcagcccgccctcggcgaacgccttgcgcgaaggcagagggttgatggccagcagccagcggaacgggctgtcttcggcggccgggcttgaagccagggccgcaatccggtgccgatacggttccaagtcaaacgcccgcaatcccatggcggtcacgcagccgggggagagggacaggaattcatcggcctcgtaatcctgcacgatatgtccgccgtcgaataccacgtaccggtcggccacgccgttgagccatgcgagtcggtgatgaaacagggcagcatcatcgtgacgcccacggccagcgcggagaccacatgcagccacggcagtcccagggcatcggggtcgagcattcccagcgcggtgagtacggcataggtcacgccgaagttcaacgcggttcgccatcgggcggccgccagcaggggcaacaggaacagcacgaccatgacgatttgcgtggcgagccctacatggaagaacagcatgaggttcgccaccagcagaaggaagagtctcgcgcgcggatcgagcgtccggcgggcaggaagatggagccgaagccgctggtgaacagggtgctcaccagtgtggcgatgcacaccatcacgaagtacagggccgcaaacacgccgatggtgatgaggtcggagacctccagtttgccggatttggcgggcttgttgagctggtcagaggtttcggcgggcgtgttcggtgcggtcacgatgttttccgtttcgtatgcattgacaatattcctctcgccaatctaacgatgatttcccgcaaggcaatagtctgtctgtgatttttgcgtgcgaaacaatagagctcccctctttgaaggggagcctgagtgttccatcaaaaccgaatgctcgcccggaactcgccttcggccggttggccgagttccagcctggctcccatcgcctcgcatgccgcactggcgatggacaggccgagccccacgccgggcacggcgctgatacgcgagttctcgccgcgatggaacggttgggtcagctcgttcagatcgtccggcagcatctcatccgtggtgttcgtgacggtcagacggggtccgcttccatcctcatccgatacgacggtcacgtcgatcgacccatcatccgtgttgtgcacgacggcattgcgcagcaggttgccgaccgccagttccagcaacgccgggtcggcggcgatgagaaacatgtccgcgtcgccgccggccttgttcacggttatggtgatgcgacgcttggtggcggcatcgtcgatatccgcaagggagttgccgacgcatccgtacaaatctgtggatgtgcgtgccgttgatgcgggactcatctgtgtcacatcgcccgcctgcttgccgccgatggtcccgctttgaatacgggacaaggtcagcagcgcctgcaccagttgcgcgccgcgccgattggcatccagtgcgcgctgtaccgacggtcgcacatcctcggggaaccgcccctgggccaacggcgcgtccagattggtctccaccgcggcaatcggcgtgcgtagctcgtgcgaggcattggacacgaaccgccgctccgcttcggatgcggcctgaatccggtcgagcatgccgttgatggcgtcaccgagctgcgtgacttcggaggattggccggcagctcgaccgtccgtgcggctgtccgtgctatgatcccaatcctcggtcccgcgtctgcccgcacgccggaactggggcctacggcgagatggcggcccattcacgtcgatgcgcgtatcaagtttggccgggtccaatgccgccgcctgcgcgctgatggaggtcagttgccgggacatgcgcgaggtgaccagccagatgatcagaatgctggtgatcccgaagaacacgaagatgatggccgcgctgatgcgcaatccggtggcgatgttgtcctggttccacacggagacgccatacggggtgttgatggtatacgacccgtccttgccccattccacctgatagtcaccgtcgcccatatcgccgccgacgctggatgttccagtgatatcgttcagacctgtgccgcttccccgggaaaacattcgcgggtcggaatccgggcgtttgccggtgccggaaccgctgtgctggctttcgacctgcatctcagggtttttggcggtgaccgtcgtggcgtacgtgaacatgctgttgaccacaatggtctgcacgagggtcgccgatcccatggcgatgaggaacacgagactgatggccaacgtcagtttggcgcggaatgatttgggccgcagtttgccggcaagcgcctgtatacgacctgatgctttcgccgtgttcgtcgccttcattgcagccggtatccttccccgcgtgtcgagacgatggcctcgcgatcggcgagtttgcgccgtagccaatagatggtggttttgatcacgtcggtcgggtcggcggcggtcggctcatcccaaaccgcatcgtagagttcgtgcgcggtcacgtatccgccttccgcacgcatgagctccagcaatatgccgtactccttgggtgtgagtttgacgagcgtgcgcccgtggtcgcggaacacgagccggcgtgtggaatcgagggtgatgtcgccgcgcgtgagcacggctgcggtcgcgttgctggtcccgctgcgccgttgcagggcgcggatacgggccagcagttcgggataggcgaacggtttggtcaggtaatcgtcggcccctaggtccagcccgctcacgcggtcgctgacctcggcggcggccgtcagcatgattacggccacgggaatgcggttcgcggcgacggtggccatcaccgcgtcaccggacaataccggcagatcacggtcgagcagcatgatgtccacgttcgtgccggcaaggatcttcaacgcttcgacgccggtggttgccagactggtcgcgtacccctcgtagcgcagcgcgtcgtccaacgcggcggccagttcgcggtcgtcctcgacaatcagaatccgcatcatgtccccttccgagccttcccgaaccaatggcatcacccaacattttcccgattctacggtaaggcgaaagtaatccgtccgcttaccgacgctccacggtgagggcgattggatggaagtcgtcacaatcgactcacggaatggagacggtaatgtccactactcatacgcgcctggtacggcgaatcgcaatgcttacgtccgcactctcgctggcttcgatgctgggcgcctgctcgtcaccgctggcggcagtcggaacaggctcaggtgccgacgatcggtccgatgcgacgaccaccaccgacgccacggcgaagcgattcgccgcctgcctgaccggcaaaggattcgacgcgcgtacggctgctggcgtgtcgtccggctccggctcgggcaaacaagccccgaccaaaaacgcggtcgcactgcgcatgatcggcaccgacggcaagccggtcgcctcccaaggcaacagcctcagcgcatccgacgacggcccgcaactctacccgaacgctgcctacacgtcgatggaagacgacagcacctgggtggtgttcaaggacgccaaggcgctcgccggctcaccctacgaatccaaacagcgggaatacgccgactgcgaggccaagaaccccgacttcacccagcccattccggacatggggccgcaacaccagtattccggggaagacaagcaggcggcgctcgcctacgcccaggccgcgcgtaagaagggcttcgactgggtcaaggacccggacgccgatacgcccacctcaatcacgattcccggcaccgtaagcgaatccgaactgcgccgattcctcaaggaatgcccgaccgatggcgcgaacatctcctatgccttcgctggcaccaccgaggaattcggctatgactacaacaaagtcctctccgaattcacctccggcagcgcgtccaccgaagccgcgccccagcaatgagacggccatccgataacggacaaaggagcaatcatgacacggacggaagcgcgcagattcgggaaacaccgcagaatcgtgacgatgattatcgcggcgatcgccgtgatcggactggccgcggtgtgcgtggcggtgaggccgtggacgttggccgggcacgtcaccgcgaccgggcagactggccgatcgcagcaggtggatgtgtccacgctgcgcacgcaggaggtgaccaagggcgtactcaacgccgagacccggctcggcgcgagtctgcaatacgatggcgcctccgatttcgcggccgcttccggcacaatcacccaactgccggtggccggcaaacagatcaacaccggcgaacaggtgtacgagatggacggcgcgcccgtgccgctgttccatggcgaccgcccgttctggcggacgatcggcgatggcgtctccgacggcccggacgtcacgcaactggagcagaacctgcaggaactcggattctacggcggcgaggtcggaccgcatttcaactggctgacccgcgaggcgatccggcaatggcagcgctcgctcggcctgaccggcgacgcggtcaccggcacattcgacccgaatacggtggccctggccgcggccgcaccaatccgcatcacggcggtgaacgcgaaactcggccaatcacaggtcagcccggcaagctatacgggcgtcaccctgcatgcgcaggccacgttgaccgccacgcaggcggcgatgttcaaagccggagacaaggcgcaggtcgtgctgccggacaacaccaccgtcgaaacgacgctcgcctcggtcgatcagggcgggcagaagaccggcgacaacgggcaagccacacagccatcggcgcgcatcgacttcccggaccagtcgcaggtggcggctttcgggccgacggccgtgcaagtcatcatcccgaacgccgatgcctcgaccggggaggcgctgatcgtgccggtgaccgcactgatcgccagcgccggcagcgcgtatgcggtcgaagcggtacgcggcggcaagttggtgcgtgtgccggtgtcaatcgggctggtgtccgacgcgcaagtgcaaatcaccaagtccgacggcctcaaggcgggagacaaggtggtggtctcatgaacgacatcgagtttgcccccgctggcccagagcatggggcattgctgacgttggagcatgtga

SEQ ID NO: 1256 - DNA, 10738 bp, Unknown
  R81_24m  MAG No. k141_32814
cggcccaggtcagtgaggcgtcgatgattgcgtcatacacgtcggtcatggccttgagactgtcggagtcgctgatcacaccgctcatccaagacaggccgatgcgttcgatttcgtggcggcgcatggcgcgcatggaggcggcgaactcgttgatgttcgagccgaaacgttccagcgccgagccggtctgcacgtccaaggcctcgcgcgtgcgggcctgcagattgtcgtcgtcgccaagccagctgatcgattcgaccgacttgttgagcgcgtcgcccaggaatcgcgagttggacaggatgtggcacagacgctgggcagcggaggtggagtcgcgcaggaagccgaggtagccggattcggtgccgaagttctcctccagcttgcgccagttgagcaggcccatgtccgggttctgaccctcgcccagccactgcaagacggcgggcaggatgatgcggttgattttggccgcgcgccccacgccggcagtgagcgcctgcacgtggcggatggcggcgtccgggtcgccgaagccgatggattcgaatcgctcctgtgctgcctcgacgctcaggacgatctggtcgttctccatctgggcgttgaccggcagcatcgggcgatagtagatgtcgaggtgcaggtggcgtacttcgcgacgggtgtcgtcgtatttgtcgacgagttcttccgggtgcaggccgaatgcgcgggcgaggcgacgcagctcctggttctggttgagctcatccacgtcgatgtcgcgcttcttttcgaggcctccgaccgaggcccggccgaggtccgggaacaggtgcgtgcgcttcagggaccagatctgctggcgatgctccatcacgcgctcgaagcggtagtcctgggacatgcgcacggcctgtttgcgcgagacgtagccgccttcggacaggcgctgcagcgagtcgagcgtgttgctggtgcgcagcgattcatcggtacggccgtgcacaagctgaagcatctgcacggtgaattccacatcgcgcagaccaccgcggccgagcttgatttcgcgatccttcagaggtgcgggaatcagatcttccacgcgcttgcgcattttctggcagtcgtagacgaagttcttacgcttggacgcgctccacacgaacggccgagtcatatccatgtaggcccggccgaggtcggggtcgccagccaccgggcgggccttgagcaacgcctggaactcccagttctcggcccactgctcgtagtagttcttgtgcgaggagagcacgcgcaccagcgcgccgtccttgccttccgggcgcaggccgccgtcgatctgccacagcggctgctcggccacgcccatgatggcggactggcagacacgctgcagcatggtgcccatcttggtgcccacgcggatcagcgtctgatggtccacgtccttgtcggccggttcgaccacgtagatgaggtccacgtcggagacgtagttcagttcctgtgcgccgagtttgcccatgccgatgatggtgaagcgcacgtgctcgctgccctcggtttcgtggcgggcgatggccagcgcgccttcgagcgccgcgtccgcgaggtcggacagttcgcggctgatggtcggttggatggaggccgggtcgtctgccacggcatcctgggcgatgatggcggccagttggttccggtagctggaacgcaaggccgtggccgcttcggctagatccttggaggcgacgggcatggccggttcgtccgggtccgcgccgaccgccttgagcagacgtgcacggcgttgcgcgtgattgaacagatggctgttgcagttgtcgactgctgcggcctccacaagctgcggcttgaagcgcatgaacttgcccatcgcgtcggagacgccgagcaccgtgaccagacgcttcagggcgtcgttgtcggggatgacgtgtttcagatcgcgctggctggattgcatcgcgttgacgatatccacgaaattgctcaatgccatatcggggtcgcaggcgtgggccagcatgctcagcagttcggcgcatcgctcatcgggaatgtcgtccgccttgagctggtcgaacaaggtgcgggccttgtcgaggtcttgcagacctgccctgatgagatccatggagctgggtttgaacatcgacgattccataagattccactatatacgctcatgccctccgaatggggcatgagccgggaaggagtcatcgggcgacgctgatgagctccgaggaatccatatcgtaatcggccatggcgtaggaacggatggcggggtcatcataggtgttcatgtaataggtgttggtcttggacgaatatccgctggtgaacagcgtgcgttcgaactggccgtcgcccatcttcgccatgccgtccaccatctgcacggagccgagggtgtggaacaggcgagacacattggcggcttcatcgttctgctgcgggtaatgcgcgttggtgtaggccacacgaacgaagcgcgacggggaactcacgtcgcccgggatgccatgcatgcccacacccgcaccccaggcggtcaaggaggccttgccccatgaagtcggttcggccatctcgttgctgacgcacatgtagttgcgcagattttccatatggaagtcgaacgtcggctgattggtcagcacatcgacgtcatcatgatgcacgtgcatgccatcggccatctgctcgacgacgatgctgcgcttgccgtcgccgatgaaccagtgcagcagagactcctgctgtcccggcacgatctgggagacgagcgtcacgttcctgagcgccttctcgacctcgtcgacggagtcgaaattacgcgccacccacagcggaaattcgaacgtggcgacgttttccgtgccttcgaccggttcgtggacgaacgaggcgtagccggggaaattcaagccggcgatggccagaccatgttcattggcgcagtcgaaatacatcggcctatcggccatgaccacgcccacgccgatcaccgcgttcggcttcgccttgccgcccgcaccgaacaccgtgtcatagtggtagccgcgcggagtgaccaggatggtctccccatatgagaaactccagtcgagattacggccgaaataggtgttgccctcatcatcggagaaacggacaccagtgcacataacggacttccttccatcgctttggttggcttgtacgttcatgatatccatcggccgctgggggaactctgggtttcgccagcagattaacgtgcggcgcgacgcattgagatgcgccgcgctgcgatatgcgtcaaccttgcgtaccgaggaacaacggttccgcattgcgccagatacggcgcgtggtggcggggtggttcatcgaatacaggtggatgccgtccacgccgtgggccacgaggtcggcgatctgctcggaagcgtagaggatgccggcggcacgcagggactggatgtcgtcctcccacttgttcagcagggtgttgagcttgtccgggatacgcgaggcgttgcgttcggccatgcgacgcacggacttggcaccacgcaccggcatgatgcccgcctcgatcggcacggtgatgccggcggcgcgcgccttgtcgaggaagcgatagaagtcctcgttgtcgtagaacagttgggagatcaggtgagtgacgccggcatcgaccttgatcttaaggttttcgatgtcctggtccagcgagtcagcctggtagtggccttccgggtagcaggcgccgaacactttgaggcccggcttcacggagcggatgtatgacacgaggtcgctggcgtggttgaactcgcctaccagctgctcgccgtcgatgtagtcgccgcgcaatgcgagtacggcgctcacgccggcctgctcgaacatgtcgagggcctcgtcgattttcgccttgtcggaatacaacgcggtcagatgcgcgactgcgggaatgccgtactccttgctgatcgtatgagcaatgcgcgcggtggcggtgcgatccgaatgggtgccgtggccgtaggtcacggaaatgaagtcggggttcagcccctccaggccgtcgagggtgtcatagatggtgtccacgggagcgttgcgcttcgggggaaagacctcaagggtgaacatcggggaatgcatgctgatttccttacataaacccgagctccctcatacagagggagctcggtgatttccgctacttgtcgagcttggcacgcacggccttggcggcggcgaccaggttctccaggctcggccaggtctcggcgttaccacgggtcttcagaccgcagtcggggttgatccacaccttcttgacgtccatcttgtcaaggatctcgtagatacgatcctcgatttccttctcggaaggaatacgcggggagtggatgtcgtagacgcccgggccggcctcggtctcgaagtgcgcgtcatgaatggcgtcgagcaccaccagatcgccacgggaggcttcgaaggagatcacgtcagcatccatcgcgtcgatgtcgcggatgatgtcgttgaactcggagtagcacatgtgggtgtggatctgggtggtcggcttgacggcggagtgcaccagacggaaggccggaacggcccagtcgaggtacttgacgtgccagtcggacttgcgcagcggcagcttctcacgcagggcggcctcatcgatctggatgaccttgatgccgacggcctcgagatcgagcacttcgtcgcggatggcgagggcgagctgcttggtctgctcctcgtgggtgatgtcctcgcgcggccaggaccagttgaggatggtcaccgggccggtgagcatgcccttcatcacgtggtcggtcttggactgggcgtacgcagaccattccacggtgatcgggttggcgcgggacacgtcaccccagacgatcggaggcttgacgcaacgggtgccgtaggactgaacccaagcgttcttggtgaacaggaagccgttgaggttctggccgaaatattcgaccatgtcgttacgctcgaactcgccgtggaccagcacgtcgaggccgatctcctcctgcttcttgatgacggcgtcgatctgggccttgatgaactcgtcgtaggcttccttggtgacctcgcccttgcgcagcttggcgcgctcggcgcgaatctccttggtctgggggaaggagccgatggtggtggtcggcagcagcggcagcccgagggcctcgcgctgcagggactggcgctcttcgcgggccggctgacgcacgtagtcggcatcggacagcttgccgatgcgctcggcgacggccgggtcggcggccacgcgggtgccgtcgaacagagcctggttggcggcgagggcggcggatgccttcttctcgtcctcggtggcgtcggccagagcggcgacttccttgagctcggtcagcttttccacggcgaacgcgaagtgcttgaggtcttcggacgagatgccggtctcgccttcagtgctgaacggcacgtgcagcagggaggatgcggtggagacggccacgttggcggtgacctgcttcagggcgtcgaccaggccgagggaggtggcgtagttgttgcgccagatgttgcggccgttgatcacgccggcgaagatggcggtgttggaggccacgccatacttggcgacggcttcgaggttctcttcacggccttcgttgaggtccagtccgatgccgtcgaagccgagcaggttgacggtctcgtacacgtcggcgatgtggccgaagtaggtgttgagcagcaccttgacgttgcccttggcggacaggatcttggtgtacagggtcttgaagagttcaacatcgcccggctccttgtcgagcacgaggtacggctcatcaagctggacccatgcggcaccgagttcgttgaatttggcgagcacttcgacgtagacggcggccacggcgttgaccaggcccttgtcgagctcgagttcggtggcttccggggtgcgggcgagcttcaggaacgtgtacgggccgatgaacacgggcttggtgtcgatgcccagcgccttggcctcgttgaattcgtcgaacggcttggtggagttgagcttgatctccgcggccgactcgacttcgggcaccagatagtggtagttggtggtgaaccacttcttcatcggcagggcggtcacgtcgcccttgtcgccctggtagccgcgggccatggcgaagagcgtgtcctcctggttatcgaaggcgagacgctcgtaacgcttcggaatcacgttgaggaggatggcggtgtccagcatctgatcgtagtagctgaagtcgttgctggggatgaggccgatgccggcggcctgctgcagcttccagtgcttggcgcgcagttcggcggcggtggccttaacggcggcgaggtcgttggcacccttccagtagccttcgatgatcttcttcagttcgcggttctgcccgatgcgggggaagccggagacggaagtcagagtggacatgaatcctccaatgtatgcgttcgtaacccgacttagggtagcaaaacatccggattccaccccttataaatggccgcagagtgtcgttatagatggaatttatatccgctttagtcgaagtctttcacattgatgaccgcgagcagttcgccgctgtgcacctgccattcgtcgaacggtttgttcgatcccatgatcacgatggatgcgggcgaaagtcccaagttgagcaggtcgagtcgttcgccgtcggagtcggcggaggcgagccattgggcgctgatcgacacagtcggctcgtggcccactatcatgaacacgcggttcttggccttgacgtgggcgagctcgtcgaacaccgcctgcactcccccgtcatacaggctgatgcggtagtcgacgatcggcttgtcgccaaaggtcttgagcatgcggtccagtgtctggcgcgtgcgggtggcggacgagcaggagatctggtcgggcaccagtcccagcgactcgatacccttgcccacggccttcgcctgtttcagacctttgtcggtgagctcgcgctccgagtcacccttgtcgccgaacggctcggccttggcatgcctcatgatgatgaggatatggtcgtattttttcgctgctttggcgactttgctcagcttgatgcccatccgtggctcccttcacgaaccgtctgcccggtgtggcggtgtggtgttgcttccagtatagaggtgtgtgagcgttcacaaactcatcgtcgggcggttattcatgcgtgttgccgagttctcccacctgacggtcgaggtcgcgcaacaccttacgtagtttgtggtcggagatgtcgcgcagttccagttcctcgatctgcgcctcacgctgttcgtcggtgagcgagtcgatgtcggtctgcgtgtccttggtcacgcgatcgcgctttctgagcgcctcgaatccggaggccatggcgcgcgagataacaaggaaaccggtatggccgatcatctggtggtcggggcgtacggcgaggccttgggccttccatgtgcgttcgaacgattcctggatctgcggctcggtccagcaaccggccgcgcgcagggcttcggccagtcgactcatctgcgtggtggtagttacgtaactgaccaacacgccgccgggggcaatcacgcggtatgcctgctcgagtctgttccacgggtcgagcatgtcgagcatgatacggtcgaaccagtgttcgggcagttcggcggccacggagtcgaagtcgccggttttgagatcccaccagctgggggcttcaccgtaatacagcgtggcgttggcctgagccactttggcgaattcggggcgcagctcgatcgtggtcagatggccgcgctcgcccacggcgtccagcagattcacgctcatcgcgcccgagccggcaccggactcaagcacgcgcatgccggagcggatgtcgccgagctgaatgacctgggcgatgtccttcggatacatgatctgcgcgccgcgcggcatcgaaagcacataatcggccagtcgcgggcgcatcaccgcatactcccagccgccgatggcgcgcgacgatttccacggcttgttcttgtctttctcggggtagacctgattgacctgtgcctcgcgcttggcatgcacggtgaggatcacggtgccttcggtcttgccgatcacatcgtcatgcagaatcaggccatgctcggtctgcgtggagccgccggccacaagctgatcggtgatcttcttgcccttgcggtcggtgaactgcaccttctcgcctgcggtgagaggcccgcgcctcggctccataacttgctccttgtgtgctcggtgggtcaatcgctacaagtctaatgcatgtaagctcgttggtgaggtgatgacgatgcgaatgcagatgacaagccagatcgatgccggcggcaatgaccccattttcctgatgttccacggttacggcaacgacgaaagcgagatggtgcggattctcgacgccgtatatgcgccgacgcgagccgatgcggccccggccgcaattgccgccgtacccagctatatctcgttccgtgccacctacgcgaggccctatatgggcggcaattactggtatcccgacggctgcggcgtggacgagcgccaacgcgaatgcgcggcggtcggggatgcggtggcttcactgctggatgcctcggcattcgcccatcgcaggaagatattgatcggtttctcccaaggcggttatctgtcgtatcgtctggtcaaggcgcatccgacgttgttcgatgccgcgatcctgctcagtccttcgttcatgggcgaggaacaggcggcgcttgactcccctacccgattcttcctggcgtatggcgcgcaggaccgcacgattccgatgcccgaccagcaaacggcccatcaggtccttgaacgggccgggcatctgacctatcgcgagtattccggcatggcccatgccatctgtgatgaggaaatcgccgatatccgggatttcctacgtgccatatgatgccggaatagcttcaatatggaatatctccgttcaaagaggtaccggtccaagtagaagcggctcaacaatggcggaatggcgtggcgcgtgccgtatggacatacacatcagctttcgccagatggtgcacgcccggaggcactgaatgttggcttggatgcttgggatttgatgccggtgagtgaaacacaggttgtcgagtggttccgcaatcacgaagttagctcgattgcggatggggctactaagaccgacgcttccgttcccttgctcgatatgccgtcgttctgatgtgattcccagagtattcatgttttcatgccattgctctcgcctcgggcatattgacacagcattaactgccgttgagatgtatgcacgctgaacacgcgcctcaacggcagtggtctcgtcatctctcgctcacaccaacggattgccggctgcctgatacagcgaccaccagtcacggcgttcgagttcgatatcggcaccggccgccatctggcggatgcgctccggtgtcattgagccgagcaacggctggataccggcgggatgacgcagaatccaagcgacggcaatgccgttgggcgtggaaccgtatttgccggcaagacgggtcaattcggcgttcagctcggggaaatgctcgttgccgacgaacggaccgtattccgtgccggattggaatgggcaccatgcctgaatggtcatatgcttcagtcgtgaataaggcaggatgccaccggtgcgatcggctgcgggatcgctcgccatattgaattggatttcagcgtcgagcatctgtgtatgcattccgccgtgtcgaaatagtcgatgccggaatcatgggccacggccacggtacgtgccgcatcggcggcatccaacgcgtccatgcgcatcacgcccagcgccactcgtgacgcaatcatgccggattgtccgatttcctgagtcttcatagtgtctcatttctgttatcgtgaatcggcgaacgggcactgtccgcttcgttgccgggcagcaatctccattgccgctgcttatgtcaccttatcgcttgaagtgcacttgaaggcaactcgcaggcaggcagcgcgcgctgccgggcgcgtcttcgcgccttcatgtcttcgctgtgaccgagacatcgttgtgccgtaatcatgcccatttcttgtatgatgacctctatagcaacagagctagggggattccatgaatactaccgattcagccaaagtcagtgatgccaacgccggcgcaaacaatgtcatccatatcccgcacaatcccacgcttgccggattggccacgctgacccgcaacgtggcgtacaagaccggggccgatgatctggtaatggatatcatcgccccgcaatccaccggcgatgacgataaccgccgctaccccaccgtggtattcgtgcaaggcagtgcctggaccacaccgcatcgcgactacgagatcccgcagctctcggctttggcccgcgaaggctttgtggtggccacggtgaatcatcgcgatgcctcgagcgatccccacgacgtgttccccgcatatctcgaggacgtaaaagcagccatccgctatctcagggcaaacgcacgtcaatggcacgtggaccc

SEQ ID NO: 1257 - DNA, 8625 bp, Unknown
  R81_24m  MAG No. k141_34237
cccatgtgtcccgtcagtgggccgattcgaatcccttcatgttctccgcgcagtttttttcgttttggttcgcaacaatcccagcctccgtatcgcaagcgcatcgcagcgaataccggtcggcccagcgcgaaggttccccctgaccccctccgatgaacgccacacgaacgcatacgggtgccatgaaagtccattcgaaccgtcaatcaactccttgatacatagacaggaagtcaaggaacgttcgtcggtcggatgggttcgaggagaaaccggcaaaccctaccgccggcaccctcctccgggtattcgccagcgaacggcaccggctccaccatgaccggccaaggagaagacatgcgcccagaacccatccgccgcaaaggcaggaaaacactcgccaaggtatacgattccctatccggcccggaagaggccgcggacaggtcgcgcatcatcgggctgcccaccaagaaggaggcgcacgacagccggaacgaattaacggcggcggcgtgggctggcggcaaatcggtgtcgcgtatacagacggccaaggagtacataagcatcgccgaatcattcttccgcaagctgcgggccatcaaaaacgcggagcagcgaaccccgcagacgggtattccgtccccgcgggagctgctgagggatacccgcgtaaccaaccttgacgagtatgaaagaatggttgagatcttaagcgcggatacggcaatcctgcttgtcggcaggaaagacctccgaggcgagggagcccggatactgctggccttgaacaagatgcgactcaaaatgggaaaggcgacgatcctcctggcccacggagcggaaaaagactacaaagccgtcctgcccgcgtacaagcccaggttctaccggcgataggcaaaggcgtgaagcggcgttccagcggctccccttcgccccggtcacgcacacgcccggctggccgccgttccctttttcgccctgcccttgaatcgtttttgtctccatcgcgcacccacgggccgggttcggctcgattcagcccgtaccgcgctcccattccggtcacccacgggtattcgccgccggccgacctgatctggttgagataattattgatgccggcgtcggtcggatcgcccgtatagggcaggttcctgaggatcgcgtccttcgagccggtgaagtaataccccttcgccgtcacgctcgtgccgtcgatccaatggtcacccgacttcacgccgaccgtcaccctgtcggtgatgggctggccctcctgaatgatgtgaggggcctcggtggagatggtgggggtgaaggccatcgggggctgggactcgttcaccgcgacgcagatggccaggttattcaccgtgccggctgcggccatctcagccatgcccttgtcgaactcaccacgggcgaacttggttacgtcgccatcagtccaaccattcaaaaagaaccttacaccaccgttcggctgtgcctgagcctgagaccatctctgctcgaacagggacttccagtgcgcggcgttgtcgccccacatgaatccaccgcgcagcgaggtggcgaagccaatcacgcgcgccctttgatgggtggcgtcgagggcgcggttcaccgcctggttacaggccttctgaatcagaggcttgttgacaccagaatcactgacatccacgcctgctttggccagatcgctgagcagatcgctggtgttagcgttgtcccttgtgccccagccggtgggcggtttgcccgcagcagtttgagccagattatctttgagccacaggacgaagtcattcgggccgatgccggtgctgccgccaccgccgataatgacgccgttgccggagttgtcgatggcgttggcagaggaaacggccaccaaaccacccgtggcgagggtcgcgaacgccgcaagcgacgcaatacccctcctcagccaacccggcttttccttgggcggagtgggcttgctatgctctttgtatttcagcatatctctcctaaatcgaactatattgaccaagcaacgccgcgcacccaccgaacccaaccggcggcgcacgacctgcttgccccgaagcgggcaatcacaccacgagcatcacccgcgccagcaagagcatgcgtgaagacatggaaaagccccacctcaatgagatggggcttccaaggagaaaaatgactaaggtcagttgccaaggatggagcaagcaaccttggagcaatcaaccagcgggccggtgccgccgccgaggactccattgttgggaagttggctggagccactggaggagctgccgccgttgttggacggggtgtaggactgctgcggggcggaatacccgcggttggaggaatacccgctgccggagccgccgtaacggttgtaggactgggagtaggagcgttgcgactgcgcggcggcttgcgcggcctgcgcttgggcggcggctgcctgcgcttgggcttgggctgcggcctcggcgtcggcctgctccttcgcggccttcgaatcggtcacctgcctgacggctgcgtcgagcttcgccttggcgtcggtgtacgtcttcgggtcggtgacgcccttcttggaaagggcgtcgttcgcctcgtctatggccttcgcgaggttgtcgcgggtggcattgtccgccaccttcccgtccgtgtccttgagggtctggctcgcgccgtcaataccctgcttgagctggctcttcgcgccatccagctccttcgccagcctgctgtccctgacggccttgagcgcggcgttgagcgccttcgcttgggcgttggcctcgtccgcgtccgtggcattggccttcctcgcggaagcgagccgccacgccagccactcgcccggccggtcctcggggacgcccttgagcgccttcgccttactgatggcggcgtcgagcctgtccagcagcttcggctccttgagctgatccgccttgtatgtggtggcggtggcctcgtccacggccttcatgagcgccttgtcggcgttctcggcttgggctaccgcctcatggtaggcgttggtctcgtggtgcgtccagtaggcgtagccgccgccaatacccgccagcgccacgatgatgacagcgatgatgatgatggtgagtttggcgggcttaatacccttgggcttgctctcctctggggtggcgtcatccatggtttccacttcctctgatggcttcgtcattgctcttccctatgtccttatgcgctgacacatcgattcgcccatcgacatggatataacggcgcggaggccgtcaggccgaagctccttgtcctgcgggggcatgggagacggtcgcgcttccatatcatgcgaattcaatactacattgtagcgaaagccacaactttgtggcctagtgagatgcgaacgccacatatttttggcgcgtggccgttaaagacgattcgaaggaatgggcgaggtacgccaaggagctgggcgtcaacctccaacgcctccgcgtcgagcgcggcctcacccaagagcgcgtggcctatgacgcaggcctgtcgagataccaataccaacgaatggaatggggcaagataggcaaggacacccccgccaaccccacgttgaagaccatcatggccgtggcccaagtgctcggcgtcaccctcgacgaactcctgccgcagccatggcccgacctgcacgccaagtaggctctccgccgtcgtggcccttggccccgttgggtaggcggtggcaagaatcttgggtagtccgcctgccccgtttttccgccctacgcccttttgaagcccgatatgcgttctgccgcctaggtcttactccgccttgaagaccggtctcccttattttgtggggtagtctagccgaaatattttccgtccctgccgccgcctcgaccactttcgcgaatctgccatccccttgttcaatataaagagaatttcaatcggcttcttcactacactcactttcatttcaactagccttcctatatttataagaacctataattccagtgattcaggaaaacgaagttttctttaactgccctcttgaccacaagaagaagaggcacagtgcggattgttcaattcccgcactgtgccacacacttattcgcagcggatttcgacaccgctagcgtcgacctttatccgcagagtgatctcgacagggccgttatcggcatttaaatcgagccgaatgcaccggcctccttcctcggcgctaatatcatcagattcgtttcccgccgtcgatcgagggacggtctcggcctcaggggtcaattcgttatcctgcgctcccctgtctggagtcgcatcattgctcacttcggcgaaatggtcttgacgttctttcttgagcccagtcatggttagcccgcaccaattacgtgaattgccccacaatcgtgcgccaagaccgtaatttcgtttgtgctttctggtgactttcggccggattcgctcgcatacgcaacgctcgctccacaccaccgcgccacgctcccatgctcgctcttgatgggcaacagtttgcggctccgacttggcggattcatcgacattcctgccatatgaggagttggccagcatcagtctcagacgagccagttgcctcagccgttctcccttacgctgccgctctttttcggaaggccggaacaccttgaagggttcaacaaaccgcacattggcgattgcgccatgaaccgggcagcattccgagggattgacctcgtcgaagagtggaagcccgtcaaccgtgcgctgcacccacatccggtacagtccgaccgtctttcgttcgctttcggtcaggccgtcgatgtccgcgacatcctgcaccaagccatcgcggatgcttttggtcatgtagcgcagcagccgttcgccatcacaaagcggagcgaccttgttggccggcaggtcaacgatctgcctgttcatatcgtcgccgacctgttggatgtcgatgactgggccccattgcacaagcgagcccttcagacgagtgccgccgatgagcttggcaagattgtcggtgttgatgtagatcttttcgtcggggaatcgcagcagcaaatgcacgtgcgcagccatccgagattgcaattcgatcgtataaaagtacgccgagcgcgggtacttcttcctcagcttggtcatggtcgcgttcagcaaactccccaattgcacgttgaatgtcgccatcgcggcgaagttcacatcacggtcgaagttctggggtacaccgctcaggggatacccttccccatgttccctgccgcataacggacaactcttccccactccatgcacgggtacaccgggtcgactgaatgaaggtgccgtcagggttacgaacacaaacgtgccggagttttccagacccgccttgcctatgctcagaacgtcaagctgtctgcgcaatcggcagccactgcaatgaccgcagcgcaccttcatgccattggaacgtcggtggggatgcaggcactgggtcgggtattccgcatccgcggatgccgtcactttcgtcgtatccggctcaggattgccgaatagcggcacatcgacgtacgcgcccttcttcggctcggcggcctcggtttgatgtttcgggaaaactgccaccatcaccgatcaccgccctcgttcacgacggaggcaacgccagcgtcagccccagcaggaagtcctcttgcagaatttcgtgcgaaatcagcagtacggcttcggttgagctgatttgccgcccgcaccgccccagacctgcgaagattgcctagagctccatatgtcatcgtcattcccgaagttgtggcgttcgccgccgcatacgcgcccattcgcggcccatcgaaatccggattctcgattttccgcgagattccacgtcccgtccgcatcgactggtcgcgcctcggccagcggctttcgatttcctcgcgccgaacaagcaaggtgcgcctgatacgtatggagctcaagccacccagctcgaaaccgccgagggcggttttctgagagagcgttcttgcgctgactcggtattcgcgcccggcatcggcggccttcatccacgtaggttgtccggacacggcccgccgcatctccacgtcatcgtccaggagattgggggcaaaggccttgaagaacatccgcacgtccacgcaaccgcgtccggccggatgtcggagccgcgcccggtattcggagcattcccggtgccagtccgcaccggtttcctgcgcgttgcagcgcacaagatgaaggagaagctcttcgttcttcatgatgcggcggattccgtcggcggtcagccctagataagcggcaagggccgcgtaggttgtcagccatttccccatggcaagtctctcaatccgagccactgcgcgttccacggtggaacgtcgtgcgctcggtgtcctaccgatcagttcacgcaaaactggtaatcgaaagcccccgcttcggactggttttcaatcaatttcgacgtttctcggcactttcagcgacgactattgaagggaagcaaatgtgcaaattttgtgaagagcagggtttgggaactgacccactatctgagaaccgggaatgctcgtttaaacatgaaaaagccccgtacggcatcacgccatacggggccgattgtctttttccgtctgctattttttggttccgtacctttccgtaacgagctgcatcagctcgttgtttttcttattggcttcctcaagttggctgcgcagtgattcaagctcgcttgcggctccggcgctgttgtcgcttccggtctcatggacagtattcgcagcgctcatttccttggtcagctgcctcaaccggtcttgggagctgtgcatgtagtgggcggccatcgaggaggtggaccagccgccgcgtgcttgcaggtcggcgatggtggcattggtgttctgtgcgaagtaggtgttgccgctgtgtctcaggccatgcagcaccacgtcttcgcagccggctttcctgcgcgccttgatgaacgccttctcgatctccgaatgatggacgtagttgccggtggcggtgtggaacagcttgccgtcatcgccggggtcggcgtattcgtcgatgtgttttctgatttcggccacgaggtcgtccggaatgggtattgagcgtatgccggcctcggttttgggatcgccatcgacgaaaccgtagtccttggagtaggtcacggcgtgcgtgacgcggaccaccttgccgtcaaggtctatgtccttgcgccgcagggcgagaatctcgcctatacgcagcgacagccagaatcccagaagcaccaccagccgatatttgcccggcatgttgtcggcgatctcccgcaccttctccggccctatgaccgcgcgttccctgcccttgtgggcggagccgcccttgatctggcagggattgaagtccagtatcgcgttgggcgcggtgcaggcggactgcatgatctgcctgagcagcccgtaggcgttgccgcgggtgctcaaacgcggcctctccttggtcgacggcctgccgtccaccttgcgcggcctgcccatctcctcgtaccagcgctcgacgtcctccacggtgatgtcacgcatggccttgtccccgaacgcgggatacagcacgctgtccaaccgctgccggtacgtgcgcacggtggagggacggatctcaccacgggcgatcttgccgccgaaccagcgttcggcatagtcgcggaaggactccgaacgccgctcctcggcctttcttgcggaagccgaatcctcatactcatcgcgggggtcgacccagatgccgccgtcgatgcggttcctctgctgggcgagccacccctcggcggcctgcctgctgctgaacacgaaaggcgaacggatgcgctcacgccttccgtcatcgcccttcctgtcgggtctgggatcggggtattccgcgtaataggaggtgccgccacgcaccttcttcaccctgatcttgccccagctcctgcgtgatccactcgttccactcatcgcctgcgacctttcatgaaattccggacggccgtccgttctccggctcctgccgttgtcgacgacagcatatcgtggttccctcctagtaccctccgttgggtacgttccggcaggaaaactacgcagcatccgcttttgcacaatgcccggaatcgttgtaatcacactgtttttcccggcgtgtcgccgtttctctcgatttatcgaaaatccggtactatgtaattcgaatctcgtatcctccgcccggatttgaaccccggaaaccgttgaaatcattcggtttccggggttttgctttggttccttccgattgtcggttccctccaggtaccctccgtttcgacacctttggccccgacctgccgcgcgtgtcacatatcggaaccgacgattccgaaaacgccttcgggcccccgcccgccgtatgttcgtcatcgaagtccgaccgcgccccatgtgtcccgtcagtgggccgattcgaatcccttcatgttctccgcgcagtttttttcgttttggttcgcaacaa

SEQ ID NO: 1258 - DNA, 7047 bp, Unknown
  R81_24m  MAG No. k141_34320
agccgcggacaaccgcctgttccacctctcccagcacatccagcagatacgtgcgggccggtgcgtccagttcctctcgcaccatgttcgcattccatgcgccgaggccgaacagttcgccttccaactgtgcgatggagcgaaccgcaagatcacgacttacggcagtgatgtcaacaatcatcgaatcaacccgtctcacgccttatcggcaccggcatggccgagcacgtgcttcagcgggttcggcacttcggcgtccggccggcgcaggtacaacggttcgaccggcgtatcgggattacggttggcaaccagttccgcatcagtggcaaagatagcgagaccttgctccccttggtccaatacggattcatcggtgatgtcgccaagctgctcgattgtacccagcgcatccgcatatttgcgggccccatgacccacaacatccacgaccacatccacattgctgtcttctggcctaagtccgtcgcggtacgtatgaacggcatcattcacgcgctgcgcgatggatgcagggtaatcgatatccatgtcaatcagagccgtcgccacggtttcgccatcgggatcgccaacgagcgggtccgagtacaacgcaaaatagagttgtttgcggcgtgcgtcgtttacggcaagagtgagcacatggcatttatgagtatcgccgagagtgccggctttgccacggcgaatgagattccattgcacctgagactcaagaacattatggccgataagcgtcgctcccgttgcgaaagccagtgccttggccgtaacgataccggcacgcagaccagtaaagggggctggaccggtacccacaatgactgttgcaatgtcagatgctgggaacccggcctcctcgaccgcgcgcgcgatattgacctgcagtttctccacatgggtgcgcgaatcggtctctacaatgggatcgcgccccacaatgccgaccgtcgagccgaatgaggtgtcaatcaccaacgtgcaacccatgaatcctcctagtcgtaaagcctctagagagtgtacatcgaggagtctataggcgcatggcttactgcagatcgaacgcggcccatcgcttgccgactgggacgaatgcgacggtacgagtgccgttgctggtgagttcgccgtctgatccagcggatgcggcatcggaggaatcgagaggtcgatcgatatggatttcaagtcgttctggtgccaaggcggtggccatttgttcgccccactccataagcaccaccgtgttctcgccggggtcttcaagttcttcgtccaatcccagcgattccagctcgtccaacaaacgcccgatggcgtcctgccccggcgcataggctgagccgcccagacggtaggcatccacatgcaccagatgagacggagtgccgtcggcgaaatgcccgtcgagttcgcgggcaatggtgaatgtaggagacacgatgggttcggtaatgcccagccccgccccgaagccctgggcgaatgtggttttgccggcaccaagagggcctgagagcagcaatacatcgccgccgtgtaccattccggccacacgacggccgagctgctgcatggcctcgctggtgggagccgcaatagtgtgttcgctcataaatacccctttatcgacttttaccgacctttatgactgatgtcttcaatgcagcgttccagcgcatataccgggtcgccaccgtttgttttgctttgctcatccgcccaggcgagcatacggatgcaatgcgcgagtcctgccgaagtccagccgccaagttggcgcatcgcattcttcagcacccacggattggttttcgcttcggcctgggaaatcgtgccggcccgtaccgccgaggctttggcaatggtacggagcttcatggccaacgcgccgatcagcgcgatgggatcggtcccttgttccacagctgcacgcatcatgacgatggcttctgcggttttgccttccacggccttgtctgccacggcaaaaccggtgacctgcggattggcggtcaaatactggttgacacggtcgaggcccatcggattatcgtcaaagtcgaaacacagttgctcgcacatggcggcgagttcgccggttttgccgccgagtacggataccagctgctgtgcggccatcggttcgactctacgaccacgtttctcgaattctccgagcacgaaattgagctgtgcatccggtttcttcaaatccggcacgtcctctttgcgagcgccggctttcaccagttggtcgatgattttgcgccctttgacgccgccctcgtgctggcagatcaccacgctggagccgttcggatccttggcggcctgcttggtgtacgccaccagagcttcggcgagcttgtcgtcggcattctgcaggttgacgagtttgaccacggcaacgtcggaaagcaacgatgggctgacggcttcatcgaaggcatactggtcggccgatgtggcgtcgagttcgatgaggtcggcgtcgggccgcgccttcaacgcctgcgcgcacagtgccttggtgcgcgcgtcgttcaaatacgagtcgcctccgggcaccacggttaccggtgcattcgctgctgttttcgtcatgcccccatctcgccacacaggttggacaatgacctgccggcatcacgattttgccgctgccgtcaagatagtggtattcggctgggattgcgatggttgctgcaccgaataccgcattggctattcggcttgccgccgcgtaaagaggcgtctcgtctcctcacaccagagactgaggcggacgcgccaagcggaaccgaagcgcacgccagacattccggcctcataacgacggacatgctggaggcaacggctgacgaacaccagtagcatgccgataccgatttccgccgccacaatcagcacggcacccgtaacgccgtctttccatgggatgacggccatcgtgctgccgcccagccacaacgccacccgttccatcaccagcgtgccccatgacgatatccacgcgaatacgccggccagccatggcgtgcaccatgcgcacgtcagtgccatcaatcccgccatcgtggccaatcccacgaacggtgacaccagcaggttcgccggcacggacagcaacggcaattccggttccatcaacacctgaatcggcagggtgaacaattgcgcggccacggtcatcgccatcatctcggcgatgctgtgcggcatcgctcgctcaaagacaccggccagccgccccgcaaacagcacgatacccagtacggcggccgaagacaaggcgaatccgtagctggccgacatatccgggttcaccgccaatacaccgattatcgtccagcacagggcgctcaacgcttgcgtacgccgtcccatcgcatacgccaacgcacctatcaatcccatgatgaacgcgcgggtgaccgaatcactggggaacatcgccaatgccagcagcgcatatactccagagaccagcaacgccgtcagccgccgatcaagcagcatccacatgcataaccgacgcaccagtcctgccaccagtacgaagtggccgccggatacggccatgaggtgcatgatgccggaccggcggaactgattttccaacgtttgcgcatacgtgctgttgaccggcatcggaccggcatcgccgccgatataatcctgaccaagcacacccatcgtcaatcccggcaccaacacacgcccctgatcggacaattgtccggtcacggtgaaaaacgcctcctgcacctgcgcaatcgcggcgagatgccacggcggagcccgcacctgcgctaccggctgttttccttccaagagcagccatagcggtatgcgtccatatcgcgcttgctgcaatacgcccgtcaacagatagaccgcgcctcgacgcaactgcccacaatacgattcatcggcgtatacgcgcacggcgaccgtggaacgtacgtccgcgccatccacagtgatgccgctcagccgtatgtccgtctgacaatcgtatgtgcgttggtccgaagcgatcacgggcgtcgtcaccgtggccatgacttcgtggtatgaactggattggcgagcttgtgcggaggcaggatcatgccaggcaatggtgtccgacgcgattgccgccatactgccgatgcacgccaccgcaacgcatacggtcaatgttcccgtccacctgatccgcaggcggaaagacaccacgatcatcgccgccacggcagcacatgacgccactgttataggcaatattcgtgtgacaggccattccatgccgattatggtggcgtcaatgccagctccggcatcggcctttgcctgaccggtgccgagtccatcagacatcctccatgcgaataatgcgtgcgctcccagactcgccgcccacatcactatggcgatcggcagcatcctccaatcgcggctcccctgctcgcgcagtatccgatccctgctcatccgaccgtcacctgccctcgcatggtctccaacgtcttggagccgatgcctttgacatccagcagctgatcgactgatgcatacccgccaatcgccgtgcgatgatcgatgatccgctgagcggtaaccggcccaatacctttgatggattgcatttcctcaacggtggccgtgttgaggttgatgagaccatgcgtggaagcgccggcatcgctgccgtccgtctgcatgtgcggagattgcgtggtatccgattcggggttcgctgtggcatcggaatgctccgactgctgcggatccgtgcgtttctcgtccgtggtgttctgcgatggcatcgtctgatctccagcggagccgcccgtggtctgcatggcggtcggttgagacagcatggccatattcatcgactgctggaccagcaatgccaagctgatgccaagggcgacgatcagcagcaatatcacggccaaggcatgcccaatggtgaacgacaatcgcggctgatcccgggtgagtctggctgattctccgacggcatcggcggaacgtacgccaatcagatccgataacgcacgtttgtcacgggtcgcctgccgcaggccgctctgcgccctttggggcgggtggccggccggacgaatccgtgcatggccgggaggcggcggaggcgtcgtgggccgttccactcgcggttggggcatggcttcgctctgcctgctgaatgcgcgcaaacggttggcggcatggtctgcgcgatggttatgagaaacgcccatgcatccacgctgatggattcatgggcgtttgtccagctgaaacggggtatgtggttctagcttatgaagttatccacaattgaggtggggcggttgacgctcccctcagtctcgctacgcgagcggctcccctcaaagaggggagcctaacccgcaacaagtcactccgcggggacgatggagacgatcttcggggccttgacgatcaccttgcgcggctccttgccgccgagacggtcggcgacggcggccagcgcctgccgttcgaggtcggccgggtcgatgtcgaccggcacttcgagcttggcgcgcaccttgcccttgatctgcaccacggcggtcacggtgtcgtggcccacgtaacgctcgtcggccaccggccacggctcggcggacagggactcggcgtgacccagcttgctccacatctcctcgcagatgtgcggggcgatcggggcgagcatcaggaccaacggctccactgcggcacgcggcacggccttcagacctgtcagatggttgttgagcacgatgagcttggcaatggcggtgttcggacgcatgccttccatttccgcggtcacttcggcgatcgtgttgttgagcagtttcagggtcttttcatcgggcgcgtcctcggtcacgtgggcctggccggtggtctcgtccaccacgttgcgccacagacgctgcaggaagcgcatgccgccgaccacgttgcgggtgttccacgggcgggattcgtccagcggacccatgctcatctcgtacaggcggaaggtgtcggcaccgtagttctcgtacatgtagtccggggtcacgatgttcttgagggacttgcccatcttgccgaactcgcgattggcatgttcgccgttccaggtgaacgtcggctcgccggaggcgtcggccggcccttccacgacctcgtcggccggcacgtactggccgcggtcgtcggtataggcgtaagcctgaatcatgccctggttgaacagcttgtggaacggctcggccgaatccacatagcccagatcgaagagcaccttgtgccagaaacgggagtagagcaggtggagcacagcgtgttcgacgccgccgatgtacaggtccacaccgccttcatcacccgagtacttgttgtggttcgggcccatccagtagtcgaactcgtccttctccaccatgtgcttggtgtcggtcgggtcgatgtaacgcatgtagtaccagcaggagccggcccagttcggcatggtgttggtgtcgcggtagtaggtcttcttgccgtcgcccaagtcgagctcgaccttgacccagtcctcgttgcggctcaacggtgcctcgggattggactcggcgtccatcggatcgaaggtgcgcggctcgtagtcgggcacgtcgggcaggttgattggcaatgcggaatccggcagcaggtgcggggtgccgtcttcgccgtacacgatcgggaagggctcgccccagtagcgctggcgggagaacagccagtcgcgcagacggtagcttacggtgcccttgcccacgccggcggattcgagccaggcgttgaccttggcgatggcgtcgtccacgcgcaagccgtcgagcgacagcgcgtcgcccttagcgtacgtggattcgacgtgggagttgatcacgatgccgtcatgggagacgaacggcgccttgccctcgtagttggccaagtcatcgccggattccggcagcggttcaacggtgtagatgaccggcagaccga

SEQ ID NO: 1259 - DNA, 37291 bp, Unknown
  R81_24m  MAG No. k141_34430
ggggtgtagccgcgttgtagaggactgcgcgcgggcgggcatacgcggtggtgacgtgggcgtgaggggttgtataagccccaaatcagcccctcgtaagcgagatatgtggctcgtcagtcgaattgcggtttggcatgattctgcatgcctagagatgctagtggtctgccttataaataactgaaggaccagctttttctctcccccagtcagcttcgctgatagccccctcgtcagagggggcacataccgccgctgtctgcttcaaggcaacgtcccattagaagccgatgccggcttgcatggctccccttgtcagggggggcgtcccgcggaagcgggactgaggggtagtcatttaacgaacttccgacggaggacactagagagttagggtcgcgctccagtgcgcatacgaaggggggcttcccggaacaatccgggaagccccccttcggcttgtaatcgtcagcccttgacggcgccagccatcacacccttgatgatgtacttctggcacacgaggtagaagatgataatcgggatgatggccagcacgaggcagcccatcatggcacccatatccaccgagccataaccacccttgaggtactggatggcgattgacatggtcttgaaccggcgcatgtccaacgtcaggtacggcaggaggaaatcgttccagatccacatggcctgcaggatggcgaccgagatcacggacgggcgcatgatcggcagcgtgatttggaagaaaatgcgcggcacggaggcgccgtcgatcattgcagattcctcaagttcctgcgggatgcccttgatcacgcctgtgaatatgaacacggccagaccggcgccgaagcccagatacacgatccacaggccccacggagtgttcaggccgagcatatcggcgatcttggagagggtgaacatgaccatctggaacggcacgatcatgttgaacaggaacagcaggtacagggacttcgccgtgcggttgttcacacgcacgatccaccatgcgcacatggaagtgcacagcaggatgagcagcactgcgccgaccgtgaccacaacggtccagccgaaggactcgattagattggtgcgcttgatgccgcgtgtgtagttctgcaggccgacgaacgccttgccggtcgggatggagaacgcgttgcggctgatgtatgccttctgcttgaacgagttgatcaccacgaggacgatcggaaacacccaagccagcgagatgatggtgaacagcgtggcccacagtactggatgcttgactttctcgctcatgcggacacctccttgctagtggtgagacggttctggatgatggcgattagcgccacgatgatgaagaacacgacggccttcgcctggccgacgccctcgaagccggcgcggccgtagaacgtgcggtagatgttcagagccagcagctcggagctgttggacggggcgccgttggtaagggcgaggttctgatcgaacatcttgaagccaccggtgacggtcaggaacgagcacacggtgatggacggcatcatcaacgggatcgtgatctggaacagcgtctgggtgttggttgcgccatcaaccgcggcggcttcgagcacatcgcccggaagcgcctgcaggccggcgatgtagatgatcatcatgtagccgatctgctgccagcagtacagcatgaccatgccccagaagccgtacacacccgagtaggtgattgaacgaccccagtgggccagcacgccgttgagcaacagcagccagatgtagcccaggatgatgccgccgatcaggttcggcatgaagaacaccgaacggaagatattggtgcctgcgaaccgcttggtgagcatgtatgcgatcgcgaatgcggccacgttgatcacgatggtcgtcacgatcgtgaacagcaccgtgtacaccagtgcgttccagaactccttgtcctgcacggcattgacgtagttgtcaatgccgatgaactgggcgtccgtcaccgtgctgaacttgcagaagctcaggtacaggcccatgatgaagggcaccacgaaaccaatcatgaatgctgcgaacgtaggcagggcgaacagtgcccaccacctgcgaatcgctttgccagtcatagaaatcatgccagcctactttctcctccttgagcacacccgcactactgcgtgcgagtggtccgaatttgggattgttcagtctcctcagtgctgaatagcaccaaatcgaaccggtttaaggttaccataccacgcgtatgaccgatggtcaaacgttgtcacagaaagcgtgtccatcactccttcctcgctgcctaagcacagggcaaaatgctggaaatactgatttttggcatttccgatgcagaataacacatatgataacgttgtcttatcgactgctcaacacatggtcgacgccgtccgcgtttattgttgtgtcatagacgcatctcactgcaaaggagaccggcatgggaatcaacatcaaagatgtggccaacaaggccggtgtctccgtctccacggtctcccgcgcgttcacccgaccggagctcgtgtcgaaagcgacgcgggccaaggtgctggccatcgccgaggagctgaacttcttgatcctcccgctcggccatggtgctcaagtccggccgcgcgctgcgcgtggctttgctgatgagcgatcacattcgtctatggttcagcgcttcgatcatcgaagggctgaaccaggtgttccacgcgaacggctatgacctgtcgatcttccagatcttcagcattgaggagcgccgcgagttcttcgacatgctgccgatacggcgcaacgccgacgccgtgatcgtgccgtgacgctgcacttcagcgtgcagcagcgatacgaatcgttcgtacaggtctgcgaacaatccggtatcgacctgaccgccatcgtcatcgcggacggcgatgaccgcatcagccgggcgaccaccgaactgctttcgatggatcgcatgccgaccgccatcgcatgccaagaagacggtatcgcgattccgctcatgttccagctggcgcgcactggccttcgcgtaccgttcgacgtgtctatggtcggatacgacgacagcttctatgccaatgagatcggattgacgaccgtgcggcaggatccgatcgcgatggcgacatgcgcggcgcttaaagcccttgatctcatcgagacagggaagacggccaagccgtttgaggtctttcccgcgcagatgctggtgcggtccagcacgaccgaggcgaagggctgaggggctgacgaatcccgtcagccgctgaccagacctcgccgtaaaaacggggttccgatatggtatcgaaaccccgttcgctgacgttgcgtgatcatgggctaacagccgactggggcaacgctttcacgccggagtcggactcaggacgcgtgcgcggccgagtactccttggcccagccgtccacgaacgcggtcttgaccgcatcccagctctgggtgccctgtgcgtactcgaggagcgcgttgccgagatcattcttccactgctcggacggcatcatggtgaagttccagctgacctgcgtcttgccggacttctgatcggcgacggcggccgcaaccagcggattgtcggtcttgatgtcatcgaaggtcttgaacggggtggtgaagcccatctcggtgctcagcgcctccttgccggtgtcagaagtgatgacccacttgaggaactcggcggtggccttctggtcggcctcggaggccttggagttgatgcaccagtagttctcggagccggtggcgagtccttcgtcctgctcgtccgggtcgccgatgtagatcggcatcatgcccacctgctcggcggtcatgccggcgttctgcagattggtccatgcccaggtgccattctggtagaaggcggcctcgccgagtgcgaactcggagttcgcgtcatcgccggtcttggagctcagctgagacggctcggtggtggagtccgtgatgtacaggtcgaagatgttcttgtagttctccaggcaggtgcccttgatggtggccggctgctcgtgatgttgtcttccttgaacttgtagtagagcggcaggttggccaggtgggtcttgaagcgccagtcggagctggagtcgaagccggcggaggtgaacgcgcccttgatgccgagctcatccttgcgggcctgcatgtcgtcggcgacggccttgagcgtcttgaaggagtcgatatcgtcgatagacttggccttcgcgccggacaggccgaagtacttgttgaggatgtccttgttgtagatcaggccgtaggtctccatggcgtacggcacgccgacgaccttgtcgccgtccttgagtgcgacatccgggttctgcagctgcttgtagacctcggtgtcggacatgtccgccgtgtagtccttccagttggcgtagccgaccgggccgttgacctggaacagggtgggggcgttggacttggccatctccgacttgagctgctgctcgtaggtgttggatgccgcggtctccaccgtgacttctacgccggtttcgtcggtgtaggcctgtgccaggtccttccactgatcggcggctttcggcttgaagttcaggtagtagaccttgccgttgtctccgacctcggcgttggagttggtgtcgctgccgcacgcggccatgctgatggacatggctgccacggcgaatatcgctgctgcggatttgattgtacgattcatcttcgacccttaccctaaatgctaccggtcccatcttcgttgagtcggcgccaccggcaccgttgcttccggcgacagaatctattgtgcactgtttcccagaagaatgcaaacgagtgcaatccatctctcggcagaacggctaacctcggatagacaaagtaatcaaaaccgcacatttttaccactgttgtcgccgttttacagactgcaatcgattgcaataaacgtttgcaactgtgtcattcttcgcgcgcgattacgtcactccctgcgtgtcgcgggcattattccgctccgaggcggcccagtggtttgtttcgctaatgattgaggatttcggttttgtgtctctcccccagtcagctacgctgccagcccgtcccgcaagtatggacgcgctccgcgcggcagcctgctagctcgcttgtcggctcgcatgttgtctacagacagctcttcacggcaacgtcccatcagagggggcaacgtaccgccactgtctgcttcacggcaacggtccgtcaaaggaggcaatgccgctcagacgaatacaagacagaccactagttcgcttcgtgaatcctctgcgctgcttcggcgtccttcgcaccaacgcaatgaggcgggcgaagagcatggaatctgctcctcgcccgcctcgtctcattgcgctcgtcaccgcggccagcggtacacacgatccggcagcgtggggaatgcggcatgcggctcacgctgataccagtacgcgatcgatgccacgtcgtcctgccgctcgaagaagccgcgatggcccacgccgatctgctgcacggtcacgcgcagatcggagcggaaacggatcggatcggggatgtgccagcgatagaagccgcgcatcggcgggcagtcgtcgttgtgataatcgttgtgcaccagttcatcgtgcgcggagtaatacggataccccatgtaaggcgtgcagtagttctgctccacggtcttcccgttcacctgcttggcgaagctccacgagccgccgaagtagtcctcggtaccggtgccgcagatcgtcgggtattcgcggttgccgtcgatatagaacttgaactcgccttcgccccaccagtaccgttcgagcgtggtcagcgccagataggtacccacatactgccccgagccgcgtacgccatcgagcaccacataatcattgcccagctcggtcagccgctggcgacgccactgcgcatggaagtaggcggtatcgggtggcagtggatcgtcgtacaggctgtagtcgatctgatagaagaacgcgccgattgtgttcacatgctgattctcgagcgttatccgcgcgtgcctagcgaacggcatcgggaagaacatgttgaacccgcggttgggcaccacggccaccggttcggagttgacgaggcatgcgcggccgaatccgcagcagaagaaatcgccgagcgggcactccacgctcggctcgctttcgtcatcccagtagaaccgcagcaccagatcacgcagcacgaaacagtcggcgtccgtggtcttttcgtcgacggtgatccagatatgacggatgcagccggggccgtcgatgtcggccaatgtgaccgtttcgccactgggaatgttgcgcaggcaggggctgcccttgcgcgacgggcccagttcgctggcggcgatgccgccgcggccgggctccccggtcggattctccgcgttgatcgcacggctggactcacgtcgtagggtcatcaatgaaccaaggtcggcaatcatcgtcaatctattccttccattacacgaaccattacgcgaacggttccggtgccgcacatgacgcacgacgccggacccgtcctatgttgcggcagtcgccgcgatgccactgcttcgtctatgacaatgacaatggcggtcgccgcacctgctgcctaagtgctcgaatcatgcgcgcatcacttgtgcaccggcggcagcatgccgaagttggactcgtagtcgttccaggcgctggtccaatcgtcgagatacgccttcttgacgccgttccagtcgccagtgccctgcgcgtactcgagcagtgcgttggccacgccgtcggcccatgcctgaccgggaatgtaggcgccgtggatcggcgtcagaccgtcggattccagcttgagtgcggacttggtgagcgggttgtccggctggaagtcttcgctgtcgaacgtggtgaacggcacggcgaagcccatgtccttggcgaggatcttcttggcgtcgtcgttggtgaccatccacttgatgaagtcgagcgtcgccttcttgtccttctcggatgcgttcttgttcacggaccaggagatgtcgtagatggagttcgccgcatacttgctttcgttcgggaagcccatgtagtacggcagcatggcgaggtcctcgtcggccacgtcgttgtccttgatctgcgagtaggcccacacgccgttcgggtagaacgccacgcgaccggtggagaactcggcggtggaatcctcgtagttgaccgagccgagcatggtgttctcggtcgggttgtccttcatctcgagatcccacagggccttgtagttgtcgaggtaggtgcccttgagctccttctcgaagtccacgccctcatcgatgtactcgtaggcgaccgggacctgggtcatgtgcgacgcgtaacggtagtagttggaggcgtcgaggccgggggtggagaaagcgccgtcgaggccgaggtcgtccttgtgctgctggatgctgtcggcgaccttcttgagcgtggcgaaatccttgatgtcatcgaaggacttgatgaccgagtagctcttcttggcgtactcgttgatgatcttcttgttggcgatgatgccgaaccattcggcggcgtacggcaggccgtacacgtcgtcgccgtccttgtgggccatctgcttgccctgctcgttgagcagcttgtaggcttcggagtcctgcagcggctcgaggtaattcttgtacttggcgtactggtcgaagccgccgatgccgaacatggtcggggcgttgttcttggccagctcggacgacagcgtggattcgtagctgccggaagtggcggactggatgtcgacctgcacgccggtttccttggtgtacatgtcggcgagttcgttccactggtcgacgacttccggcttgttgttcaggaagtagacatggcctgcgtcgctgttcgtgcttgagccgcatgcggccagtcccagcgtcaacgctgcggcgctgatcaggacaattcctttggacagcttattcatggatttcctttcttcatctgcggccacggagccgcctcgcacttgttgttgtacggggtgccggactgcatacgtcgccgttggtgcagccggttttgctgtagcgcatttcgttatgcgttggagtggattattggtctggctcaggtgttgcctcgttgcgtaagcatacagtcgaaccggtttgatttataggatatcgaaccggttcgctatcgtcaatcgggcgtgttccagcgtgtcgctacgtagccgggggtgagtcacggaagggatggtgcggcggcagtggtggcgcgcggaatcagcgtggctctcaccgtggtgaccgtttcgctcaactgctcgcctcgcatgagggcgagcagttgttgcgcggccagtcgcgccatgtgctgcgggtcctgatgcaacgtggtcagtccggcgactacggcggtcggatggtcgtcgaatccgatgatcgacaggtcttcggggatgcgtatgccaagctgccgcagatgccgcatgatggcgaccgccgcttcgtcggtttcgacgcagatcgcggtcggccgatgctcgctgctggcgatccggccggctatggcagccatggcctcatcttcgctcatggcgtccatgtcgctggatgatgcgaacgcgaccggttcggcgtcgggaatgcattcgcgcatcgcgtcgaggaagaaatccttgcgcagatacgagctggcggggaacggtgccggtttcggatgtgcgacgtatccgatgcggcgatggccgagttggcgcaggaatcgtacggcgtcgttcatggcacgcttgttgtcgagcatcacggatgcgggcaggcgggaagcgctccgtgcgtcgagggcgaccgcggggatatgcatgctggaaagcaacgtcgattcgctgtcgtccagcgagaatgacgggaggatgaacccatccatattgcgtccgttgctgggcaggtcggcgaagaatccatgcagttgctccaggtcgcagacccgtacgggcacaagatcgtagccgtggggttccagcgtttcgagtgcgccttcgatgcagctcgcgttgaaccatgacgcaatcgtgcagccgaacagcatgacgacgcgcatggttttgccggatgccagcgatgatgcgctgcgggacagcgtgaaatcgaggcgacgggcggcgtccagcacgagttgccgggtggacggccggacgctattcatgccgcgcaatgcgcgcgataccgtggcgtcggagactcctgtggctatggccacgtcgtggattgtcgccatgatgtctcctttcgctgtgtggtgggcggtgtcagatactgtagccgtgctggcgccgccgcaatcgctgcgacgtacgcccatgcacattaatagcatatatgtatgcgcttacattcttttgtaccacgatgtgcgcgttgttagcggtcacggtttgattgtgtttgcaatggtttaccaatgttctgtattgtgcgcatgtgatgtgacgcgcaatctgcaggcggcggttgacggtgtgcaatgtaagcgctatcattttgttgtgtcaatcaatgcatggttgatgcagccggcatccgatccggcagggcgaccgcaaggtcgtacacggatatgtgcatggaggcacgtatcacatgagcaaggagagccattacagggaggtaatgatgacaggaagaacgtggaacaccatcgccaaggcaatcggcttggtatcagtggcggcgctcagcttcggggcgctggctgcatgcgggaacacgaccgcggtcgacagcagcaaagggcgtgtgtactacctgaacaagaaggcggaagagcaggagaaatgggaggccctggcgcaggcgttccaggacgagaccggcatcgagacccagattcagctttcggccaccgactacgaccagacgctgcgttccgaaatggccaaggacgaggcgccgaccatgttccaggccgacggcccgagcttcatgtacagctggctcgattatgccgccgatatgagcgactccaagatctacggcgagctgactgacagctacaaggaccgcacgctcaagaacgccgacggcaagccggtcggcatcccgtacgcggtggaaagctacggcatcatctacaacaagtcgctgctcaagaagtatttcgatgcatcgtggtcatcggtcaagtccatcgacggtctcaacaacttcaaggcgctcaagaccgtcgccgatgagatccaggaacacaaggacgacatgggcgtcaagggcgcgttcacttcggccggcatggattcctcggcgttccgatacaacttccatctgccttctctcccgctgttctacgagtaccgtgatgacggcgtcgatatgaactccgtgccggaatccgtcaagggcacgtatgtcgactacatgcagaatatctacgatctgtacatcaccgatgcaacggtgccggccagttcgctttcaggcaagaccatggatgatgccacttcggagttcgcgctcggcgaggcggtgttcttccaggacggcgtatggatttactccgcattgcaggatcagggattcccggatgaggacctcggcgtgctgccgatctacatgggcgtcgacggcgaggagaagcagggcctcaaccaggtgatctccaactactggtgcgtcaattccaagtcttcccagaaggatcaggaagcgacccagcagttcctggagtggctcgtcacttctgatgccgcacgtgaatccatctcgcaggacatgggtctggtcacgccgttcaagaccttcgacgaggaggcatacaccgtcaagaacccgctggtcgaagccaaccgcgagtaccaggagaacggctactacgacgtcatcagcgtctccaccgtgtcccaccagtgggaaaaggatctcggctccgcggagctcaactacgcccaggggcagggggactgggatgcggtgaagaaggtcttcaccgatgactgggccaaggaatacaagctcgccttcgccaagtaagcgaagtaatcgacaggcgatccgaggggtcgcagcgtgaggggcgtccgttgccatagtgctggacgtccctcacgcgttgttgtgttgttgcgaactggctcagcgcggcccgctggacagcatgtggccttccgacttcgcacgcaacgtcccagcgaagccgaatgaccatacactggcctgcccgcgtcgcatgtgcggcaattacgttttccaaccatggaagacggtatttcatgcacttttccaaccgtgcacgtgcggagacggctgagacggttggcgcagagacagctgaggggagcctccatacggaagactcccctcatagagacgctactgcaagtcagcggtcatgcagccggtattggccggctgcgaggcgtcatgcaaggtggctacgcatgaaccactggaatttctcgagctgctggacgtggtcctggatgatgttggagctgatcacatccagctcgtccagctcggcgatggccttgcggtcgtcggcgatgcaggcgtcgtagtactcgatcagcgccttgagatacgcctcggtgccggcgcggccttcgacgtcgaacggcttccgcgtgcggttgcgcatgattgcgtcggtacggccgtccggcgtgccgcccagcgtggcgatacgctcggcggtctcatccgcctgagccagcacggattcgacctcaggatcgagcatcttgtgcacggcgatgaagttcggtccggtcacattccagtgtgtatgcttcaggaccagcgcggcctcctgctcctagctcagtcggttctgcagaatcgcgatggccttctcgctggtcgcctcatcgagtcccggcgcaactgattattgggaggtttgagcaccggatgttattccgattcggcactggggttattgtgggatggcaccggcgtgcttggtattgggcactgccggtgccgttcctgtttgcgagactggttggcggctaccggccgggtgcgtgttccctcatgttgtagtcgccggtttctatccaggtggtgttgtgcacgatccggtccatgatggcgtcggcgtgggtgccgcctccgagtcgttggtgccagtccttttgggggtattgggtggcgaacagggtgctgccggtgtcgtgtcggcgttccatgagctcgaacaggaagccgcggaagcgttcctcgggcgggtcgaacagccattcgaccgggcgcgaggaccgtgtacgcgctgtagcgtttgagcagtctggaccgtccttggggcttgtcggcggcctgacgccattcctcctcgaggtcggggacgcggatgtagcgggaacggtaccggttgcggcacgcctgacgcgccagggcgcagacgatccagctcttgccggacccgcagtagccctgggcgacgatgttgcggtgtcgcgtgacccatgagcagtctgagagcgaggcgatcagttcgcggctgatgccgcgttcgtcgagcaggtcgagggtgcgcaggtcggcctgcgggtagcgcagcctcgcccttctggccagtccgccgatgcgtttgtccgtgaacgcggcgtgcgcctcgtcgaccgcgagttttatacgttgttccgcgttcaggggcgcgcatgcgtcgtcgtcctgatgcaggagcgcgtcgagaagctcctggcatcccatgtcgcgcagctggtggcgggtttttgttcgtcgagcctcatcgcttcgtctccctcgcgttgtagtcggcgccgcgcacgtatcccgcgggcggttcgacgtcgagacccttgactttcgggtcctcgccttccatgacctcgtggtcctggccggtgtcgaggatcgtcttcaattgccggtggcggggcgtgttcacgaccctgcgggccacgtcgcacgcgttctccagtcgttgccgcccgtagcggcgcgacagcctcagcaccgccagagcggggtcgatggcctggtccggcctggcatatgattcgaagatgcgggatatgacgatgaccgcgttcgggccgacgcccgacgcccatgccctgacccggggctcgtcccattcccgccagttcgcctttttcggcaggtccacgtcgcgcgtggaggaacggttcgactgaacggcatcgaacagccgatgcacggcgacccgctggccatcgtgccagatctcgagcgtgcgggcggtctcgcgaagctcgacccgggtgccgatcagccggtggggtacggaataccggttccgcctgtaaacgatatggcagtcgttggcgactttcctcgtgccggcccaatcgccggtctcgtacggcatgacgggcagcgggatcatcatgggtcgctcctcggactcgaacaccgccaggcggctgccctcgcgtttctggaaaggcgcggcgttgtacgcgtcgagccagtcgcggatcgcccggttcagttcgtcgagcgaatggaattcccggtcgcgcatcgcgccgacgacggcccgttcggcgtgcaggacgaggttctcgccgctgggcttgtccttcggccgtttcaccctgcccggcagcaccgccgtggaatagtgttcggcgaggttgcggtaatggtcgtccggcacgatctcgccatcgcggggatggctcacgacaccggtcttgaggttgtcgcacacgatcctgaccggcaccgcgccgaaatagtcgaacatgcacacatggcagtccagccacgaggattcgcgcatgtcgccggtcgcgcgcacgaacgagtaacggctgaacggcaggcacccgacgaacaggtacgccttcgacgtctctccggtgaccgtgtcatggatcggcatggtcgccccggcccagtcgacctcgaccgtacgcccggccttgcgctccaccctcgaggtgacgcccagacgcagcacgtaatcggcgtacagcttgcagaaccggtcgtagcccatgaacggaaccccttcacccggcacgagtccgcgtactccgcgtgcagcagcttcaacgtgacgcccacgcgccccaattcgctgtgcacgcgcgcccagtcgggctgctcgtaggcgctctcgatcacacccctgccgggaaacagcagggcgtacacctcgtcatcggttttgtcctccacaccatcgtaggagacgttaagccggtcggcggcgtcgaacacgtcgatcacgctatgcttcgacataccgtagcccacggctatcgcgttgcgcgacaatccttgctcacgaagcctgagcacgagcttcgccttgattctgcgtaccatcgttggcactcctttcgccatgcgtccatcacatggtgaaaggagactaacccaaacggcgccgaaccacaataactttggtgctaaaccacaatgatcccgtgaaacggcaatggtgccgaactggaataaccaacgtgctcagcaagtcaaatattcagcaacaaatgcaagtgtcatgatgttccttcctttcatcttcaaggaacgtccctcccagtctacgcgcccttgtccgacggctgaccgcgctgtggaaggccgccaactggtcatcgggtctttgatcgggaagatggcgcgtttggcgtgtcgccaatgatgtcgcgccttattggcatttgtgctcggttgagagctgttgcgcaaactgcacccaccggtaaaggaaaggggattctgcagttcattcatgttctgtggaatcgttggaaaacgagattcacaggcagaatgacatgtacaggggcaggaagcggcgtatgccatcctgactcatctggcgggggtgcagcacgtattcttcgccggctcgttgtgtgaatttcgcgtggaacttgtctagggacaccgtggaatagcgtttgccggatttgacctctacagggctgactctgggtttcatggctgcgtccgggtaaggtcggatgatcaggaagtcaatctccatgcgctcctcgcggatgctcgaggattttgagtagaaatacaggtcgtgcccggatgcggtgagctgctgagcgacggcgttttccgcgagcatgccctcgttcacgccgtccgctcccagcaacacttgccggtacacttctggcaaggcggagcccgaggcggagaatgccatggtagacaacagtccggtgtcagccatgtagcatttcactgttgcgtcgtcggcgctgagcgccagaccaattgacgggtcctcggcgagggtgcataggttgaccgtcgccgcttcgcgcatccaagagaaggccgtcatgaaatcacgcgatctcgagccgttctcgacttgcgtgtacaccaagcgcttctcgtgcttcgacagctgaccgggaattgcgtcgaacactgctcggattcgtttagccgccgtgccgccgtatttctcgatatcctcgcggtagatcttgaggaccatgcgcttggccctgtcggcggccgccatgtccctattcggggcgtaggccgtgaccgactgtggcatgcctcccaccagcacgtattcgcgccataggcgcgacgccttgcggtgcagcgagtccggcaaggggctccccgatgcaaacgagttcgtgatcatctgagccagcgcctcttcgcccatggcccacagaaactcctcgaaatccagaggacccattttcatggactcttcctcggagggaatcagtatgcccttcacgttttcgttaagggagattagggatcccgtctcgatgaagtcgtaccggccgtcggcgaccaagtgcttgatgaactcgcgggctggcgggaacagctgcacttcgtcgaagatgactagggacttacgttcggtcagggtcacgcccaacatggcgcttaggtacaggaagaaggagtcaaggtccccccttgtgtcgagcagcgttcgacgaaactcgtctcccaccttggtgaagtccacgagagcgtacgaattgtattcgttgcgcgcgaactcctcggcaatggtggatttgcccacgcggcgggccccctcgatcaacatggcggtgtgacctccgcttgaccgcttccattcgactagcttgtcgtaagccttgcgccgaaacatggctcctcccttatgattgcacgtttctaagggttaagtatagtacaagattgcacgtttctaaggtttcgcacggtgggtgaattgcacgtttctaagggttaacgaaatttctgttgggaacacttcgctggccggccccttttgttggagagccgtaatcaacgaattaatgacgcgggatactgggaagaagcctaggcggcatcggaacccgtcacagtatccggctgcgaggatgcatcggtggcaccggctttgcggacttcgatggtttcgatgcggcggccatccaccttggtgatgaccatgttgtagccgtcgtcggaatgcagcacgtcgcccaccgcacccatcttgccggtcttggacaggaagtagccggcgaccgtctcgtacgggccgtcctccaattcgatgccggtcagatcggcgaagtcctcaatggtcatgctggcctcgatcgtggccacaccattgacgaacgcggtgcgggtggtgcgttcgccgcccttctcgctgggcagatcgtactcatcgcgaatatcgcccacaagctcctcggtcatatcctcaagcgtcacgatgccgtccgtgcctccgtactcgtcgatgaccacggccagatggatgccgcgcttacgcagcagttccaggctcggcagcagcttggaggtgccgggcagggagatgccttcgcgcaccacatcgcgcacgatcttggcgttcggatcgcgcacgtccagcagatcgcgcacatgcacgaagccgatcacgtcgtcgaaatccttgccggtcaccgggtaacgggagtacggctggtcgcgtacgaacgcggcggcctcggccaagggctggtcgccctcgatgaagaccacgtcggcacgcgggcgcatcacctcggcgacgatggtttcggacgcgtcgaacacatcgtccagaatcgtgcgttcgtccttggaaaggttggtgttggagctgaccagcacgcgcagctcgtcgtcggacacctcggactcggtctgctgcgggtcgaagccgagcaggcggacgatgccgttcgtgttcttgccgatgagccagatgatcgggcggcagacggcggcgaaggcgtcgatggcgggcaccacggcgcgcgcgatctgctcggtgcgctgcatggcgatgcgcttgggcaccatctcggagatcacgatggagcagtaggagatgatgagggtcaggatgatgttcaccaggccgccggcgatgccggggtgcacgccccagctttcgaccaccggaatcaggtagggggcgatggaggaggcaccgaacgaggcggacaggaagccggagagcgtcacgccgatttgcacggtggagaggaaggtgttcgggtcacgtgcgattttggcgactttggcgccgcgagcgtcctcctgctccatttgctcgatctgcgagccgcgcagagagaccaatgccaactcggtgccggagaacacggaaccgataacgagaaatacaaaaatcaggaggatattcaaaccaagtgacatggcttcaactctaggggagtggcacgtcaaattggggtgtgctggctgggcagggtttgctagctgcgctggctatgtgaggcgtgatgtgtgttgacgtgtgtgatggtgtgaaagagtacgcaatgatacgcaatcgtgtcatatggtgtaatttcgtgtaatttggtacgcaatcgtgtaatatggtacgcaatcgtggcagatggtatgtgttgtgggcaggagtgtggtcatggcagtcaatcccttcaaaccaaccgccggtaaaatgccgccgattcttattggccggcactccattatcgaagatttttccgaggcgctgaccaacggggtaggggctcctgggcgcatcatgctggtcaccgggcagcgcggcttcggaaagacggttatgctcaccgaatttcggcgcatcgccaaagcgcagcattgggaagtcattggagagacggcgtccgcaggactggtcacgagactcatagcggcattatcgccttcgggattgcgtctggatcaggccaatatcagtccttccattggaatttccggcattgccacggcgagtctcgggcaagcgcacttttccgcggaatccaatccgctgacgttgcgcaacgcgttgaacaagcggctgggcagtaagaaactcggcaaggggaagggcattctcatcaccatcgatgagacgcaagcggcctcacacgatgatttggttgccattgctacagccgtgcagcacgtcattacggatgccgatgaaagtgatacgcctgatgaggataagaagggcgttgccatcgtatttgccggcttgccgtatatggtcaacgatttgctggataacgaggtaaccacattcctgcgccgtgcgctacgccgcgaattggataacgtgccgcttccagacgtcaagaatgcgttcctggaaacagttgcggattccggcaagaccatcagtggggaagatgcgcttgaagccgctcgccagtctgaaggatacccgtacatggtgcagcttgttggctactacatgtggcaatctgcgcagcgtcgaggttcagatgtcattaccgcggacgacgtgtcgaccggtgtttccgatgcgctgctcgccttcgacgatgccgtatgcgctccagcgctggacggcattactagtgcagagaggctgtttctcgcggctatggccaaggattcgccaaatcccacgcaggtgggtgatattgcggatcgtacgcgcagaagtcgaagctgggtgagcaagtaccgggcggttcttatcaaggacaaactcatccgcccggcaggtcatgggcagctggaatttgcggtgccgcatttggggcagtatttgcagtcgttgtagcaccaaatatagggctgggttcattcatttggtaggttgcgcgttcatttggtgggttgtcggcatggtgaggcgttggaatggcggcatttcaatggtcagtgttggagtgcagtgaccaaatgaacgcataattgacctaatgaatgaagtaagccggttgcgggctagtttcgatccagttctatgagcgccgacgcatcttggccacggcattgctgacgcaaatacgcagcacaatggtgaagacgactaccataatccccagaatgccaatgttgaaccagaactgatccgtggtgtgctcccacagatcatcctttttgaacatcggcaccttggtggggccatacagcagatcgttgagcccgatatccgaggcggcggcggagaagccccaacgtccggggaagatcatgctgaccagctcgaggctgtcgcggccggtgaccggaatcatgccgccggagaacaccaactgggccatgaccagcaccaccagcaatggcatcgtctgttctcccgacttcaccaacgccgagccgacttcgcccaacaatgcggaagtccacgcagtcagccaaatcgccaacaccagttcgggtatgccggaatcagtgaccacaccatggtccgggccgggcttgccgaggctgaccgcagtggtcagaatcgccgcctgcaacaaggtctgcaaacccatcacgatgagtttcgaggcggtgtatgacgtgggcgacaaacccaccgcgcgctcgcggccgtaaatcgctcgctcggagacgatgtctcgcacggacaaagccgatcccataaaacaggcacccagtatgacgagcacaagcagctggttcggctcggtggcggcgtctttgaaatcgggctcacccaagccatgagaaccgggcacaaccagcgacagcagtcctaggagcaatggcagcaacagcaggaagatcagcaatccggggtcggcgatgatcaaatgcagctgacgaatcaccagagtgatggtctgtttgatgcggaatggctttgccggtttctcatgctcggtgtgccgcgtgatggtggactcggcctgcatggtgcgctggcgtgaatcagtaatcgaatacacccgttccggagattcggcgacatcgttgaagatgtcggcccattccttgccgttgaacgcctggctcatctcctgcacggtgccgaagaatgccggatggccgccgggagcgagcatgagcacgttatcgcacaacttgttgatatacgacagtgaatgggtgaccacgataaccacgcggccggcatccgccagttggcgcaacatggtcatcaccgtaagatccagcgccgggtcgaggcccgaggtcggttcgtcgagaatcagcagttcgggttcggtgagtagctcgatagcggtggacacgcgcttgcgttggccgccggacagtttgtcaatgcgattcttacggcgagacgtgagttccagctcattgagcacgttgtcgatgatttcggcgcgctcggccttggttgagccgggcaggcgcagcttggcggcgtattcgagcgccgcgtccacagagagcttgcggtgcaccacgtcgtcctgcggcacgaatccgatacggctgcgcaacagttcgatgttctgatgcacgtcgtatccatcaaacagcacgcgcccgtccgtggggctgttgagcccggcgacgatggaggtgaatgttgatttgccggcgccggaaggtccgattacggcggtgagcgtgcccttggcgaatacggcgttgatgccgtcaagcagccgggtgcctttgcccacggtcagtccgatgttttcggcgataaccgcgtcgttgctgacaaacggcgtgcggtcgcacagcacgccttcatgcacgatcaggtcggtgttgccgacggtgacgacgtcgtcttcccgcagccagatcttcgcgacgcggcggccattgacgtaagtgccgttggcggagttcaggtcagtgagcaggatgccgctgctggtggtttccagcgagcagtgtttgcgggagaccagataatcgttgatgcgaatcaggcaggcggtatcgcggccgatgacgcctgtggtgtcgtgctcggggctgaaggacccgtgcacgcggttggtggtgagttgggattcgagccttaccgcttgcgtgctgcctgccagaacggtgccggcggcattcgatggggaaggggatgcgcagggagacggagatggtgatgcgggtgataccggcactggcgatactgccgtcggtgccactgctgttgggcggggttgctgttgcaggtgcgcgagggccggggatacgcggtgcggggccagcggggctggcgttggttgcggttgtaccggttgtgccggttgcggtgctggtggtgtgggttgcactactgggcgtgcctgttgcggcgcgagttgcgtgggttgtgccggttgcgctgatggtgccggcggtagcgcaggctgggccacgtttgccgcagggcgtcgcgggggctgtgccggcgtggacggcccgctggttccgacgatgcagacgatggtggcaccttgtgccagcgtcactttggtgctgttcagcagcagtacggaagtggtgtgaatgccgttgatggacagtccgtttgcactacccgtgtcttccaagagccaaccatcgtcggtaaaggtgacgcgagcatgatggtgagatacgtacgggttgtgaatcaccagatcgcaatccggcgcacgcccgatggtcgtggcacgtgcaggattgggggtataggtggcggatccgtagtgaatagtaagggcaggtggcattggttcagacttccgtgttcttcgatctctctgcacacagatgtaccacgaccgcattacccccggtgaacggggtctgactgatggtcagaaactcagcacctcgaccttgccggtgtcgagctggtaacgggcgccgacgatcatcagctggtcggcagccaatgcctgctgaatgatgggggattgttccaccagcgtctcgatggtgtgggccacgtgtacgcgctcgatgtcttcatgcgcgtcgagctcggcttcgcgcgcctgccagacggacatgccggcctggcgcagaataatcgattcggcggcggcgatgtgctcgtcgaggtcgtccatcgcatccgcggcctccagtgagccgtcggcttcggaagtgatggtgtgcatcaggtcgtccagctcctgctcggcggcctcgattgcgccgcagtgctcgtgaccgagcacacagatcaggctgacgtgcagtttcttgaccgcgtactccagcgaggcgataaccgcgctatcgatgagttgcccggcggtgcgcacggtgaacaggtcgcccaggccctgatcaaaaatgatttccggaggtacgcgcgagtccgagcaggagagcaccgcggcatccgggttctggccatcaagcagcgtctgacgggtctcctgatcctgccatggatggtcgggcttgccttcggcgaatcggcgattgccttggagcatacggctccacgtcgcatttgcggtcgattcctgttcaaagtctgactgagccatgaaacctccattatcagcggactgctggtacccatagtagcgattggaagtgcggattcgcgactgcgtgcataatctggctttgcccaaagcataatgagaacgctcacgatctcaatcctgtttaagggtgggccgtgatgatagtcagcacaagggctgtggctggtgtgataaggctcatatgttctgtccgcgcgagccctgtgccgccacactacgatgggttctggtaatcgcctgaagaatcctgaaaggaccgaaaatgactcttctgcagcatgaactgaccgatttcaaggtgaacgcattccagaacaacgagttccacgaagtgaccaaggacgatgtgctcggccactggtccctgttcttcttctacccggctgacttcacgttcgtgtgccccaccgagcttgaggatttggctaagaactacgccaagttcaaggaaatcggctgcgaggtctactccgtctcctgcgacacccacttcgtgcacaaggcctggcatgacgccaacgagaagatcgccaagattgaatacccgatgcttgccgacccgaccgccctattggccaaagatctcgacacctacaacgaagttgatggcatggccgaacgcggtgacttcatcgtgagccccgagggcaaggtcgtggcctacgaggtcatctcctccaacgtgggccgcaacgccgaggagctgctgcgccgcgtgcaggcctcccagttcgtctacgagcacggcgaccaggtctgccccgccaactggacccctggcgaggaaaccatcgagcccagcctcgacctcgtcggccagctgtgatcgacactgaataggcggtaaccttggctcccctctctgaggggagctgtcgctgaaagcgactggggggagtgctcgcgagagctagcctgatccgatatgcttccctcagtctcactacgacagctcccctcagagaggggagccagtgtatgtaagggagttttcatgactcagaccaacaatctctatgacgtcgtcgtcattggtggcgggccggctggcctgacggccggcctgtacctggcccgcgctcgctaccgcgtgctgattctcgaaaaggacgatttcggcggccagatcaccatcaccaacgaagtcgtcaactatccgggcgtgggccgcaccacgggccgcgcactcacccagaccatgcgccagcaggctcaggacttcggtgccgaattcctctccgccgaagccaccggtctcgacgtggatggtgacatcaaaaccgtgcacacctcacgcggcgacctcaagacgttcggcatcctcatcgccaccggcgccagcccgcgcaagctgggcttcgagggcgaggccgagtacgccggccgcggcgtggcctactgcgccacctgcgacggcgagttcttcaccggcaaggaagtactggtggtcggcggcggattcgccgcagccgaggaatccgtgttcctgaccaaatacgcctccaaagtcaccgtgctcgtgcgcgaaccggacttcacctgcgatgccgcagtggccgccgaagccaagaacaacccgaagatcgacgtgcgttatcaggtcgagctgaagggcgtcaccgccggccaaggcggcctgcgagaagcctcgatcctgaaccttgccaccggccagaccgaaacgtggaagcccgccgacgccggcaccttcggcgtcttcgtgttcgccggctatgtgcccgccaccgatttggtgcgcggcgtagtggagctcgacgaccacggttacgtggtcacgcacgactacctcgaaacctcggtgccgggcgtgtacgcggccggcgatctgcgcgtcaagaacctgcgccaagtggtcaccgccaccgccgacggcgcgattgccgccgtggaactggagcgttatgccaagcagatgagcgagaaaaccggcttggtgccgccgcgtcccactgcttccgcttatgaggagtccgaggccaaggccgcctccgccgcctcggccgctggcacgacgcccgccccggctcccgccaaacgcagcgccgatgccgcagccgcagccagcgccgccaagaagcccggcgaactgttctccgccgccgtcaagcagcagcttggcgtggtcttcggacgcatgacccgaccggtcacgctcgctctcgagctggacggcactccgctttcggcggaattgcagggcttcatcggcgagatggtcgcgttgtcgaatggcaagctgaactcggtcgccgtcgatgccgcagggctgatcacggcggtggatggtgcttctgtgcctacttctttggtggtcggcgaaccgctgtccgtcaccttgccggacggtgccgaactgcccacttatggttcgttggacgattccggccgcgccacattcgacgtcgccggcgtcctgccgctcgcccgcccaactgtgcgcatctgcgtgccggctgagggcgacggcaaggccggcaaggacggcaatggttcactggtcttcaccggtctggccttccacggcgtaccttccggccacgagttcaactcgttcgtgcttggcctgtacaacgcggccggtcccggccagccgctgggcgatgacctggtcgaacgcgcgaagtccatcacggacccgctgaacatcatgatcctcgtctcgctcacctgcacgatgtgcccggaaaccgtgcttgcttcccagcgcattgcctccctgagcccggccgtgcgcgccgaagcctacgacgtctcgcacttccccgaacttaaggaccagtacggcgcgatgagcgtgccctgcatcgtcatcacccacgccgacggcacccagcaagtcgaattcggcaaaaagagcatcccccaaatgctcgaactggtcggcgcgtaagccgcacgacctcaggtactcaacagcaacaacaacgattctgccaaaatcgtgacgtacatcgattgatgcgatcgatgcgcccgactccggcagaatcgttgttttgcggcagctcagcctcggtcttcgacggccttcgtgacgtttctgtcgccgaggtacttgaccaggctgatgctgatcagggccacaacgaacaggccggtgagcaccgggatgagtgcggcgtagcggtgggcctgatcaggcgcgtgggcaactacgaacgaggccaactggttgccggacagaccggcgaacgcccaggcgctcagcgtcagaccgtgcgtggtggagacggttttggtgccgaagtgctgatcaagcagcacgggcagcgtcgagaaaccgccaccatagcccgcgttgacgaggaacagcatggccagcacggcccacagcagagcgttgtcgatgctgttggtgaagatctgcagcaagcacacggcaatcgacatgatgaagattacctgatagacggtctcgcggcgcttcaggtggtcggagagtgtggagaagcccacgcggccagccgtgttgaacacggagtccacggcgagcaccagtccgatgatgccggagatggcggcggcaaacttggcggggctcagattggcatactgcgggaaggccctgagcacatcgtgcaggatgtccttctcttggctgatgagggccaggccgcaggtgatgttgatatagaaggctatccagatgccccagaacacgggcttcttgaggattgtcttgcggctgacgtgtgaggtcgcgggatcgtacacccagccggccggacgcttgatgagcaggaagccgacgaacatcatcaccgcgtagaccgcggcgaggatgaagaacatgctgaccaggccaaccgtgccgatgagatattccatcagtgggctggcaatggccttggccaggccgaagccggcgacggcgatgccggtggcgaggcccttgttgtcggcgaaccaaagcatcaggttcttgaccggagtcagataaccgacgcccaggccgatgcccatgatcgcgccataacagatgaacacgcccggcaggaagttcagggcgatgctcacgcccgtgccggcgaagccgaccacgaagcagaccatggagacgagtgcggatttcttgatgtttttctccaccattggcccggcaaacgcggcggacatgccgaggaagaagatggcgagtgagaagccccattccacggaggcgggactggcgtggagacggtcagcgataagctgcttgaacacgctccagcaatagacggtaccgattgggatatgaatcagcagtgcgggaataatcgcgctggtccaacgattctcggtaaaccttgccatatatggacggatcctttcgtaactggtgtacgatgacctgccgacccgaacgagagtcgcatcgcccatatccacgcacatcacgacggcatgcccccgtgaaccgtccgggctgcacgaatcgaatcaaatcgaatcgtgcgaactgcgaacaattcgctaaacatccttggtgtgcatttcatcggcgctgctggctcttgtcgacgccgacaaacagaactataacgctgttatggggttgctgtggctggtttctgtggtcggaagctatgagctttctcacatcgaaaacagttatatgacggtatcggcgtgattgatacgtgacgtctgcccgtggacgcggcatatccctctcggaaaacaatgactccgtcatgtccatttcttggtttggcatgttttcgtttgcagcgtcggtgctcaccacggtgaccgcggcgttcgagtcgccgggcagggcctcgaccgagggtctcatcctcggctgagatgtgggcggtactatggattcttatcgataaggttcgtgatatgcggagatggtaacgatggtgaccttaaaggatgtcggcgaactggccggagtgaccgccaccaccgcctccgcggccctgcgaggcaaggattacgtcaagcccgaaaccacgcaacgcgtgtgtgacgccgcccgcaaactcggctacaaaatcaacctgtctggccggtccctgcgttctgggcggtccgataccatcaccttccttacctcgggcctcgagggcgactatttctcccatctggccatgtgtgtggctgaggaagtgcacaagcgcgactcgcacatgctcatcgaactgtcccggtatcttaccgacgacaacgatctgtcgtacacgttttcggacggcatcatcgccatcaatgcgccacgtgcggtcgatatcctgaagcggcacccggccgtcatgctggaaaactacgacaccagcctgcccatcgacaccgtgaacgcgccgagcgacgccggctcacgggcggcaatcgaacaccttatcgcgcgtggctgtgcgcgcatcggcatcgtcggcgacaatcacgatcccaacaatcccaacatcattcccggctcgcgtgatattcgtatgcgggccgccaaggagacgattctcgcggccggactgccgtttgacgagcgccgtgatttcatcaaatcctcgtggtcgattgacggcggtatcgaggccgggcgcggcttggccaagaaaggcaagtgcaagtacgacggtctgtactgcctgaacgacggtattgcgctcggtattctgcgtggtctggcggacgatggcgtaagtgtgccgggcgatgtgcgcgttatcggcttcgacggcctgagccagagcatgtacagcgtgccgactttgaccaccgtggccaccgatttcaagggcatggcggataccgcgctgaccttgcttatgcggcgtatcgagaacctggacgacgagttcttcccgcagaccgtgaatgtgggctataagctcattgagcgcgaatccactgcggcgtagagtctttggccgtgttgagcttcaattgggtgattggactggcaccagcggctgatatcagatatgccgaaagcagcgatgatcggatttaagttgctggagatgacaggatggattgctctttacccctttcaccatcttgcaataattcttacatgtaagaactctctgttaacatgtaagaattattgcaagatggtgaaaggggatgctcatgttgccggccaaagaaagtttgacggttgagttcaagagtgagcagaagcgccctcaatcgcatgatgaaattgttgacaacgtagtggctctagccaataccgaaggcggcacactgtatctcggtattgaagacgatggcactgtgaccggcgtatgtgacgagcatcgcaatatcaatggacttgcggtactaattttcaataagactgttccgcagcttcccgctcgcgtggcgctcttgtatgagaacgaggtgccgatagtcagtattgaggtggataacagtcagcaaatcgtatctaccagtcaggggaagacattgcagcgccggctgaaagcagacggctcgcctgaggtcgttccgctgtttgtttcccaattcattagccgtttatctcagcaacggttctacgatttcagcgcgcaacctgcaccagaggctcggttggatgatttgaatccagactcaaggaacaagttgagaagccgtattcgcagtgccaatgcgcaaaactcgttgttgtcttttactgatgaggatttcgatcgggcacttgagctggttgttgatggcccgtatggattgcagccatctgttgctggtctgctcaccattggttcggttgatgctattcatcgatcggttccagccgcatcggctgtttttcaagtgatgaaaggcatgtctccaaaggtcaatatggatccattcgtgttgcccttggtggatatgtttgatcgtgtaggcgagctgatggagccgtggaatcccagccacgaagtcatgagcggcttgattcgtgtcgatctgccagacttcgatcgaggggcattccgtgaggcaatgattaacgctttctgccatcgcgattatgcacgaatgggttcggtgaggttcctggttgatgatgatgggttgaccatagctaatcccggaggattcatagagggtgtctccgaagataacctgcttactgcacaaccgcgttcccgtaatccgcagcttgccctgattctgaaagctgccggatatgttgaacgcaccggacgaggcgtggataccatctatgccgggtcgattgcggcaggcggttctttcccggattactcgcagtccggtgccgaagaagtcattctgttcctccgccgtgtggtgcctgacgaggcattcgtgaccatgattggagacgaggaacgtcgacgtggggctccattgccggtctggtcgctgattgtgctctcgctgctgcgcgagcatcgcaggcttactgtggtccagttgtgcgatttctcccatttggagcatcgacgcatcgtgtccgctgttgagaatctggtggaagctggtttggtagagggggtcggcagtgggagctctcgctcgtatatgctgagtgcccaagtgtacaaacgttcagaggggttggcgtcttacgcgcgtcagcgtgacatcgatgccactcggcgcagtggccttgttctggagttcgccgaaaaaaatgatggtgtcgtcactacggcggatgtcatggatttgtttggcctgagctatatcagtgcataccggttgttgaagaagctagaggatgcgggcaagttgcgccgcgaggggaatgggccgtcatcccgatacgtgttgggatgattggcgcgcgtgaaagtaagttctttcatcacctttcaataattctttcatgtaagaactctctgtttacatgtaagaattattgcaagatggtgaaagatgtacacgaaacggggaagctctgctcgatgtgagcggggcttccccatatgcgctggtgtgtagatcagcccgtgttctgcaggccggcagcaacaccggagacggtgcacaggatgaggtagatgaatccggcctgttggctctgcgtgttttgcttcaatttttcttaagcagagtgagacccatcgtatcgttcgattctacgacgaacgttttgcatcaagcgcagataatgtggtgagtgcatattcaacaatggcggacggtcttgatgcacttggtttgacaaatattggaatgagcgaaagcatcctaaaaaaggctgccggtacagacaagcttcctgataagcaggaagctgaagtgagtgctcgggcgttcgctgcattcattgatcagccaagacggtagctcgcataatgcattatgtgtgggcagatgtgtcgtctgcccacacattcgctgttgtgctttcgatttggaattcctctgccagatacggggaaacttctaaaaggccgctatgccgaggaagagtcctgtaataccggtggccatcaatacgatgatggtgatgattccggcgaagatgcgtgcaggaagggtttcttttccatggtttgatgggctgtccgcaactaatctcattactccagctgtaacccagcaaactgcgcccaggactagtgccaggaattctcgacaccattccgtttcaagtgcgggaatgccgacgattgatgacgggtcgcttgccagtcttggcggaatagcgcataggatacgctccaatatcaggtaaggggtatcaaaatggatcagagtcaaagcgaatgggagctgtagcgccagtcctatccaccacagcgtgcgtcggatggtcgcgagtctgtcgcccggcctagtgtccggcttgccgccttcgccctccgtcccggcaccgtccgcgggcgtgtggtccccctcgtgcgcgtccgtcgtcccgtccgtgtccctttccgcgtccatatgtcccctttcgatcatccgagtctgtcgctcggccagcgcgcccgttccgtgcgcgccgtcgccggccagtctagggccgtgcgacgcgaacggggaggcccgcgccgtcaatcggcacggaacctccccgttcatcaagcggtcggtcagccgcggatcagcccgtgttctgcagaccgacggcgacacccgagcaggagtgtcacaaagcccctgccgctctgggtacccaggtggcggtttatgaggacagcatcggtcaactcatcctgcagtggctccgcaaacctgagtactggtcggaaggaagttccggcacgcaggcactatggcacgcgtacaccccggagccggttactcccagcgaattggccttgtcgcgtcaggcatgcggtgtcgcatgtgatgcacagcctgtcatcaaaggcacgctgcccaatcgggacatcgcccatatggccgccacatccttgggatacttgacatggggcgttacgaacgatccaatggactatggtctcggtgatctgggcggatgggccctggatttgttgcagatttggggaagctacctggcgaatgccccgaaagaggacctggcgtcatggctgcacactcatctcggcgagcaagacgcccgtatgggattcagttacagcgatgttctcgcggactgtgatgcatggttgctggcgcggtccatgcagagcaattcctccgaaaggtctttgtccaccgctatgcgggacatgttcgcgcaaagcgagacgaatcgaattaaacggttctatcagtcccggttcaagggaagtgcggacaacctggtcatcgcatttcgaaagctcgttgatggaatcgatcttggaatattcgataacgtatccggaagtaaaaaagcactgctcattgcgtcacatgcagaccgactcccgagtcaagcggaggctggtatattggcattatcctatgctgaatctcttgaaaatccgaaccgttaatcaatcatgattgtgatcgcattgcgtggaatgattcagccattccacgcaatgcgcctctgataaaacgtcatagagtcattagagcggaaagtagtgttatcacaagaacgggaaagaccataaccagcacgagaaacgatatgattcccacaaggacatgcgaggcggaagaggaatgatcacgaagttccggatatacagatcgcatatatgaacgcacgccaaagatgacaagcgccgcaatccagcagactacccccataatcaatactaaggtaagtctacgtacatactcagttgccgtagttaaattcatgcacgaagaggaagagaacgttagaactctgcagattatagtatcatcatcgccattggtgccccattccgcccacaaaataagtgctggtgaaagcagcagtaatcccagccaccatagcgcacgtctggccttgcccaaagccacatagcatctactcgccttagggaatttggtatctgctttcggtgccaaagcacatttctcgccggaaaaactttctgacatatcttctgtgccgtgtttcttcccaatgccatcgatcataaccggattcgctttgcaagcgtggcgttcgttcccggcgtcgccctccgccttgatgccgtccgttggcccggtgctcccgcgctcattcgatggcttgtccatgtcccctccgatcatccgagtctgtcactcggccagcgcgcccgttctatgcgcgccgtcgccggccagtctagggccgtgcgacgcgaacggggaggcccgcgccgtttatcggcacggaacctccccgctcgtcaagcggtcggtcaggcgcggatcagcctgtgttctgcaggccggcagcaacacctgaaacggtgcagaggatcagatagatgaatcctgcctgctggctttgcgagagctcttccttgtccaccttcttgcgcagcgacttgagcgccagcacctgagtgacggacagcgcgtccacgtatggggagcggatgcggatggcctggccgagcacgtgacggtgctgcagcggccacttgtcacccacgatggccagaacccacttgcgggtgagctccatctcgttgagcaccttctcattgaggtcctcgcggtcgccgagggcaaggtacatcctggcgatgcgctcgtccgtcttggcgatggacatctcgatgttgtcgatgaacgtggagaacagcggccattcctcgtaagcctgacgcatggtctccagatcgccgaacttctcgcatgcggtgccgaggccgtaccaagcggccaggttgatgcgggcctgggcccaggagaagatccacggaatcgtacgcaggtcgtcgagcgacttggcgccgaggccacgcttggccgggcgggagccgatcggcagcaggccgatttcggtcagcggcgtaacgatcgagaaccacggggcaaagccgtcggtgttcaacaggtcgaggaagcggttgtgcgcggcctcgtcgagctgagcagccatgtcggcatacttctcggtcatctcggtgttgcgcttctccacgctcggcgcggactgcagcaaggtcgccgcagccacggattcgacgtggcggatggccagcaccgggttgccgtaacgggcgaagatgacctcgccctgctcggtgagcttgaagcggcacttgacggaaccgaccggctgggcgagcaccgcacggttggcggggccgccgccacgacctacggcaccgccgcggccatggaacagggtcagatcgatgtcgtgcgactcagcccacttggcaatgcgctcctgagcggagtgcagggccagcgtggcggaggtcgggccggcgtccttcgaggagtcggagtagccgagcatgacctcgagcttgttgccggtggccttcagacgagcctgaacctcggggatcttgatcatttcctcgagcacgtccaccgagttctgcagatcctcaagctgctcgaacagcgggatcacgtcgatggtgggcacgtcctccgggtgggagaaggccaagcggttgagctcgtagacatccttgatgttctgggcgctcttggtgaaggagatgatgtagcggcgggcggccttgaggccgttgcgcttctggatggcaccgagggcgcggaaggtgtcgagcacctcgtgcgtcatcggctgcagttcgccgcgctcgccgtgcaggccgtgctcgcggatatccgcaagggcgcgggcgtgcaccacggagtgctgacggaactccatctccaccatgtggaagccgaaggtctcggtctgccagatcagatcctgcagcgggccgtaagcggaacgcttggcgccggcggcggccagcgaacgctggaccaccttgaggtcggcgaggaagtcgtcgcaggagtggtacatgaggtcggcatcgcgctcgatggtgtagtgcagacgatcggccatcaccagcatgaccgcgcggtgcatctccttggtggagatcagggcggccttgtcggtcagacgctcgctcatttccttctggtggctccagaggctcttgagctcggcgctcggcggcgtggtctcggcttccatcgtgaggttgcggcccacggtgcgggtggcttcctcaagggcggcgattacgtgatcggagaacttgcgggccacggcgcggctcaccttggcggtgacgttcgggttaccgtcgcggtcggagccgatccagctgcccgggtggaagaacgcggggcaagcgggctcgacgagaccggccttatcgcccaggacccagtcgtcgaagcgacggtagaccttggggatggtgttgaacagcgtgttgtcgaagatgtcgagaatcgtgtccgcttcctcaaccggggtcggcttcttcagcgcgatcggagaggtgcggaacagggcgtcgatctcgttgtagagacggcgcaggcattccttcttatccgagccgccgaggcgcttgtactcctcaagcaattcggaaacgcggcgaatcttgccttccacggccttgcgacgggcctcagtggggtgcgccgtgaagacggggtggaattcgagctggttgagcagttccttggccttggccgggccagtctcattgatgagctggtggtaggcgacggtgagctcgttgatcgggtcgaccgcctggtcaacggacacgttgttctcgcgctcgtggagcacggaaacacggtagttctcctcggacaggtttgccagatggaaatacgtggcgaatgcgcgggccagcagctgggcgtcgtgcaacgtcatgttgtcgatgacgttcacggcctccttcaggccatcctggtcggggttcggatccttcagctcggcgaaatgctcggcgctggcctccaccgcgtaatgacgcacggtgtcgaacgtagacagcagttcggggttgtattcgcccagtacgttacgcaggatctcaagacacagatccatgtcgtacttcaggctttcgggaagatcatgctcctccgggccctttcggccggtcccggtagtgacgatggcggcgtcagcgggggtgatctgttcttcaggtgttgccatataacctcctttgccgaataacaggttgctcggtctaccggtcgtctgcggctcctccgcagttgttgaggccagtcgttgcgagcccacagcccatattcaacgtggttgttgtgtgggcaatagtgtatccccgcgaaatcgctatttgcgttacggagtccatatagtgctccaagttgtccacctatagagaccgaatatcggacagcatatgagacactgtccgattcgcggaagatttgagcaccttacgattgctggcgggggaggcagggagtagtaatgagggatgtgagcgaacagaagaaaaaaagtgcgcccgaagcgaaaggcgcaacggctgtacgtaaattccacacccactccattccgctggacatggaagatattgcgcgcgattgggaaaaaccggtggtggacgccggtatcgccgccaaagccagcgtgattgtacgggtcggcatgctggacctgggagccggcaccggctccttccgcgtgcgtgaaatgatgcaccgcatcgcctacccgctgggcgtgcacgtacgcgccgacgtgaacctgacggatatcgaggccacctgcacggatggtcgtaaccgcatcaccgaagtcgtggatttgccgaccaccggcgtgaacaccgaacgtatctggctgctggaacatttcgccgactggttctccgtgaatctcggcaaggggtcgatgtatcacgtcgattcgcaactgtccgatggcgtggtcaagcatttggacgaacgtgacgcttcgcagtattcggccgatctggccaagcgcctgcgcgaacgtgccaaggccgaggctgaggcggccaacggcagcgtggacgaggcgctggatcttgcgttgaaaaccaaggtactcgtgacctccgtggccaagtccttggatgatgacaatgaagaagcccaccgacttttggcggacagcgcggaagtcacttcggtcgaagacaaagcggccgaagagaaggcctacgacgatgccgaagtgtttaccggtgactccaatgagtcggttgaatcggcgaacgcggcgaa

SEQ ID NO: 1260 - DNA, 24143 bp, Unknown
  R157_18m  MAG No. k141_161
tcctattcatcatcatgcatccgatcacgcattcagcaggtcgcgtgaaagccgtgtaacacgttcggacagatcggaattggcgagttccacgccgccggtcgcgtcttcgggtgccagtttgcccagggactccagcacaacgcccagatggcgcacggtgccctcattgccgtcgatgacggcggcccgttcgggcagcagttcgcggaagtagtcgcggtaaaacacgaaatgcgtgcagcccagcaccaccgagtcgatgtgctccatgtcgtactggtcgaagtagccatgcagcgtgcgcatcaccaggtcatggtcgccgagccgcccggattccacgatctccaccaagtcggggcaaggctccttgaaaatcgtgttgttggaatcgaatcgatccatcagtttggcgaacttccgctcacgcaaggtcaggggagtggccgccacaatcaccctctggggaatatgatgcgggtcggaaggcacgtcgccccggtcgcacgccactttcagggccggctccatgccgatgatcggaatatcgtagtgttcgcgcaaatcgttcaccgcggcggaagtggcggtgttgcatgcgatgaccacggccttgatgccttgacgcacgaaccgttcgacaatatcgaaactcagggccctcacctgctcaggcgtcttgacgccgtacggggcgttggccgaatcgccaaaatacaacacatgctcggccggcatatccttggcgatttggcgagccacggaaataccgccaagacccgaatcgaatacgccgattggagccgaagagctcatgcctgaatcctccctatagccatgcctgcaaccgtatgttgccgcgaccgatcacaaagccgattgttttgcggtgttgtttcgctccctagagtactctgaaagccatgagtcttccgcaacgagtaaccaagacacacgcaaccggcaatgatttcgtggtgtacctcgacaagtccggcaaattcgagcccaccgccgatgaggtccgattcctgtgcgaccgtcacttcggcattggcggtgacggcctgattcgcctgacacggcctgatttcgtgtctgatttaagcgatgatcagctttcggacgtactggccgggggcgcgaaatggttcatggactatcgcaatgcggatggatcgttggcggagatgtgcggcaacggtacgcgcgccatcaccttgttcgctcagcgcgagggcgtggccgactccaccgagccgttccgcctcggcacccgtgccggcgtcaagattctgacgccacgcggcaatatgaggccgtacggagccaacgtgttccaagtcgaaatgggggagtggaagatcggcgaaaccgacgcctacgaggtcaccatccccggcgctgagggctcggcgcgcggcacgttcgtggatatgggcaacccgcacgtggtcgcggtgatcgaggatgccttcgcgtccctgccggtggtcgaggcgctggatctggtcatcaagcccgtggtgagcccgaccatcgaatccgaccagaatgtggaattcgtgcgggtcgacgacatcgatcagaacaccggcgtgggtgaagccacgatgcgcgtcaacgaacgtggctgcggcgaaaccctgtcctgcggcaccggcctatgcgccacaggcgttgtgctgcgggccaagaccggcatcagccactgggacatcaccgtacgtggcggtaccctgcgcgtggacgtcaccgacagcgacgtgaaactgaccggagcagccacgctggtcgccgatatcgatttgttgtaaaggaatcaggcagcgaacagggccgcgccttcggtgacgatgatgagtaccacgatcgccacgatccacagtatgtcgaccatgaggtcgatgttgaggcggtaatacttattgagtccggccggcaccgccgcgacatcggcctcgctgtcgccatcatcagccgccacagccttacgtgacggcaatccctgcactgccacggtcgcatggctcaacgccatgaactggatggtggtggagaacatcagggtcaggcaccacgggcacagcgcgtgaatcacgaacagtgactgcgtgctcagccagtacgagtaggccaaagcggccagtccgcccagccacgtgcaggtcgcgaaccaacgcggcaccttcacacgcgccaaaccgatcaccgcgatggtaatgaacaccgattcggcggcgatgccgaagaacgcgttcggatagctcagcccgccgaacttcacgatttccgcctgccaggactgggccaccgccgaacaggacaccaccgagttcagatcgcagccgagcgcggactccggatgcctagccaactgcaaagtctcggcggacagaatgagcgaggcccccaatgccactgccgaggcgatcagcatgatgagatatgtccaagtggcactgtggcgccatccaatcaacggtcgcgcctccgccaagccaagcggcgtggtgttcgtggtgctggatgatgtgtcggttgcggtgttacgagtcatcatgcccctttcgatagcgctgcgctccagattagcctctgcggttgtcagctgagtgccggatgtctggtcttggccgttggcagaaggtgacgacctgtctgcgccttgcgtgggaatgctgagatgaggttacgatggaaggtatgactggatatgtgatgcctttggagccgcccgccgtcgggtgggacatccattgccataccgtcttctcggatggcacggaaacgccggccacattggccgaacaatccaaggcattgggattcaagggcgtggccatttccgatcatgacaccaccgccggctggccggaggccgaagccgcatcccatagggtcggtttgccgttgctccgcggcaccgaaatcaccgccacggatgagaacgtctccgtacacatgctcggctaccagtatgatcccacgaatcagcacatcacggacttgttcgccgatactcgagccgcacggttgcaacgcacgcagcgcatggtcgaattgttgtctcgtgattatccgattacctggcaatccgtgctcgcccaagtcaaggagggtgacaaaaccaccattgggcggcctcacatcgctgatgctttggtgagtgccggcgtatatcggactcgttcggaagcgtttgcgaatgcggtcagcgcctcatccaaatactatattcccacgccctcgccgacctctcatgaagtggtggccgccgtcaaaggggcaggcggtgtgattctgatcgcccatgccggtgatgtgagccgtaaccgcagactgctgtccgatgaccagatcgaagcgttgatcagcgagggattggacgggctggaggtatggcaccgaggcaattcaccggagcaacgagaacggctgctcaccatctgccgccggcaccagctactggtcaccggcggatctgactggcatggcaaaggcaaaccgaacaaactgggggagaacctcaccgacgaggccactgtcgaagagatcgttcatcgcggcgtgcttccgctatatcggtgattcggcaatagaaaagcggccttgagatgatgcccaaggccgcttatgcgcgattcacggtcacagcgtgccgaacccgacggcgtgcttggtttcggagccgatgatcgcgtaaccgagtgccttggcgggcacgatgatgcgacggcccttgtcatcggtcatatcgatcgtcgcgttgtcggccacggcctgcgcgatggcctggctcacattatcggctgattcgtcggtgctgaagttcaccggtcgtgccacgttctgaatgcccagttcgatatccatataaggctccttgttctgccgtctttgtgacgaacatcatggtaagtggccgtcaccggccgaggttctgtactctattgtgccgcgtgtctgcgtcgtcatgtgcggtgttacgcgctcggcgtggcgcggaacaccgcacacgacattatttggatgatgtggatgattcggccagcggattgccctcgctgtcatacccgtccaacccggcacgggcatcgcgcagagcgcgttcttcccgctccaacagcggaatcaccgtggtttgggcactcgaggctccgtgctgaacgaaactatccggagtatcgtcattcaccgcatcgtcggtcggggcggcggattgagatgcaggggaagcgtcggttgacgtcgtgccgctatgcccgttcatactgaggagctccttcagcgtgatcgtcaccgaagaatgggaagcgccatgtgagggctgcggtttggtcgatcccgtaccggttgcggtgccggagacactcgcttgcgggtgattggcggtccggtcagcatcgggttcgacttccggggtaagatccacgtcgccagcggccacgatgtcagcggaaccggtgcgatctggatcgggcgtgtcgtccgagacctcggccgccgcggtaccggtttcggactgctgcggttgtgcgggtacctgcgtggcgggtgcctgatgacggtcgtcctgcaacaatgtgccgacggtgattgtggagggggaaccgggctccgtcgacgcggcggcggccgcccctgcggctggggccggtgccggagtgtgcttgatcacgcccaactggtgtgcgagtcgttcgacctgtgccttgaactgcatgatgcgattgttgtccgcacggttcaacgcctgaatgaattcgcccacctgttccatctgcaaccacaggttggccctgagcatgatgagatcgtcaagtcgagagcccatcatgcggccgtatgcggaaagcacggcgttgcgatgggattcgtcgagcttgccgaaaatccaggcaaggtctcgtgccggatcgttgacctgcatatcctgccagttggtcaccgtggtgatggtggaaccggagaacaggaagtcgccgtcggagaatccgccgtgaaccgtgcaggtggagaacgaccacaatccctcggtgtccatgatgcgcgcccagctgtcggtgatttcttggggaacatggccggcggagcgtaagcggcgaatccaggcggtcagctgcgaacgaatctgaccggtggtgactaccggatatttggcattggccagaaaagtcgaaggcagacgatgaatggctccgatggaggtgccgacggccgcgcagtcatccaatgtcaacaggtcgagaggccgcgcctgaccatcacggtggacggcgatcatcacggtcgtctcgcctgtgggaccgggcttgcgcggggtcagcggtgtggactccgcctgggcctgctgccccacggcctgtgcggtggccgtctggccgggttgggaaacgtctcccgggacgaatgcgaccacacggtccatatcgaagccgaggccaccaagctcgcgcgcggctgccagtgtctgcgccgctttcacacggcggatcagacgtgtacgcccttccttgctgtcagtggcgtatacgtcgtacaacttgcccgaggcatcttggatcacggtctgatcgatgcctttggcctcgtcggttgcgctggcctgcacgttctcgcgtacaccggccacccccagattcggcaggacggctgaggcgagtgccgccaacatataatcgctacgtttcatcacccttccacactaatacatccgtggcgattcgcaccgcagaatgacacgcaaaacgcatgattctggcgatgttttgtcgtgagcccgattcagccataggcgtgagtcgtgccgtgagcgcgaatcgtgccacaatggacgcatggaacaggtgcaggggattcttgaggggctcgatgagcggcagcgtaccgccgcgactacgttgcaagggccggtgcgcattatcgccggcgcaggtgccggtaaaacccgcacggtcacacggcggatcgcctatgcctgcgccaccggggcatggaagccggagcgggtgcttgccgtcaccttttcggtaaaagcggcggcggaaatgcgcgcacggttgggccagctcggcgtaggggaaggtgccggacgttccggttcgggtgcgggaactgccggagtcacggccgcgaccttccactcagcggcattgcatcagctcaacagcgtctgggcggacatatgcgaggctccattcccgcatgtgatcgaagatcagcgtgacgtcgtctcccgcgcgatcatccgcgccaccgcacgtaccgatgccgatccgctgaccgttcgcgatgtgctcgccgaaatcaattgggccaaaatctcgttggtggcggtggaagattatgcccgggcctgtgccatcgcccataggcaaccgcccgccggactcgacaccgctcggttcgccgacgtctacagcgcctacgagcaggaaaagacctcgcgtggcgaaatcgattttgacgatattctgctgctcgtatgccatatcatggatgattttcccgaagccgccgcccaaattcgttccaccatcggctggctcaccgtcgacgagtatcaggacgtctcgcccctgcaacacaggctgctgaccctgtggctgggcgggggaggacctgacggcaagagcgcgatgaaccgcaacgtatgcgtcgtgggcgatccggcccagaccatctactcgtttgccggtgcttccagctgggatctgctgcgtttcgccgatgaattcgggccgctcgccgccgatgtcaatctcaacaccgactatcgttcgacgccggaagtcgtgaatctcgccaaccgggtgcttgcggccgcgccgaaccgtgaggattacctgaaactggtttccgcccgcgaatccggcccgcgcgttacccgaaccgcttatgagagcgatatggaagaggcgcagggcgtggcggcacgcatcgcccggttggtcgccaacggagccaagccgtccgattgcgcgattctcacccgcatcaacgcccaacagccggtattcggtgccgctttgcgcaatgcaagactgaaataccgcgttcgtaaggattcgggatggcaatcatccgcgctcgccgacgatgccgcgtccaaacgtgcgctattggaggcgatgggtttggacgccaccggacttgccgcaaacgacgatcccggcgttacgatttccacgattcacgcatccaagggtctggaattcaagcacgtgtttctgatcggctgttcggaaggactcttgccgtacggttcgccggaaacgggggatgcgctggaagaggaacgccggcttatgtatgtgggcatcacccgagctgaggattcgctgcatttgtcgtatgcgcggaccaaggatggttatggagcgcaacacagacgcccatcacgatttttgtgacgggcgtcggtaatgaatgtgaatgttcctgaacgttcaggaacgggaattggctgaaggacggttgactatgcctgcgtatcctccgagttgccgttgccgccatcttctccgtcttcgccgagaagcttggacagttcggcatcccaatcgatatcgccggtcttgccatctgcggcagggtgggaggcggaaccgttggcatcggaagaggagcctgaaggggcgtcggatgacggagacgcgccatctgcgggcttgtcgctaggcagcgaaggcagcagatcgggatgcgaccacttggcgtcacggccttcagggccttcggcggcggtgatcatctcccacaatccggcggcctcgcgcatgcgcttggggcgcagctgcaaaccgagcagactttcgaacgtacgctcggcggggccacccatcgcgcgctcgcggcgcatcatctcacgcaactgttcgatatgaggcagatgggccataccggcgcgccacaccacgcaatccacccagccctcgaccatcgccagcagcgattccagcgaagccagcgcctcgcgctgttcgggagtgtcggggatgccgaccttggtgagattcaccgcgccggaaatcgactccggatccatcgacgtggcgtcacgcagctgttcctccatcgcatccagatcgatggagatgccgcgtgcgtacttgccgatgagcgcctcgaaacgcggcatcagccacggtaccgaggcatacaggcgggcgtgagccatttcctgcagggccaggaaggaaagcacttcggattcgggaattttctcggtggtctcgaatccggagagcgcagcctcgaacgcggcggcgtcggcggaagcatcggagccggagacttgggcggtaccgtcagttgccggagtatcgctgttgccggccgaagtgaagccaatgggattggcggaagcgtcggtggatgtggagaacggattgaccgagtcggttgaagtgccggccgtatcggcctcgggcgcaggagtctcaccgttcagcatcttcgcgtattcggtggcgttctgggcaatcagtccaccagccggattcttcagcaatgcgatgccctgatcgaaactgccatgcacttcatggctcagattgccggccgcatgccccaactgcatggcaaaggacgtgttgcccagcagcttcatcagctgggctggatctttcatgccgtcgggaatcggaatcggcaccggtccggcgaacatgccggcaatctcgccatcgccgaacgcgccgccaagacgctccgaaatcaccgaagccaaagcgtcgttcatcgactcggccacaggagctgcgaacttcgcccactggtcgatggtgccttccacccagccggcgcgggtcagcacatccggatcgccgggcgcgggattgaactcgcaggcggtatccagccacaggttcgcctcactcatcgcgcggcgagccgcctcgccatccacggcggacacgctggacgcggaaccggaggcgttggcctgctgcaaggcaatcgacttggcgagcttgacgttgatcggcccttcctcgacagtgcgctgcatatcgcccatcgtgttgagtccgccggcgctgaacgcggccatcatctgctggacttcggatggattgggcagtcggctggggtcctgactcatcagctgttcacggatctcctcaggcaactggctgatctgctgccaggccatctcgccctgaatggggccgaagcatttgatcagccactcgtgaatcgcgttgtcgtccatgcgtatccttctttgccgcggtgtgttaccccaagtgtagggtctgcccgggcctgttcgctcgtggccgagcaatattttcggtttatgttcgttttcggctgatttcggccctccgcttacactgtagggtatgtttgcacgccacaggaatcaggaaccagacttcgtccaggagcagaagagcccgactgcggattcggaagcgggggatgggcgcatgccatcgttcgaagtgaagcatgattcgcgcctatctcgtggaatcagccgtgctcgggcctatgcggccgctcgtccgaaacgccatttcgtcggtgcattcgccgtgttgcttggtgtggtgattctgctgctgcccagcccatacgtcatcgagatgcccggacccacccaggacgtgctgggcaaggtcgaggatggtgcggttatcgacatcaccggtaccggcgtgacgacgtataaggattccggcaagctgctgctgaccacggtgaacgcgtccggcgtgcccgggtacccgatcatcaacgcgcaggccgtctggggttgggccaatccgcaggtggaggtcatgccgcgtgaggccacggtaccggtgggccagagtgcggaccagtatcagaagaaagtcgaacaggacatggccggttcccaggattcggccagtgccgtcggtctggcgcatgccaaagcccatgcggacgaactgggcattgacgccagtacattgcaacacgccaaggtgacgatgcacgtggacagcatcggcggaccgtccgcaggcatgatgtacacgctcggtctcatcgacaaactcacccccgccaacgagagcggcggcaagaccatcgccggcaccggcaccatagacaaggacggcaaagtcggcagaatcggcggcatagcgctgaagatgcttggcgccaagcgcgatggcgccacatggttcctggctcccgcatcgaattgttcggatttggccggccgcgtgccggatggtctgcgcgacgtcaaggtcgccacgctggacgaggcgtatcaggcgttggtggccatcggcaaggggcaggccgacgatttgcctcattgcgaggcatgacacgcgcggccagtcgttgtttctggtgagacgactcgcatgggtctgcccacaatgcggcgattttcggccgcgttaacgcatttgttcgcgaagacttgctaatgtgtcccctgtgaatcaaacggcatcacagaacgctgaagaatttggtttcgagcccggcgatatcgtccaggagtggctctgggacgacgatgtggacgattccattcgtgcccagattgaagagctcacgggcgaggatctcgtggacgaggactacgactccgctgtggacggcgtcatcgtatggtggcgcgacggcgatgatgaggacgaattgtccgatacgatcgttgacgcctacgcggtactgggcaatgacggcccgctgtggatactgactcccaagcccggccgcccgggtgccgccagctcctccaccgtgcagtccgccgcacagaccgccggtatgaacgccgccaccccgctgaccgtcagctcggactggaacggcatccgcctgcgcgcattcggcaggggccgctgataagcctcaatcaatacgcttgactttaagcgtgttgactggcgtcgcgtgctgcgtagtgctgctgggcgtgactgaatgtcatcgcgattgagcgctacggcacgcgtatgcgacaccacgtgtcgcgcagtgccggccatacgctattgttgtcatttgcgggcaattagctcagttggttagagcgccacctttacacggtggatgtcgggggttcgagtccctcattgcccactttcatttttcatcacttcgtgcaatcccctcattccacagacatgggctgtgacgatattccctgacagtcttcggcaaggggttctgaaatctcagtgagatgcgcgcagaaggaaaccggcagtactgctacaaaatcgtgaatttcggtcttcttggtcagatgcgtctcaatagtcacgtaaagttgtggcagagtgtttatatccagcaggaggtcgaatagccgatggcgcaggaacttcgtgaaggggacggcaagtcgggcatcgcacgtgcgggcaagcgcaagtgggggtatgaccccgctcaggtggacgctttcttggagcgcgcccatgctctgtatgacagcgagggcatgaatctcacccagcatgacattcagaacgcgtcctttgatttgcgcaagaacggctatgtgatcgcacaggttgacgccgcgcttggacgtctggaacgtgccgtggtcgataagcagaccacatgggagatcgcacagcacgggcgtgtgacgtggaaggcgaagaccgagaagctgtatcacgaagtccagaaccatgcggagcgtgacgagcgcgaacgcttcaagtccggagcgcccaagcagccttcgtacgataagaagcaggtggatcgtctggtcgaccagattgtggacaaggcggcggccgcattgggcgttgacggcgtgaccgaagacgatgtacggtctttggccgatctcaatgcgaatacggtcaacaatgtgatcttcacccagcgcaagggcaagaaaggctatgacgagcgacaggtcgattacttcctgaacgcctgcgtgcagttgctgagtcgcttggaatcctatgcacgtgtggccgatttcgtgtccggcgagcccacggctcctgcccagaccgccacgaacgtgaccgttcaagcgaacggcgtctcgccattgttcgcttccggaacgcagcgcccggcaactgacgaacgttttgcgccgtctgccgctgctcatgacgaatcattcgatgccctgcatcaggccgagcagagcttgttcactgctccggctccggttgctcccgcggcgccggccgcggcggcaccgatcgcctatgcgccggctcctgcatcgttcgatgcttccacaagcaccaataacaccaatgcggaacagccggtttcctttgctcccgcagcatacccggtgcatacgtccaacgagtctgcggcgaagcccgtctccgagacgccttccgtggctcctaccgcagctgttgcggctgagcctcccgccagtgccccgtccgcaccggtttccggtgtgaccgctggcagcgccccctcgtttgctccggcacagtcgtcatacgaatccgcagctccgtcatcgaccccgtcggtgttcgcggaacagcccgtggatatggtgcaggacggttcctctctggccgctctcgcccacatggctgcggtttctcaggaacttccggcggtggatgcgccgtccttcgctcccaagatgcccagccttgatacaccgaatgcgctgaaattgaatgaggtaccgggttcggtttcatccccggcgccctccgccccggcagcgcaacctgtgaatagcactgccgacgaggctgcgtccgctgccatgccggtctcctttgctcccaccagcaagccggatcgtaacacgaactccattccggttcgcgtatccgatagtcagcctgcagacagcacggtctcccgtccggctgtggaatcatctgaatacgttgccgcctcccacgacacggaagcagctcagccgtcacaggataagcacgattccaacgattcgttcccgctgctgttcccgcttggcggtaacttcgattcggatatccccgacctgtcgttccccacactgaacaatgacgatacgaagaaggaaaagtgagcatagcctccaactccaccgtcatcattctcggatccaccggatccatcggcacccaaggacttgacgtcatctcgcgtcaccctgaacgatttaccgtcaccggtctggcggcgggcggagcacatatcgagctgctggcgcaacaggccgcacagttccatgtgcccgaagtcgcggtgtttgatgagaccaaggttccagcactgcaagcggctctcgcacaggccggcgcacaaggtgtccgcgtgaccggcggtccggattcggtcatcgccatggccggatccggtgcgaatgtcgtattgaacggcatcaccggctcgatcggcctcgaaccatcgatcgcggcgctcaaggccggttcccagctggcattggctaacaaggagtccgtagtcgcgggcggtcatctgctgttcagcgcgcaagtgcgcgagaaccagatcaacccggtcgattccgagcattccgccatctggcaatccctgcgctccggaacccacgccgaagtcgccaagcttgtggtcaccgcctccggcggcccattccgcggctggaaacgtgtcgacatggagaacatcactcccgagcaggcgctgcatcatccgacgtggaacatggggccggttgtcaccatcaactcctccacactgatgaacaagggcctcgaagtcatcgaggcgtcccgcttgttcaatgtgtcgcctgaacgcatcgacgtgaccgtgcacccgcagtccatcgtccattccatggtcgaatttgtggacggcgccacgatttgccaggcttcgccgccagacatgcgtctgcctatcgcgctgggcctgtccgcgccggaccgcatgaccaatgtggccgccgcgtgcgactggacgcaagccgcaacttggacctttgagccgttggacgatgaggcgttccccgccgtgcaactggcccgccactgcctggccgcctccgagaagcatacggcggtgctcaatgcagccaatgaacaggccgtgcatgcgtttcttgatcatcggctgccgtacctcggcatcgtggacacggtcaaagccgtgctggaccagatggacgccgagcttcgtggtaacccgctgttcacggacgtggaggaaatgaaccagcttgagcttgaagcccgccgacgcgccgacaacctgataaacaagcaatgatgaataccttgaatacggaaaatcccatcgaaaagccgttccgcaaaaccggtgatccggtcgacctgaccagcgaatcgcccttgcacccgcgccgcaagtcccgccgcatcatggtgggcccggtgccggtgggcgggggagcgcccatctccgtgcagtcgatgaccaacacgctcacggccaacgtacctgccacgttgcagcagatcgccgaactgaccgccgccggctgcgacatcgtgcgcgtggccgtgccgagtcaggacgatgccgacgcactgccggaaatctgccgcaaatcgccgattccggtcatcgccgatatccacttccagtccaaatacgtgttccaagccatcgacgccggctgcgcggccgtgcgtgtgaaccccggcaacatccgtaagttcgacgaagtcggcccggacatctgcaaggccgccaccgacgcgggcatctcgctgcgtatcggcgtgaacgccggctcgctggacaaggaactctacgccaaatacggtggcccgactccggaagcgctggtggcctccgccttgaaggaagcgcacatgttcgaggacgtcggcttccatgatttcaagatctccgtcaaacaccatgacgtcatcaccatggtcgaaacgtaccgactgctcgcatccaagggcgattggccgttgcacctcggcgttaccgaggccggccccgcctggcaaggcaccatcaaatcctgcctggcgttcggtgcgctcttggccgagggcattggcgacacgattcgcgtgtccctttccgcgccgccggtcgaagaggtcaaggtggggtgcaaactcctggaatacatgggattgcgcccccgcaagttcgacatcatctcctgcccgagctgcggccgcgcccaagtggatgtgatccagctcgcatccgccgtcaccgaaggcctgaaggacgtgaccgcgccgatccgtgtagccgtcatgggctgcatcgtcaacggtccgggcgaggcacgcgaagccgacctcggcgtggcctccggcaatggcaagggccagatcttcatcaagggcaaggtcatcaagaccgtgcccgaagaccagatcgtcgacacgctgctcaccatagcgaacgatatcgccgcccaaatggaggccgacggccaagtgcccgtcaattccaccggcccggtcgtggtcccaatccagcatcccggtcactgattcggccgaataggccctcggcgtaaatatcgcggtcagattacaatagcgcacgtgtcgcaagaagaagagcatcgcctgactgttcgatccaagccgtggaccagcacccaccggctgatggtcagcctgcccatcttcattatcctgatcggcgtgctggtctccatttccaacctgaccacggtgccttggaacatcgaacccaccggccagtcgatggccacgctcaccgacgataccgaagtcaccttcgataacccgtccggagaaacgctgccggcgaaaggcacgtatgaggtcaccgagcgatacatcacgctgaacatgaccagcgacggcaatctgaccaaggagcctggtgatcggggcaaggccaatgcggacggcgtccaagccatcaaggtattgattcgggaacctcagaacgcatcaggcaagcgccccggcgtggtgttcatgcacggtgccggatacggcacctgtgacaactcctttggcgatgtggcctccgatatggcttcggccggctttgtgaccgcagtgctcgacaaacccgtctggagcaccaccgacatcaaccgcgattatccggcctcagccaaggcatatgatcaggtcatcgaatacctacgagcccaaagcgatgtagacgccgccaaggtcggcatctatgccacctccgaatcgacatggatctcctcatatctgctcgaggacgatccggacgtcgccttccagattcttctgagcccgatggtgttcagcccacgccaatcactgggatttttcgtcacccaggacttcactcttgtcggcgcgaacgagggctatcgatccatcgtccaacgcgtgttcagcgcggacaccggcctgttcggactgaacaattccgacctcgccacgctcaaacccgccgcttacgccgtacccacctatgtggcttacggttcaaaagacgtgatgacggcgcaggtcgacggcgtgcgtgcgattctctacaacgcccacaaagccgataactggaacgtgaccgtgcgcagctatccggtcgccaaccatgtgctgcgtttgggggatgagtccgaagcgggcaccccgtttgcggacgcctatgtggacgatctcatcgattgggccgtcggcacttccgccggactcacgcagaccagcgaaaaggtggccggcaccaatctgtaccaatcaatcggtctgccgggcgctttgaaggcaagacgcgtcggcaccatatatggtgtgatcctgcacgtcacggtggtactgctgctgctcgcatccatcgtgctggcactggtggcgctgggccgcaaaatcgcggcggatgcccgatggcggcgcgagaaacgcgaggccaaacgtgcgggcatgctgataccggaacggcctgtgatactcggtttcgcacatggtttcggcaacgcgctgctgactttgaccctcaccactcttgccacactgctcatcttctttgccggacttggacaggtgattatgggtgtggtcaaacttgcatggggcagcgctcctaccgagacgccgggcgtcatgtattggagctggccggtcatccaagtggtgtccgtgctggtgctatgggcttggtcccgcgtctttatgcatctgatagaggtcgcttccgcccgcggactgattcagataccccctcgtcgtgaatccgttcgagacatcgtcaccggtgccgacccggtactcgcctccacccgtctgggccgagtcctgttctggctggtggccttcaccatgctgtacatactgttggtgttcgccttctggggcctgtttatttactgactacttcattgagtagagtctgccgggcgtcgcggggaaaggagatgagatgtcgctgtaccgagacgaaggtgtggtgttgcgcacctccaaactgggcgaagccgatcgtatcatcaccatcctgacgcgtgagcatggcaagattcgggcggtcgccaaaggcgtgcgtcgcaccaaatcacgctttggtgccaggctcgagccgttcatgcgagtcgatgtgcttatcgctgaaggccgctcgcttgacgtggtctcccaggctgaagcggtcgccgcttacggtgctccgatcgcggcggattatgcggcgtatgaggccgccaacgtcatcgtcgagaccatcgataaactcgccagcaccgaacacgagcagctgacgaaccaatatcggctgctcatcggcgcgttgaacgcgctcgccaaacaatcccacgccccgcaagccataggcgactcctatgtgatgcgcgccttggccttggccggttggacgccacgattgggtacttgcgtggtatgcggcaaggcggagccggcgtacctgtccatcgcgtccggcggcgtgatgtgcgaagccgaccacactaccgatgcgcgccgtatcgcgccgttcgtgttaaaccagttcgatgcactgattcgtggcgattggtcggtgcttgatgccgcgcctgtggagcgggttgtgcaggagttggttgaagattggggggagtattacctcgaacgcccgattcgttcgctgcgcttgatagattcatgagtatggcttttgagaacgttgattacacgtcgttggacattcccgcagctccgttcagcgaccctgcccgtattcccgacttccccaagaacaaggtaccccgccatatcggtgtgattatggacggtaatggtcgttgggccaagcagcgcggcatggtccgcaccaatggtcatcaggccgccgaaccggtggtgttcgacactatcgccggtgccatcgaagccggtgtgcggtatttgagcctgtacacgttctccactgaaaactggaagcgttcgccccaggaagtgcgcttcctcatgggcttctcgcgtgaaatcatccaccgccgcgtggaacagatggacgagtggggtgtgcgcgtgcgttggtccggccgtcgccccaagctgtggaagtcggtgatcgacgagcttgaggccgccgaggaacgtaccaagaacaacaaggtcatcgatgtggtgttctgcatcaactatggtggccgtgctgaaatcgccgacgcctgcgccgccatcgctcgcgaagtgcgtgatggcaagatttccggcgaccgtgtgactgaaaagatgattgccgaccatctgtacaatccggacgttcccgattgcgacttggtgatccgtacttccggcgaacagcgcacctccaacttcctgccgtgggaggccgcctacgccgagctcgacttcgtgcccgaactcttcccggactgcggccgtgacgtgctatggcgctccatcgaccattacatccaccgcgatcgccgatttggcggcgtgaaataaagaacagtccggtggactgttcgttcacgccgcctggccgaggccgataggacatgaccaggtaatgatgagtccggcgaagccggtccttgattgctggggtgtgaaatagtccttgttaagcccctcaaaattgagggggctgagccgtaaaacaaacagcccgatgggctgtttgtaggcgaaggcgagacgagagtcgagccagaagaatgcgagcggcagcttgtccgtaattgcggtcgagctgtccgtgtagcggactgaggggagttaccggcacacctcagccatcctctctgcaaactcatccaaaaaacgtcccgaatccgcaccaagtgccacatgcacatgcggcatggaatgattcaccagcccaaccgggtctccggtggtccggcctcgtactccattgaaatcaccggtattggtctccgcgcgcaacgcaagatcaaaacaatcgaccagtgaagaatcaagtgcaaccgccgccgccaacggatcatgcaacggcatgccgccagagaacagtgcggggtcggcttccaaatttgccttgatggaaaagtccgcgagatcagccaagaaccgcccgcgcttggtccccgtcgcacgccactggtcggccgccgatcgcggtagcaaacactggtgagtcacatcaagtcccaccattgtgatgtctgcgccggaatgaaatacacgattcgcggcctcagggtcttggatgatattcgtctcggccaccgcatcccaacaattgccgggttgggtaagcgtaccgcccatcatcaccagcctgagtttcggtgcaatatccggtgcccgagtaatagccgcatccacatccgtcaacggcccggtagccagcacggtaacgtctcggccaaactcacgaacctgctcaatcagatactcaatcccatccgcagcatcaacggagcgcctccttttgccccagctggcgagagctgtcgatgtagccgactggggacggtccacaggccgagagcgacccacacgagaacaagaccccgacgccggatgagcatgagcgtcccctaccaaatacccgccaacagaaacaaccccatcgggcacatcctcagacatgtcatccccagacatatcatcaccaggcacaccagctccatcagccagagccccggcccctgccagccaagtattccccagtccatccttcccatgaaactgggcacaccctgcatcgggaataaacgcatcagcccaagaaggatgctcggagcccaaaaacaccggaatatccgcccggccaaacaaatcaagcaccgcgcaagtattggcataagccgtgttcgcatccacattgccataactggcgatcacaccgctcagctcgcactcatccgccgaccccaacaaatacgccaacgccaacgcatcatcaacaccggtatccatgctggcaataatgcggtcaggacgttgggccatggaatcgcctccttgttagcatgattcgctatgaataaccttatcggccgatacgcaaaaatgcgtcctttcctcatgggaaggacgcatttttgcgtagattcaaactcggaatatcggaaattacttgccgaggaattcgtcggtgccaaggtccttggcctgcggggcctcatgaatcaccttgtcatgactgtcggtgtaggcgtcttcttcagccaggaagtcgaagtattcctgagtgcccttgaagtcgttggtgccgagcacgaaagagccgtccttgatcttggccggatcgccccagtactggccgtcgacgataacctgcatgctcttcttgacgaattcgggcttgaggttggcgtcaggggcttcgtccacgagaatctgcgcggcgtcatccgggttggcgtacgcgtactcgtaacccttctgagtggcctgagtgaacttcttgaccaggtcgggattgttcttgatggtcttgtcattggtgatgatgccgatggcgtcggcgttgccgggcacgccgtagtcaggctcggtgaagcagttgagcttcgggccgtacatgtcggcctgcacgccttcccacgtggcgtagaagccgccgaaatcggccttgccggattccatggtctggaaggtggaggtgccgacggtcaccttgtcgaactcgcccttgccgccgtcggtctggatcatgcggcgcaccacggcgtcggactcgttggagccgaaggtggcgaaggtcttgccatccaaatccttaggggacttgatggcggtgttggacgccagtgcgcaccaaatggcgctcggcttctgctgcacctgcagcacctgcttgatgtgagcacccttcagcgtgtagatgcccacattggtcaagttggacagggcgaagtcggccacaccgttgttcacggcctgttcggcaccggcctgggccacggccacgatatccacgtcaagaccggcgtccttgaagtagcccttgttcttggccacgtacacgccgatgtggttggtatcgggcgcccaggaaagcatgaaagtgaccttcttgaggtcggaggtgttggagttggaggagtcggcggtgttggtctgaccacatgcggcgaaaccgaaagtcatagcaagggcgcccacgagggcagcggccttggatacaaggcttttcttcataatgatggttccctaattcgttgtctctctatcgttctctgggattgcttcgaacggaagtcggcagaaaacgatatggagggccttgatttccgttcgaccagcgcccccgacattccctatgaaagctcaagaaagccggtttgccacacgctggtaaagctgttccattatagagacagggctggagacctcatgagaagccgccccgttcagtcggttctggccgccggcttgtgtctttgacggtaaaaagaactactggtccgcgtcggggtcttcgtcatcgccggccgggccgagcaggatgcgctcgctggcgttcaccgccagcatcagtacgcatgtcatcaggataatgacgatggtggcggagaagatcagcggcgtgcggaacgaattgtaggcagcctgcagccagatgccgaggcccttgcgcgcgccaagatattcagcggtggatgccgtggcgaagatgtatgcggcagatacgcggataccgccatagatctgacgtgcggcaacgcgcagcttcacgtgccagagcgtccagaccggggtcgcgccgcaggtcaatgcgacgtcggaatagaactggggcaccgcttctagtccgcgcacggtctgcacggcgatggggaagaggccgaataccgccacgattacgattttgccggaaatctcaaagccgaaccaaatcaggaacaacggggcgatggaaatcagcggcatggtttgtgcggcggcaagcagcggatagaacgccgcgttgaacgtgtgcgagcagtacagtgcgatgccgatcataatgccgaagaacacggcgaacaggaagccgaccacgccctcatagccggtgatcgccgcggccgggccgagcgtgttccacgtttcgatggtggcggcgaaaatctcgcttggcgcggagatcatcgtgggggagacatgtcctagatccacccacgtttcccagactgccagcaatacgatgacggcgatgacggtgggcatgcggcgcttgaggcgcttggcgatggacatgggatgtcaccttgctttccgcgccagtccggtttgctggtggcgcttgcggccggggcgtggaacagtaaggtgaggagcctgcgcgcctgccggtcgtgtgatggattgtgttatatgccgtccatcagtataggcgaaggcgaacgacaggggcacacaaaaaacctccctctgtgagggaggtgagagagctactccagtccgatggacttcatgtggtggagcttcagggaatccaccttgagactaccggactcggcggcgagcttgatggcgcgcgggccttcggaggcgtaggagtaggagctcagcacctggtggccaccgttgacgtagacctccacggagccgcgatccacgaacacgcgcaggtccagcttgccggaggccagttcggcgtcggtcagtggggcggcgcggtagccgtgatcgccgttggccatggcctggcgatccaccaccacgcggccgatctggtcgtcataagccacgtaggtgtaggcaccgtccttagtggcatgaatcttcaggcccgcacgctcggcagtggaggcggccaagtcgatggtcatttcgatttccacggcctcggcgtcatcggcgatgacctgctcgccatccatatcgagtgtgatcgaaccatggtcgagggtatcctcgcgcaggccttccatttcggcgaccggcgcggtgaccacgtcgccgtcatcgtcaagggtgatctcgcgcggcagggtgagctgaccacaccagccgtcatcctccatgggaatcggctgcacgaacgggctcatccagccatagacgatctgacggccgtccacgttgaaggactgtggggcgtagtagttgtggccgcaatcccacaggcggaactcggtttccggcttgaattcgccgcccggctcccacgtgccgatcatgtagccggcgttgttgacgttgcggttcatgaagccgctgggcttggaccccatggcggagaagccaatgacccacttctcgttgccgtccttgtctttgatggggaagaagtcggggcattcgagcatgaacacatccggatccgggtgctggaagagcacgcgctcgtattcccagcggaccatgtccttggaggagaacagccacatctggccgcgcttgtccgcagaggagacaccgaaggtcatgtaccaggtgtcgccggtcttccagaccttcgggtcgcggtagtggtgatccaccttgtcggtcgggcagtcgatgatcatgccctgcttggtggcggaggtgagctcgtcattgtccggcagcgcggtcatctgcacctgccagtcgccgccggtgttgtcgtggccgttggcccaacggtggccggtgtagtagaacttgagcttgccatcgtcgccgattactgcggaaccggagaatacgccgtccttctcctcttcaagggtcggggcgaacatgattggttcacgcttccagttgagcatgtcggtggaggagacgtgtccccagtgcatcggaccccactgggtgccgtacgggtgcagctggtagaacacgtgccagcggcccttatagaagcacaggccgttcggatcgttgatccaa

SEQ ID NO: 1261 - DNA, 25754 bp, Unknown
  R157_18m  MAG No. k141_269
aatgacaagggagagatgagatgaacgaatatatagagtcttgccatcgggagaaacacacatacgacgaggaaggcgtgcgcgaggccgtacgtctgttcctgaagtcgattggcgaggatcccgagcgcgaggggctggtggaaacacctgaccgtatcgcccgcgcgtgccgcgagctgttcgccggtctgcaggcctcgccggccgatgtgctggagaagcacttcgacgtggataccgacgaactggtgctggtcaaggacatcgaactgtattcggtgtgcgagcatcacctgctgccgttccacggcgtggcccatgtgggctatattcccgccaaggacggggtgatggggctgagcaagctcgcccgactggtcgaggtgtatgctcgccggccgcaggtgcaggagcgtttgacccagcagatcgccgacgcgctggtcgagtatgcgggcgcacgtggtgtgattgtggtgaccgaatgcgagcacctgtgcatgtctatgcgcggcatcaagaagtcttccgcccgcacggtgacctctgcggtgcgcggcatgctgcgcaatccggccacccgagccgaagccatgagcctcattttggataaatagtgtctactaagctccctcatcatagggagctcacttgggacctacatagaaggggaaacataatgactgatttgcaggcgttgcatgacagtacgcacaccatggtgatgggtgtgctcaacatcaccgaggattcggtctcggacggcggcctgtggctggacccggccaaggcggcccagcacgggcgcgacatgatggccgccggcgcggacatcatcgacatcggcgccgaatccacgcgccccggcgccaagcgcgtgtccgaggccgacgaactggcccgcatcaccggtgccgtcaagacattgattccggccggtgccatattgtccatcgacaccacgcgcgcatccgtggccgccgctgcgctgagcgagggcgcccagatcatcaacgacgtctccggtggcacgctggatgccgaactgccgcacgtggtcgccgaccacgactgcctgtacatcgtgcagcattggcgcggttggctcgccggctccaagggcgcgaaccccgatcaagacacctccgtctacgagcacggtgtattgaccgacgtacacgacgaactcatgcgccaagtcgacggtgtgctggccgccggcgtaaagcctgagcgcattatcatcgacccgggcctgggcttctccaagcctggcatcgagcacaacctgccgctgctgaccggactcgagaccttccgcgccactggatatccggtgctgatcggccagtcccgcaaacgcttcatctcggcgatgcttaacgaggcgggcgctgccggtgctgatgggccgatcatggcccagcgcgatgacgtgaccgcagccttgtccgccctgtccgccgaacatggcgcatgggccgtgcgcgtacacgacgtggccaaaagccgcgccgccgtcatcgccggcaacacctggcgcgaatacgcatgattcccctggctccctgttttggttgcttctaggccttggctcccctcgggcgaggggagctggcgccgaaggcgactgaggggagcatttgagcagaaagccttaccaatggacaccatcacacttaccggcgtacatgccaacggcacccacggtgtgctcgccttcgaacacgaacggccacaaaccttcgtcgtggatgtcaccctgcaccttgatctggccgcagccggtcaatccgacgatctcaacgacaccatcgattacggccgtgtggccaaggacatcacggctgtcatcgaaggccctcatgtggacctgatcgagcgtctggcccaacgtatcgcggataagatccttgccgatgcgccggccgtcgcctccatcgacgtcaccgtgcacaagcctcacgcacccatcgtcgtggcttttgcagatgtatcggtctccatctcgcgcgtgcgtgccaccgataatggacgtactgctgaagagcatgccatccataacgcggtggtggccttgggcggcaatgtgggcgaggtggaatccaccttgcgagccgccgttcgggagattgacgcgttgctcggcacacaggtgaccggtatctcaccgctttaccgcacggccgcgtggggcatggccgacggtacgccggatttcctgaacgccgtggtggagcttgaaaccacaatgggcagccacgaattgcttgccgcgttgcaaaacatcgaggcgaaccatggacgaattcgtgagaatcattgggattccaggccgttggacttggacattatcgactttgatggcatcaccagcgcggatccggatctggcattgccccatccgcgtgcttggcagcgtgcgtttgtgctggctccttggttggcattgaatccgaacgccaaactcgccggagcccatgaggggcctgtagccgatttgctggccgccgcaccggaccgtaacgccgtgcagctcgagagcgaagactggatgctcggcgggcatgcagccaagcaaaaatcagcgtcggagtcggcacccgtctcacgcaaggcgattatttcgctggattccacctcgcaggatgccgaacggctgttccgcgaaaccatcgtttccatcgacagtgttcctggcaatcaggtacagggcatctcgccgctctaccatgtcagccatttcgacggcccggacgcgatgagcgcggtcatccaaatcgaaaccaagttgccgcccgccgacctgattgccgtattgggcagcatcgaaagtgttcatgatctggcagtcgaccttgaccttgtcgacatggaaggcgtgacttccgacgagcccaactgcagcattccttggccgtcggcccgtaaccatgcgtcggtattggcaccttggctggatatggacccgaatgcttctctgggcggcgacccggtggccttccttttggccatggcaccggatgccggacaggtcggattgctatcggacaactggatactgtcgaacagttgagctgatggcagaaccagttacgaacggtaggctagaaaccagacggtgacggaccagtctccggcctcgaacagccgggcacggcagtgacgaaaaccaaatcaagatgaacagcccaggcgcgagggccgttcgcaaacagcaaacagcaacgcaacgataaggaggccggacatgaaaacacggcgaacaccatggtggcagtatgtgatcggtgccgtgctgggcctgttggcgggtatcggtctggcctcctacggcgaaagctcgggactgtcgctgattggtgcgccttggattgtgaccggattgctggccgtgctgggcgttatcgtgctgatcttggccctgcaagtgcataaatacgcgaataccgaccccaagaagcgtccgcatagcttcatcaatcccactatcgcggtgtatacgctggtgctggcaaaggcactgggattggcgggcgcaacgctcgccggctggtatggcggtcagattgtgatgagcctgagccatatcgaggcggatttctatgcacacgccgtcaccgagtgcgcaatcgtggccgtggtgtgcatcgccgacatgatcatcggcattatcggcgaatggttgtgccagctaccgccgaacgaaggccccgaaaacccgaaaatcaaggaagccaagcgccgtagcgacatagcccaggcctacagaagataatccgtgataagccccctctgacgagggggccgtaggcgtagccgactgggggagagaagaaaaaaccacaccatcggccaagccgattcccactattcctgcggcacgcgaaccatagcttcctgagcgatggccgccaccaagtcgccattctgcgcatacactttggcgatgccgagtccgcgtccgtgcgcggcgataggcgtatcctgcacatataaatgccattcgttgatatcgatatcctgataccaccacatcgaatggtcgatggacgcataggaaatgcccggtgtggaaatcgacagtccggcgcggcgcagcaccggctccatcatcacctgatcgcagccgagtgccagcatcgcacgatgcatgacctgcggcacatcgacgtggccatcggccttcatccacaccatctgcttgccggaatcatgctcggcggaatcctcgtctgcgcgcagcatcacggtcggcgtcacgtggcggatatcgaatggcgatttctcgacatagaaattggcgaacggcgacttttcggcgaacggctgcatgagttccttggcggaagtcaacgtttcgggatcgggcaggttttccggcatcggatcggcaaattccacaccctcctgaccggtctcctggaaggaggcgatggccgtgagaatcgacccctcggcttgggtgacgttgacccgacgagcggagaacgagcggccgtcgcgaaggttctcgacgtcaaacagcaggtcttgacgaatatcgccggcggcaatgaaatagccatgcaccgaatgcggcaggcgtgaagggcccacggttttggacgcggcgatcaccgactgggcgatgacctggccaccgtagacgcggccagtggggaagtacatactctcgccattgatgtatgtgtgattgcggtaagcggaaggctcgcccaacttcagcaccttcaccagatggtccaatggagttacggtggttgcctgagccatggcgttcctcgattcctgttctgctgtgtccgatattcggttatcgtattccaacctatggttggcagtctatccggtgggggttaagagttccgggagcgaaatgtaacgagactgtttggaaggtaaacggttggttatgcggtgcgttgccgctacgttgctgctgcactgccggtgtgttgccggtgcgttgccgtaggtgactgtgggattttatgggatgcggggcggggcagtcatgggggcaattatgggaaagccgcccctgagggacggctttcgacgtataaagcgcgttgtggcactaatgccggcgtatctcagccgcgcacaagcttcttgtgcaggcggtgcgggcgggccgcatcctcaccgagtcgggccaccttgttctcctggtaggcctggaagttgccttcgaaccagtaccacttggccgggttgtcgtcgtcgccttcccacgcgaggatatgcgtggcgacgcggtcgaggaaccaacggtcgtgggagatcaccacagcgcagcccgggaactcgagcagcgcgttttcgagggattccagggtctcgacgtccagatcgttggtgggctcgtcgagcagcagcaggttgccgccctgcttcagggtcagggccaggttcagacggttgcgctcaccaccggacagcacgccggtcagcttctgctggtcggcgcccttgaagccgaagctggccacgtaggcgcgggtcggcacttccacgccggccacctcgatgaagtcgaggccgccggacacggcttcccacaggttcttgttcgggtccaggccttcacggttctggtccacgtagctgatcttgacggtgtcgccgatcttcagctcgccgctggtcagcggttccaggcccacgatggtcttgaacagcgtggacttacccacgccgttcgggccgatcacgccgacgatgccgttgcgcggcagcgtgaaggacaggtcgtcgatgagcacgcgatcgccgaaagccttgtggatatggttggcttccagcacggtggagcccaggcgcgggccggccggaatctgaatctcggagaagtcgagcttcttgttgttgcgtgcctcgttctccatctggtcgtaacgttccagacgggccttgttcttggcctgacgggccttgggggaggagcgcacccagtcgagctcgttcttcagtcgcttggcgagcttggcgtccttggctccctggatctccagacgcttggccttggtctccaagtaggtggagtagttgcccttgtacgggtacaggtggccgcggtcgacctcgcaaatccattcggccacattgtccatgaagtaacgatcgtgggtgacggcgatgacggcacccttgtactggtgcaggaactgttccagccacaggatggactcggcgtccaggtggttggtgggctcgtcgagcagcagcaggtccggggcctcaagcagcagcttgcacagggccacacggcggcgctcgccaccggagcacacgttgaccggggtgtccggatcggggcactgcagggcgtccatcgcctgctcaagctgggagtcgaggtcccagccgtcggcggcgtcgatctcggtctgcagcttgcccatctcttccatcagggcgtcgaagtcggcgtccgggttggccatttcttcaccgatctcgttgaatcgggcgaccttctcggcaatcgggccgaacgccatcttgatgttctcgcccacggtcttggtgtcatccagcggcggctcctgctgcaggatgccgaccgtgaagcccggggtcagcgtggcctcgccgttgctcacggtctccaggccggccatgatcttcagcagggtggacttacccatgccgttcgggcccacgacgccgatcttcgcgccgggcaggaagctcagggtcacgtcatcgagaatcacgcggtcgccgtaagacttgcgggccttgatcatctgaaatacgaattctgccatatgttaccttatcgttcaagaaacgctgattttccaacgttttgcgggacccggaccccgcaatgacaccaatggaaaacgacgcgaccgtttacgggggtgtcccggacggcccgttgtgcgtcattcgctgttgtggttgtcccgtgtcatcgccggcgccttgatcctacgcaaaagcaccttgtggattatcccatatcccatcgtcatgccgcaacagtggattgacgaggtgcggggcaggttgcatattgcggtgatcggtttgtagcgcatggcgcaggtgctttcgatcgcggaacacgccgatgctttgagcattgcatagaaagtattcgtctgatataaaataattatcgtaaaacgataaaaaattatcaaataataaatattttcattattgtcaaaggaagtgataacgatgaaggcaacgaagcttaacgcggcggtcaaggtcatcgcgaagattgtggaagtgatgctctggatcgcaacggcggtgtatgcgggcatgctggtcgccctggtcgttgccggtgctccgctggtgcggtgggttcaggaaggcttggattccgggaatctgtttatcgttggggacccgaatctgctgcctgtggcatcggatgccactgtgctcgcccgtggtttcgctgtcgccgcaatcgccatggtggcgatgcttgggatgatggctgtggtgttcagaaacatccatctgatcttcagtaccagcgaaaccgaatctcccttcaccaaggccaacgtgcaacgcgtccgccgcatcggcgaactatccatcatcgcccccatcatcaacgccattttcatggttgtcgtcgatctcgtggtggggagccgcaaggtggaattcttcgtgaatatgcagccgatcgccttcggtctcgtcgtgctgtgcctggcgcaattcttcgcatacggcgccgagcttgagcatgacgtcgacggcctgctctgatgattgcgcgattcagggaaggttgatatgggcaaaattgttctggaactggatgtgatgatggcgaagcggcacatctcactgggcgatctcgccgagcaggtcggtatcactaacgtcaatttatccaagatcaaaaacaacaaggtcaacgcgattcggtttaccacgttggccaatatctgccaggccttggaatgcgagccgggcgacattctcaaatacgatcccgacgcaggggagtaggcgagatgtagctcgtgggttgtgccgctgggggcgattccgtccaattcctcacgcttggcattgccgatgtgttttgctgatcgtcgtgatgccgcgtccgagtaacgggacgagctgttgccttgtcgtccacaccgcgtcgctacggaatgtgatgggatgcgagggtgctcgtgtcggaactcggcagccgtgccctattcagtcgcgttgacggttctgaagagttgcggctcgtatcgttgaaggtcgtcgagtaggtagcgcgcgtcgagttgttcgatgctgtaggagccgtcggccacctgttggctgagttggctggaataatagagtttcatcgcatcggcggctgtcatgtcgtattggtcggctatcagcgcgatgagatcggattcgagatgctccttgcgtagcgtttcgagcttcgtcagggtttgtggcgtgatcgtcattgtttcacctcgtaggtctcgacgtatcgcagggctgcgattgaccggggtgtgaggaagcggtactggtcgtttcgttcgtagaaggcaagggcctgcagggtgcgttccatgtcccatagctcacgcatgtacatgtctatggccgcgtagaccttgtcatccgcaacgcctccgatgatgaggtcagttcccaggggaggctgcccgccccgacgacagttacatacgaatcgaacccgttcggcgtcgttctcgttgaaacgcagaatatggagattcgccgtttcgccgaattcgtacacgttgaccagcgctttgccatgcgagcgcaatgaacgtcgcaaggcccagcgttccgcctgcttcggataactggtggcgtagaaccccgagccgaaatcaaggttcttgcgtaagtggatggcgtcgggcttttcgattgtgacgtcggaaccgtggtacagcctcatatgcagattccccgctcgcgcacgtagtccgtcaggtcgttgacgaggtattcgctgccgagtgtgtgcagcatgtcgtagcaggggacaaggtagccgtcgatagcgttggccttatcgagaatgcgataggtgtcgggcacggacttgccccaatgctcggcgagccgatacagcataaacgtggagaaatcgatctggttgcgttcgagcttcgtcatgtctcgcctccttgcctcatcgaaagtgaatgaatcttccgtgatgtggaatgccgtcgcgtcggcatcacttacatcgattctagcaatgctgggtctcggattagcgtcggatgacgcaactttgacacaagccgattcgtagccgatgagtgacatgctgttgtgtcacgggacatgcgggaaaaacgttggaatagcaaggctcagtgactacgaactatctggtggataaactcagccatatgttaccttaccgttcaagaaacgctgattttccaacgttttgcgggacccggaccccgcaatgacaccaatggaaaacgacgcgaccgtttacgggggtgtcccggacgacccgttgtgcgtcattcgctgttgtggttgtcccgtgtcatcgccggcgccttggtcctacgcaaaagcaccttgtggattattccatatcccgtctacacgatgcaatggggttctggcgggcgggaattagcgattcggtcatcgggaggagacgtggaaggcggcggcgatgccgtcaatgccgacgccggtaaatgggcgctgggcatgccctgtttcctgagcgagagcccggccctgtatcgtctggcgatttgtcgatcgttgcgattcaggcgttctgccgggctttcatttcgaaatgacgcatctggaatagcgcggccgtctttggtgctcctctcttcagtgatccgccgaggttacgcccatggctgaacgcccggaatgtcccgcgaaatccggtgagacggtctaggccgcggatgtaccgtgaatggcgcataggcgtgtcggtcgccgcaatcatggcaatgagaggaaaccccgttatggatcatgcatcccgatctcagcatcagactcaggccgatgcgtcttcgatctcttcaacgaatccgacggcctcgtcgccgctgcccacccaggcgccgccgtggggcgcgctgtgggtgatggccctgggattggccatgatcgtgctcgacagctcgatcgtcaatgtctccatccccaccatcatcgacgacatcggcattaacctgaccgacgcccagtgggtcacctcgctctacaacatcgtgcttgccgcgttgttgctgcctttcggcaagttgggcgacgccagagggcgcaaactggtgtttcaagccggtaccgtgatcttcgtggcgagttcggcgctcgccgccgcctcgcagggtgcggggatgctgcttgccgcccgtgtgctgcagggcatcggaggcgcgatgatcatgccgaacaccctgtccacggtgtccgccctgttccgtggcaagtaccgcgccgcggcgttcggcgtctggggcgcggtgatgagttcggccgccgcgcttggtccgctgctcggtggcgtgttcaccgagaccttgggatggcgttggatcttcctggtgaacctgccgctgggcatcgcggtctttgtgtcggccatcttcctggtgccgcagaccggtgggaacgcctcggtcgccggtgccgcggatgccgcgcaggatgtccgatcccgtcgcgtcggtgtggatatcccgggcgtggtgttgtctgccctgacctcggccctgttggtgttcggtcttatcgaaggcgagacctacggttggtggaagcagacctcaacgcagttgaagctcggcgggttgagctggaatcgtgactggttgtcgccggtgccgatctgcctgatcgccggcgcgcttctgatggccgtcttcatcgtcttcgaatccgcgcggggcaaagccggtcggccggtcatgctggacatgaccctgtttcgcatcaggacgttctcgtggggtaatctggcggctgcggccatcgccgccggcgaattcgcgctggtgttcatgctgccgttgtatctcatcaacgcccgcgggctcaacacgctgcaggccggtgcgatgctggctgtgatgggcttggggtccatcgtcgcaggtgcgcaggcccatgtcatggccgccaggctcaccccggccggcgtgattcaactcggtcttgtgatcgagatcatcgccgtcgccctggtcgcggtccttatgcctgtggggttctctgtgtggtggcagcttgttcccatggccgcatacggtctgggtctgggcttcgcctccgcacagctgaccagcgtggtgctctccgaagtgccgatcatgcagtccggcgaagggtcggccacccagtccacggttcgacagctcggcaccgccgtcggttcggccatctccggcgcgtcgttggccatggccgtcaacggaacattgccggcgcggctcgaatccctcgggctgcccgccaaggtcggcgacggtctggcccaggcggtcagtggttcggcgggtggagtgatcggcgtgttccgcagcggtgatggaccggcggcccgattcggcgacgaggcgccgaagattgccgatgcgatgacttcagggttcgtcgaaggcggccagtggacgcttctggtcgccggcatcatgctgttcatcggtttgctggcctcggtggccgtgcgtcgtgccgcgttgtcgcacaacgtgcgttgacgcatgacggctactgtcttatggggagtgcggtcgtgcgcggtcgaacgatatggtccgcataccgtccaccacacctgcggtcggttcgccggtggaaggaacgatgtatcagacggcgtgtcgtaatccgatgatgctgtaacatatcctcttgtgcctcagcgaggcacgcacggccccgtagctcagttggttagagcgccgccctgtcacggcggaggtcaccggttcaagtccggccggggtcgccaccaaactcccgatgcatgtcgggagttttttgtttcctgccgttcttcgatgccatccgcaaggacggtgaaagtgattgcatccgattcgacacgccgtccgcaccgatgccggcgttaagggggcgcccgtttgcaacgggtgaaatgcatgaggaagcgcatcggtggaatgttcgcgacgcatgacgaaccacgtaaaaaccgcggtgggaggtcatggcggctcgctactattttcgctatctcgcatgttacgaaagtcttcaaggagtaagccatgaccacgctcgccattgatatcggaggaaccaagatcgccgccgccgtctgcgatgaaaatgacagcatcatccagcgctggcgcgtccccacgccgatggacgccgacgccatcaaccagcacatcgccgaggtgtaccgcgaggctgtggccgccgggcacaccgatatcgaggccgtcggcatctccgccgccggcaatgtgagcgcggatcgcaagacgctcaccttctccgccaacattccggcatggatcaactacgatctgtccgagcacgtcggcgcgctgatcgaccatgccgtgccggtcatcgtcgaaaacgacgccaactgcgccggatggggcgaattcgtgcacggcgccggccagggtagctccaacatggtcgcgctgaccgtgggcaccggcctcggcggtgccatcgtgatcaacggccagctctaccgcggctccttcggcatggccgccgagctcggccacctgccgatggtcccggacggcgaccactgcggctgcggcctgcgcggctgcgccgaacgttacacttcgggaacctcgctggagaacttcgccaagtccgccgtgcgccgtcgtcctcaggacgccaagcgtcttctggaactgtgcggcggcgacatcaccaaactggaggggccgatggtgtcccaagcggctcaggaaggtgacgtacttggcctgtatgcgttcggcaagatcggcgaatggctgggccgcaccatggccgccgtttccgccgtgcttgacccggacctgttcgtgatcggcggcggcgtggtggccgtgggcgacatcctgctggagccggcccgctacaactaccagcgtttcctggaaggcagcgcctaccgcggccatgccaagatcgtcgcggccactgcgggccaggatgccggtctgatcggcgcggccaacctggctctgcgctgacgatgtcgctccggcaacgggacgttagtctaatggtgagtcatggccggtgccatggctcactgccgcgctgatagtgcggtcgatgagtttccgctgcctgaccatggaatcgaattccgggttctcagcgatttcctcgtactcgtgttcggtggtcacgccggcgatttcggcgataatctcctcataggacgtttcgacggttcgatgcacgccggtgacgtgcccctgacgtatcacgacaatgcggtcggataccgcgaacacatccggcagatcgtggcagaccatcaccacggaccggccttcggagcgcagtctcttgatatatgcgagcacttctgccgactgcatcaccgacagtgcggcggtcggttcgtccagcagaataagctgcgggtcattgagcagcgtgcgtgctatggccacggtctggcgctggccgacggataaggatgcgataggggagccgacccgaatcgccgagctcagggtcttcagcacggaacgggcacgcgagttcatcgaatcgtcatcgcgtatgccaatctgattgatctccttgccgaggaacaggttcgaggccacgtccaggttgtcgcagaactcctgcccctggaacaccgatgcgatgcccatgcggtccgcctccctgatcgagggaatggtcacctgttcgccgttgagatagatatggccgaatcccggctgcagaaatcccgcgatgaccttgatcagagtggactttcctgcgccgttatcgcccacgatggcgacgacctcctggcgttggatggacagattcaccgatttcaacgcctcgacgaagccgaacttcacacagatgtcctccagccgcagcagaggaggtgtgctcgaattcctcatggtgtgttccttcttctcactcttctcctggtaccggtcactggctgacgtcattgcgaaccgagaactcgatggcgcataatgcgccgcctagcgcgcagttgtcgttcgggtgggatgacacgagtacatcgatgggtgccacggcatcagggaacagcatgcgctgcaacgcttcattgaacggttggatgaatacgtcgccggtcatggccagcttgccgccgagcacaatgacctccggatccacgctgatgcacagatcagccgccacctgaccgatacgcacggccgtgtcggcgatgatgcgacggcaaccggggtcgccttcgttggcaaaggacaccagatcatccagcgtcatattgccgtgtgtgacgctgagcaactgcaccagcctgttttccgccacgacggtgtcaaggcagccgcggttaccgcacgaacagatggcacccagcgggtcgacctggatatggccgatttcaccggccaggccggtcacgccatgcatgatttcgccgttgatgacgatgcctgcgccaaccccgtcgttggctgagatatatacgaaattgcgtttgcctgccgccacgcccatacgggattcgccgtatgccgcgaaattcgcgtcattatcgacgtatgcgggaacgttgaacgccgtgcgcaacggggccgtgatatcgacgccgtcccatccgggcagaatgccgggaatcgctatggtgtggtcgttggtggccaccggtgcggccacggccacgccgatgccgaccagctcgctggcttcggcgtcgatgctgctcagggtctcattgatgagcagcatggcgcgttccagcgttgtgtccgccttgtggcccaacggcagggggagcgtgtgctcagcgatgattgacttcgagaagtcaacgatagaaagcgtaagatgacgtcgcgcgatccaaagcccgacgccgaggccctgatgccgtgcaagggtcaccagagtggctctgcgaccgttgcgaacggtgtttttggtctccagctggtcttcgtcgacaagctgatggacgagcgtggacacggtcgcagtggacagtcctgtcacctctgccagttcgacctgtgtcatggcgccgaacttgtggatgctggccagcaagttggcgcggtttgcctcgcgaagcgaggtctgcgaaccgaaaagccttgttgccataagagttcagtgtagtcgttaccggcatgaggcacagcgaggcgcagagcgtggatttttcggcgtgtcgccttgtgatgcgcgaaaaatcgccattgcgttcattggttgaacataaacgacgggaaattcgctttcttgagtttgacaacttaactcaatacggtattctatgagatgaacctgaggttattctcaggttcgggcgaccaaggagggttcgccatcccctcgaagatgaaggagaacaaatgaagttcactaagaagatcgtcgccgtggtggcaggcgttgccatgtgcgcgggcctcgcggcctgcggtggcagccgtagcggccaggcaactggcggtgatgccaagatcgaaaagggcgccactatcggcatttcgatgccgaccaagtccgaagagcgttggaacaaggacggcaacaacctgaaggccaagctggagaaggccggatacaaggtcatcctgtccttcgccgacgataagccggcccagcagaacgctgacatcgagaacatggtcaacaacgacgccaagatcgtcgtggtcgcttccaaggacggcaccgcagtgggccccgccgttgagaaggcccgcgatgcaggtgccaaggtcatcgcctacgatcgactgatcatgaacaccgacgccgtcgactactacgccaccttccagctggagcaggtcggcgtgctcgaggccacgtggctcattgaccagctcaagcttaaggatggcgccaccggcccgttcaatatcgagctgttcaccggttccccggatgacaacaacgccaagtacttcttcaagggcgcttgggatctgctgcagccgtacttcgagaagggcgtgctcgtctccccgtcccagcacggtcagggtggcgtgaccaaggacttcaccgttgaggattggcagaagatctccgtgatgagctggaagaccgagcaggcgcagaaggacatggaatccatccttgactccacctacgcccacggcgagaagctcgacgcggtcctcactccgtacgacggcatcgcccagggtgtgatcaacgccatcgaatccaagcgtcccgacatgaagccgggcaccgactcctggccgtacatcaccggtcaggacgccatggagatcgcagttgccaacatcgccaaggataagcagggcgagaccgtgttcaaggacgtgaacaagctggctgacgccgtgtacgacatggtcgtcgagatcgccgagggcaaggaagtctccggcctgaacggcaagttcaacaacaacaacatcgacgttccgtccaagctgcttgacccccagaacatcaccaaggacaacctccaggatctggtcacggccaactacatcacccaggatcgcttcgacgagctgactaagtagtcctcatcaggcaatccgtaaacaaacacaatgacatgcggcgcatagccgatatgcgccgcatgtccatgaacacagaactgtgacgaggagtgatgacatgtcatcaaatgacaccatcttgacgatggaaaacatcacgaagacgttcggtccggtcaaagccctcaccgatgtgaatctttccgtcgatcgcggcgagatccacgccatctgcggcgagaacggtgcaggcaaatcgaccctgatgaacgtgctttcgggtgtgtacccatacggtagctattccggcaaaatcacctttgatggcaaggaatgcaaataccatactattaatgattccgaggccgacggcatcgtaatcattcatcaggaactggcgttgagcccgttcctgtccattgcggagaacatcttcatcggcaacgagcaggccaagggtggcgtgatcgactgggacaagacccgcgccgaggcgaagaagctgctcgatcgtgtgggacttcccgaagacccggataccagggttatggacatcggcgtcggcaagcagcagctcgtcgaaatcgccaaggcattgtccaaggacgtgaagctgctcatcctcgatgaaccgaccgctgcactgaacgatgaggattccgcccacctgcttgacctggttcgtcagctacgtgacgagcagggcgtgaccagcatcatcatcactcataaactcaacgaggtcgccgccattgccgacaatgtcaccatcattcgagacggttcgaccgtcggtgtgatgtacgtgacgccggagacgccgctcgaccaggaagaactcatccgcaagatggtgggtcgtccgctgcacaacctgtacccgaaccacccctccaataccccgggcgaggaatacctgcgcgtcgaggattggaccgtgcatcatccgctcgacgcggagcgcgtgatcgtagaccatgcgaacatcaacgtgcacgccggcgagatcgtcggtctggcgggtctgatgggtgcgggtcgtaccgaaatggccatgtccatcttcggccactcttacggttccaacatctccggcaaggtgttcgtcaagggcaaggaagtcaagatgcccaacgtgcagtccgcgattgacgcaggtctcgcctacgccaccgaggatcgtaagggcaacggtctgaacctgctgcagaacatccgagagaacgcatccctggcctccctgaccaagatcagcaagggcggggttgtggacgacaaccttgagcgcaaggaagtcgaacagtaccgcaaggacttcaacatcaagtgtcatgacatcgatgtgaatgtctccaccctctccggtggtaaccagcagaaagtgctgctcgccaagtgggttatctcgcagccggacatcctcatcctcgatgagccgacccgaggcatcgacgtcggcgccaagtatgagatctacgaaatcatcgataagcttgccgatgcaggcaaggccgtcatcgtgatttcctccgagctgcctgagctcatcggtatctgcgaccgcatttacacggtgtcctacggtgtcgtcaccgacaatgtcgagaagaatggatttacccaggaatacctgatgaagggtatgaccaaggaaagggaggtggcagcctgatgagcgccgcaactgcaacacctgcaaagaaagaagaaaagaccggcctgctggccacggtcgccaacaatgcccgtcaatacggtattgtcggcgcactgctgatcatcgtcgtggccttcgagatcctgaccggaggtgtgctgctgaagccgaactccttcgtgtccctgatccagcagaacgcctacgtgatcatcctggccattggtatggtgatggtcatcatcgccacccacatcgacctttcggttggttccttggtagccttcatcggtggtgtgtgtgcactgctgatggaacgcgccggagtcaactggatgctcgccatcgtcatcgctctggtcgtcggcctgatcgtcggcgtctggcagggcttctgggtcgccgtcatcggcatcccgggcttcattaccactctggccggcatgttgatcttccgtggtctcgccaccgtgatcgtcggcgaatccgtgccgattacctccctcgaattccgtggcattgcccgtaactacctgcccaacatccttggctggtggggtccgttcgacggtctgaccattgtgctcggcatcctgtgcattgtcggctttgcctggagccagctgcgcaagcgcgcccgtgtggccaaggtcggcctggtgcccgagccgatgagcctgaccgtcctcaagattgtgcttgtcgcggtcgtcatcgccttcgtcacctacctgctggcttcctccggtaacgctgatcagggtggtaccccgatcatgctggtgatcgtcggtgtgctggtcttcatctacaacttcatcctgaccaagaccgtgttcggtcgccacgtgtacgccgttggtggcaaccgcaaggccgccatcctctccggtatcaacacccgccgcgtggacttcctgctgttcgtccacatgggcttcctgtccgcagtggccgctgtctgcatgctttcccgtctggcttccgcaactgctcaggccggtatggagttcgagatggacgccatcgctgcctgcttcatcggtggcacggccgtcaccggtggtattggtaccatcccgggcgctgtgattggtgcattcgtgatgggtgttatcaaccagggtctgtcgattatgggtgttgacaccgccgtggtgaagaccatcaagggcctcgtgctcctgctggccgtcgccgtggacatcatatccaagcgcaagaagagctgaccttcccctttctcctcctcgatgtgggattcgtgccggtgccgctggtgcggatcccacactgttatctgccgtcattcttgtaatcaaaggactttttccgccatgaaactcaccgcgcgctccacctcccgtatgtatgcattgacctgcttggcctgcgttatctggctctggcagtcactggtcgaggccaataacgatggctcgctgttcaattgggccactattgtcttctcgctgtgcttgctagtggtcatcggatggagtggttggaatgccgtcaccgggtggaacgccaaggagactgaggccgccacggcgggtgccaaggatgatgagggcagcactgatcggtaacgtatatacggctgttgttgccgggaacatataggtcccggcaaacctgcagcgatatgtgcattgcaagccagggatcccctggcttttttttatgccgaaacggaactcgacacgggcgcgcaggtcgttgggtttgtctagagcctgcatatagttacttatggtaatgactattagtaactaattggaggttgggccagcgatgtgcgattcccgaaccgataccaagaccggcttgcttccggtgaatgaggtgcggagcctcctggatgtctgctggaaggccaagaccatcaccgaactgatgccggcattgccgaaaggtatgaaaccgcgctatgtccacgtgatcgacgccgtctggcatatcaacgaaccgaatgggcaagataccggcaccgcgcgcgtgggcgacgtcagcgcattcctcggcgtcactacgccgagcatcaccaagctcgtcggcgaaatggccgacctcggactcgtcgtcaaacacgccgatgccgccgatcggcgtgcggtgacgctcacgctcaccgaacgcggcttggatatccgccgcatctatatggaggaatatcacgcgcatttgagccaactgctgggcggattgacctcggaccagtgcgaaaccacggtacgcaccttgaccgaggctctgcgactcatgcaggaagacttccaacgtcgtagtcagaatatctgaatgaatggaggagagaacaagatcgtgactcattccgcaacacagctgcctaacggcggcaagcaaccggtctccaacaaactcgtcatcgcggtcgtctcgctcgcgatcctgaccttcctcggcatcctatcggaaacgtcactgaacatcgcctactccacgccgatggaggagttctccatcggcgcctcggtggtgcagtggcttgtcaccggttatctgctcttgctgtcggtgtcgattccgagctcgccgttcatggtgcgcaaattcgccaccaaaacactgttcatcatggccatcgtgattttcaccgccggcacattactgggcgcgctcgcggtcaacttcccgatgctgctcgccgcccgactggtcatgtcgctcggtaccggcatctccctgccgcttatcaccaacatccactggcacgaagaagcgtgattccaacatgcaacgccctattatgacttcgcggtcgtttttgcgcacgccgtctgaagcggctgggcccggcgacgaggcaactattcaggacctcgtggatacgttggaggccaaccgttcacggtgcgtgggcatggccgccaacatgatcggcgtgagcaagcgcatcatcgtcttcgtggacgaagatctcggtggccgtatcacggtgatgctcaaccccgtgatcaccgcttcggatggtgccttcgacacccaggaaggctgtttgtcgctgaccggtgaacgccgcacactgcgctgccgccgtatcgaggtcaactacgaggaccgtcggttccgcgcccgccacgccaccttcaccggctggaccgcgcagatcatccaacacgaagtcgatcactgcaacggcatcatcatctgattcattcggtgctcgttgcagccccccgaggctggtcatcgcgattacgatgcaattacatcgcaaccgctatgaccagtttttttttatgtgcactggtggggtgggtgttctcagcggtgttggggtgccatgcgctggccggttggcttcgctgaggggtgtgggtggtgtcatgttgccagcggttggctggttggcttcgctggaggttctctcagcgtcggtgatgtgccaaagagtggcgggctggcttcgctaaggagcgttaccgtcggtggagaaccagtgcgtgacctgctgccgacgctaagcgttcattaagcgtcgttagcggccaaaacttggacgtgtaacgatgctgggcggttttagcgtcgttgctgtgccaagttgtggtcctctgccgacgctgccagtgcagtagcgtcggcgttgggacaggtgttgggcctttgccgactctataagcgagggaaaatcattcgccggtgcctaagtgggtctattgccatgctgaatacatctgctgagtgtagctatgcgttcgaaggcgatttcgggacctttctcagtagcaaatatgcctaatgcgcggagttatacacttcaccgtgcacttatacacgccaaacgaagcagaaatcgactgctgacagtggatgacacgccagagacgatgtggataacccagagacggtggataacagctgcgcgatcagtggataacctgcaagaaagtgcggttatccaccgacggtagccactgttatgcacattccataccccttggaatcattgggttttccacttatccaccatctcgccatgcgggcttgcgggccgccgcacgaacgtcatacagtgtgcctcacggcgggcaacgtagcccgccgtccacatcacatgaaggggaaacaccatgagcaccgcaaccactactactgccgaaaatgccggtttgccggcaatgctggacaccaaagacgtagccgagatgttcaaacgctgcaatctcgccgtctatgccgaagcgagacgcatatattatcgcgaagtgaatctgaacccatgcaaaaagtatccgaagcaggtgctgcaaaggatcgaatggtggttctgggattggtttgcctatgactgcgccgtcagcggtattggactgaccggcaatgaatccgaagatttacgtatcgaattgcagtacggtccgggcgcaggtatctcgccattcctagccttggccgaattcatgtatgacaaggacgaacgtatcggcacacgcgagatacgtgattttcgcgaacttgatgacaccaatttcgcttcgatgttctggattcgcgatgccagcgcggtcaaaggtcgtctgacagttgaggacatcattcatggtggtgtctacgaggtggcggacgtacatgccgcctcgcaatacgatggtgcgcacggcggcatgatcgtcaatcgcatcgcacatgtgagaggcgtgtggcgatcctgttccatcccgatctatgaggcacgaaggcctgatgacccgcaaatcggtgattcgctggcccgttcattccgggaaaccggatataaaccggactttgccggtctggtgcggtttttctacgggagggccaaagacaccggtctcgactgggaagatgtggaagccgcgcgccaagccggtactttggacgcgctgatcaagaaggccagcaatcggtgaaggattcgcttaacgctgctgtccaagtcggcggccgcgatcacgaatgaagagtgacgcaaccaaacagaccgcgcacacaatggcgaccgtgcggaacgaagcccgcacgccaatggccgatgccgccgcttccggcactccggtgcgcatggccgccgcggtgtgcgtgttcatgatggtgaccagcagcacggccgcagacgtcatgatcgcgaagcccagtaaggcgagcggccggccaccgatacggtcatacatcttgcctgccaccgggttcaggatgcccatggcgatgccgctcggcatcatcaccagaccgggcaccagtgcattaacgccaagatcattctgcaaatatgcccatcgcgtacaggaacagctggcgggtggtgaaggtctcgatgaggaacgcggtgatcgagatcatgatgccgttggtaagcatgaatccggtggtcagccattgcacggtgctgctgggcacgtcgaactcgtgcatcaacgtgggcagggcggagatcatcagcgtttggttgaggatggccacaaacgagccgatcatcagggtgatgaccatggcggtggtgttggcgggggtggtgctgttggagttggcggggtggtggagccggcctcagcggtggccggcgaggaattgcgtgacgtcaattatcaagtctcgttttcttggctgagttgtctttcttggcttgcccatactatctgtgccttgactgcattcgaaaaccattgcaatgactagcaacacgctgagacgcggcgtattaattcaatcatttgacaaacttagttcgttcgttttattattggtcctgcaatccgtaatatcgcctactgcaaaggagcgcccaaatgggtctgtgggatgttgacaagatcgagtacgtcggccgcgccaaaggaccgaaggaagacttcgccttccattactacgatgccgacaaggtcgttgccggcaagaagatgaaggattggctgcgcttcggcgttgcttggtggcacaccttcaaccaggaactggttgatccgttcggcaccggcaccgcgcaccgcccgtactacaagtacaccgatccgatggaccaggctctggccaaggtcgactacgccttcgagctgttccagaagctgggcgtcgagtacttctgcttccacgatcgtgacatcgcccccgaaggcgacaccctgcgcgagaccaacgccaacctcgacaaggtcgttgacaagatcgacgagaatatgaagtccaccggtgtcaagctgctgtggaacacctcctccctgttcaccaacccgcgcttcgtgtccggcgccgccacttctccgttcgccgacatctacgcctacgccggtggccagctcaagaagagcttggagatcggcaagcgcctgggcgccgagaactacgtgttctggggtggccgcgaaggctacgagaacctgtggaacaccgagatgaagcgcgagaccgaccacatcgccaagttcttccacatgtgcgcagattacgccaaggaaatcggctttgaggcccagttcctgatcgagccgaagccgaaggagccgacgctgcaccagtacgacttcgatgccgccaccgccatcgagttcctgcgcaaccacgacctgaccgacgtcttcaagctgaacttggaaggcaaccacgccaacctggccggccacacctaccagcacgagatccgcgtggcccgcgagtccggcttcctcggttccctcgacgccaaccagggcgacaagctcatcggctgggatatggacgagttcccgaccgatctgtacgagaccgtcgccgtcatgtgggaagtcctgcaggccggctccatcggacctcacggtggtctgaacttcgacgccaagccgcgccgtacctccttctacgaggaggacctgttccgctcccacatcgccggcatggacacctacgccgctggtctgctggttgccgacaagatgaaccaggacggcttcatccagaatcttcaggccgagcgctacagctcctacgactccggcatcggcaaggacatcgacgagggcaacgtcaccttggccgacctcgaagcctacagcctcgacaagccgcagtccgagctcatcgccgccaccaagtccgatcacctcgagtccgtcaaggccaccatcaacaactacatcattgatgccctggctgaggtcgagtgaccatcggtctgaccgattgaattcgctccatcgggcgtgtacacatcaattatgatgccagtgcgcccgatgggctgattcgatagtttcgccatgtgcggtgttgtgttatgcccgcatggcacctttccattccttctttctcctttctctccttccgctggaaaaccgcctgaggcaacgtcgccacgggcggttttccagcggaaggagagaaaggagaaagaaggaatggaaaggtgc

SEQ ID NO: 1262 - DNA, 12996 bp, Unknown
  R157_18m  MAG No. k141_316
cgccatggtcggcgccctgatcatgggcgtgctcaaccagggcctgtccatcatgggcgtggacgccgcctgggtcaagaccatcaagggcctcgtcgtcatcgccgccgtcgcctacgacctactctccaagaaaaagaagggctgagccaaactcggcctccgggcccgcccggtggccacggggatgggaacctgggttccattcctcctccgaaagggacgctgttgcatgcagcgtcccttttccgtttgtcgcgatggatgatggggatcccggtgtacgttcttcacgaaatcagccctgacttggggtgtatttcgacaatatgattcggcgatgtgcctcagcggatatgtgcggccaatgaaaaagcgggataccgatgtcgatatcccgctttcagtgaataggtaaagcagagcttacttcttcttggctttcttaacgcgcttgggctttgccgccggcttcttgggctcgaagaacggccacttgttgagggcccaagtgtgcagggcggggattttcgccacggcgaaaccgatgaccaggccgataacgatggcccaagtttccatgtcgcggttcaggagcagcaatccgatgaacaccaacgcaatgatgaagctcatcatctgcgatgcctttgactgcttggcggtcaccaagtcggccttcaacggaataagccctaggaacatgccgcagggcacgcagatgatggccaataccacgctgagaatgattgacaaggttgttgcgtccataatgttctgatgttcctttggtgaagtgatgaattcggatgaagtgattattgattgcggctgtgccgaggcgacttatgtgttgacgacttatttgttggtggtgtcgccggaggcagcgctgccatcagatttggtgctctcgtcggattcggcgctctcatcggcattatcgttatcatcttcgtcatccttgccgggctgacgccaccacaggattagtgcgttgactgcacagtagacggctgcgataccgatgcacaccaggaaaatgatgttcgaggtgctgatcatcgtgccgtcggccattgcttctttggcagattgccatatccaaatcacgcatgcgacggcggtcagggcgtacagcatcatacgggagcggtcgttcatagaagaatctccagacttgttcaaacgacttgattatagccgtatttgtggattgcgaggggaaatgaaaaagccgccatgtgtgcttcggcgaggagcgcggcatggaaagcggctcttcgcgatgcacgccatggcggcattggtcgggaatcgttattcagttgttatctcatggattgtgctggcagcgtatcagccgcgcgccttggcgtatgcctcgtacacggcttcggtgggctcgccggtctccacgccctcgatggtgagttgccaggtcagcggttcggcctcgccggacagcacccaggcggcctgacgggcggcgccgatggccacatattcgtcggtggccggacgggtcacgtccatgccgaggattgagggggccagcgtgcggatggccacggacttcgcgccaccgccaatgagcaggatgcggttgatctcggcacccagcgaacgaatcagctcgaggcagtcgcgctgggaacacagcaggccttcgacgaacgcacgagccagattctccttggtggtgttgtgcagggtcaggccagtcagcgaggcggtggcgtccggacggttcggcgtacgctcgccgtcgaagtacggcaccagggtgatgccgccggcacccggctcggccttaaaggccagttcggccagctcgtcgtagtccacgccaagggcggcgcgaccggcgtccagaatgcgcgaaccgttgatggtgcaggcaagcggcagataatgaccggtgcagtcggcaaagccagaaatcgctccggtcaggtcgtacaccgggttttcagcgatggccgcggccacgccggaggtgccgagcgatacggacacatcgcccacggccatgccgaggcccagcgaggccatggcattgtctccgccgccggggccgatgatgcagccgccttcaacgtccttgccggcaatggcggggtcggccttgacggcggctgcctcacgcgggcccagcacggtgggcagcacaatggcgtcggcgtgggccttggcggcttcctcgccctcggcgggggtcagcaccatggcgatgagatcgcggcggtactcgtcatgcgcggcatcgtagtaaatggtgccggaagcgtcggaacggtcggtgaacagggcttcgagatgagcgtcctcgccctcggccaccgggccatagccggcgatacgccagctcagccaatcgtgcggcagacagacggcggcaatcttcttggcgttctcaggctcgttctcggccacccacgccaccttggtcagcgtgtaggaagcgacgggggaggatccgacggccttgacccagcgctgcttgccgcgggcggtcacgtcgtccggttcgtcgccctcggccggagttgcaccgagcttgtcgatcagggcggcggcctgcggggcggaactggtgtcattccagagcatcgcatcgcgaatcacgttgccctgcttgtcgagaatgaccatgccatgctgctggccgccaaccgcgagggccgcgacatcgtcaagcccgccggcctgctcggcggccttggtgaaggcctcccaccagaattccgggttgaccgaggtgccatccgggtgcttggcctgcccgaaccgaacctgttcgccggtggcggcgtccgtaatgcggacctttgttgattgagttgacgtatctacgccggcaaccagtactctcgtcatgcattcctcctcgatgagggtcgcgcttgcaagtttcggcgcgccacaaccaataagttagacgattaaactatactgtattgcagtgtatgattgcaaacggaaacacgcgaaggtgcgtatctggttcaatcgtttgacgcacaatatcattgtgcgatagacggatgtgagcgcctgtgcggcgttcgagactaggggtgcaaggaggtaggagcctatggcaagtctacgcaggatcaatcaggaggatctgcgcaaccataatttgtcggtggttctcgacactttgttgcgcgcggagaaacccatgagcagggccgacttggccaaggaaacgggcctgaccaaggccacgctttcgctgttggcctcgatgctgatcgatagtggcgtggtgcaggaaggcgagccggtcgtctccaccacatatgggcggcccagcacgccgctggagattcatggcgggtccatcgccggcatcggcctgcagatcaacaccgatggctacggttgcctggcactcgatctgaacggcgacactctcggtcaggagtgggtgagtgaggatatgaccggcactgacccgtacgagatcttcgccaagctcgatgcgatgaccttcccgttggaaagccgactcaaacgacgtggctgcaaagtggtgggagccgggcttgcgctgccgggcatcgtcaccgacgacatgtggctgttggtggcccgcaatctgggttgggaaaacgtcaacctcacccggttcaacgtggcacgccggctggatgtggtggccggtaacgaagcgaagatggccgccatcgctcagattccggggtatgccaccgaacgtgcgtccttcctgaatgtggtggatcgcacggattcctttatttacctgtctaccgatatcggcatcggcggcgcggtggtgcgtgacggcgaagtggtgatgggctcgcacggattcgccggcgagatcggccatctgtccgtggcgatggatgggccgttgtgcagctgcgggcgccacgggtgccttgaggcgtttgcgggccgtcgcgccttggtcgaggctgccggcattgccgaggatggggatgccaccagcagcgaggccatcgatacattcctccagcgttggcgtgcgggggatccagacgtggccaaagtggtcgatcaggccgctgatgcgctggtttccgccatcgtttccgccgtgaatctggtggatgtcgatacggtgctgttgggcggactgtggacgcacttcggcgacgagctggccaccgtgcttgaaggccggctgcgttcggaaattctgggatacccgaatgtgaagatccgcgtgttcgtgccgccggtggcgctgcatccctcgctatatggcgcggccgaaatgggcttgcgacggttcatcgagaacccgttggggtacatgggggagaagtagcgccgggagatgccgcttgttgtgctggcgggtgcatggcatgggtgcatggcgcgtgtgccggcgttggtgggttcatgctacactttgcaagttggctgttttacgcagcgaacgtggggccgtagctcagtcggttagagcatgcgactcataatcgcccggtccagggttcaagcccctgcggccccactcttttgcgtcgcctcctgcggcggcacagcgcgtcttcacgtccagataggcgcgtacaatcccttaggttccggttcacgtcctgccataggggcatgacgacccgggtcccccgaatccataggagacgtaaaatgcagcagggtatccatcctgattaccaccccgttgaggtgacgtgctcgtgcggcaacaccttcgtgacccgcaccgctggcaaggaagatcacatgttcgttgacgtgtgctctcagtgccacccgttctacaccggcaagcagaagattcttgacaccggtggccgcgttgctcgcttcgagaagcgctacggcaagaagagcaagtagcatacttcacgccagtccgattcgattcggcatgctccggcatacccgatcgaggactggcgtttttgtattctttgacatttttttgacctgcgcaaccgaatagacaccaccgtacgaaagaaagcgtgttatggcagacgaacagttcccggcggcggcaaccgcgcttgaggagtaccagtccatcgaagaacagatggcgagccccgaagtcgtgtccaacccggacaagctgcgcaagctgggccgtcgtcacgccgaactgggtgccatcgtgggcgcctacaaaacctggttgcaggtgaaggacgatctggcggccgctcaggagatggccggcgaggacgccgacttcgccgaggaagccaagcgtcttgaagccgaactgcccgacgccgaggagaagttgcgcaccgcgctgatcccgcgtgacccggatgatgcacgcgacaccatcatggaaatcaaggctggcaccggcggcgaagaagccgcactgttcgccggcgacctgctgcgcatgtacacccgttacgccgagaagcgtggctggagcgtgaacgtgcagtccgagaacaccaccgagctcggcggcgtcaaggacgtgcagattgccatccgcgccaagggcacgcccgctcccgaagacggcgtgtgggcttcgatgaaatacgagggcggcgtacaccgtgtgcagcgcatccccgtcaccgaatcgcagggccgtatccagacttccgccgcgggcgtcatcgtgttccccgaagccgacgaggatgacgacgagatcgagatcgatccgaaagacctgaaaatcgacatcttcatgagctccggccccggcggccagtccgtgaacaccacgtattccgccgtgcgcatgacccacctgcccaccggcatcacagtgaacatgcaggatgagaagtcgcagatccagaaccgcgccgccgcgctgcgtgtgctgaagtctcgcctgctggccatgaaacatgagcaagaggccgccgaagccgccgacatgcgtcactcgcaggtgcgttcgcttgaccgctccgaacgtattcgcacgtacaacttcccggaaaaccgtatcgtcgatcatcgcacgaattacaaggcctacaaccttgacgccgtgctcgatggcgacctgcaggccgtcatcgattccgacatccaagccgacgaagccgaccgtctggccaaccagcagtgatagccgacctgattcgtcaagccgccgcgcagttgcgcgaagccggcatcgagacgcccgaacatgatgccaaactgttgctggccgaggccgtggacgccgagctacgcgatatcgacaaggccatgctgatgggggagggcctcgattcgctggcccccgccggcgggggctgtcgcgcagcgactgggggtggtcaggccgaccccgtcaccaatatccttgccgccttccacgccatgctttcccgacgcgccaaacgcgagccgctccaatacatcaccggccacacgcctttccgctacctcgacctgcaggtgggccccggcgtctttatcccgcgcccggaaaccgaaaccgtagtccaggccggtcttgactggctgacccggcacagcatgatccacccgcgcatggtcgacctgtgcgccggttccggtgccatcggcctgtcgatagtcagcgaagtgcccggcagccaagtatgggccgtcgaattatccccgcgtaccgccgaatggacccggcgcaatctggcggtaaccgcgaaacgatacccctccatcgcctccaattaccaactggaagtcgccgacgccacgtcactggccacgctggcgcaactcgacggcaccatcgacatcgtcatcaccaacccgccctacgtgccacaaaccgacatccccgaacaaccagaagtacgcgactgggacccggaactggcgctatacggcggttcggcagacggcacgctcatccctgaacgcattattgagcgcgcctggcgcctgctcaagcccggcggcgtattggttatggagcatgatctcacccaaggcgagcgattagtggcctatgccaaggccacaggtttcgccaccgcctccaccggcaaagattggaccggccgagaccgctatctcttcgccgagaagtagccacaggcgcggggccgccgctgctactgcgcgtaatactgcagggcggaggcgtccgcgtccgtgatttcgcgaatcggacgggccggattgcccacggccacggtgtgcggcggaatatcgcgcgtcaccaccgagccggcaccgatcacgcaaccctcgccaatcgtcaccgggcaacaatccagcacagtgaagttgaagttggcgaacacgcgctcgctggcgcgcggcatacgcagttcgacgggaggcatggtggtggattcagcattgattccgctcattgaacactcctgtaatttcgcgaaagagcatggatgaactcattgtatctacggtctgtgcgtatggggcgaatcggaaaacagcagtacggcaaacgagcgatgatgaactatgcaagtcggggcgcaatggtgcaatggtagattgtgaatacacaggcgaacggaggtgtcgtgagcgtggagggcggaacaacgctgaaagtcacggatgaatcgctggcacaagcggcgcgtgtcatccgggatggtggattggtcgtcattccaacggatacggtatatggagtggcgtgcaatccgcgtaataaggccgccatcgaccgtatctaccggctcaagcgtcgcccgcgctataaggcgttgcaggtactgctcgcatccaccgaccagcttgatgaactcggtctcgacctgccgtctccactgaatcgtttgtcggcggcgttcctgcccggcgcgttctcgccgattgccgtagcccggcccgactgcacgttggagactttggccgacaccgccgatggtcgccccggcacgcagggcatccgcatccccaattcggcgctgtgcctcgcgattctcaaggccactggtccgctggccgcgtccagcgccaaccgttccggcgacgaaagcgcacagactgtccaggaggcggttgacgcgttcggcaacgaagtcgacctgtatctggacggcggtcccacccaaggccatgtctccagcaccgtcgtcaaagccgatccgtacgcgcgcgacggcatcgagatcctgcgtgaaggcgtcatcgcccaaaacgtgattcgcaaggccctccacctcaacggcgggggactcggcgcatgagaatctacctactgattgccgccatcgccggtggcgtcacctggctggtgactccgctgattcgccacgtcgccatcgaaatcggtgcggttggcgaggtgcgtgcccgagacgtgcacaccattcccacgccgcgcatgggcggccttggcatgctgatcggttttgccgtggctaccgtattcgccagtcggctgccttttctctcgggattgttcaacggcaattaccagatgtgggtgattcttgccggcggcatcatgatcagtctgctgggcatggccgacgacctgtgggatctcgattggatgctgaaactcgccggccagctgctgatttccgtattcgtggcttgggacggattgcagatcatctcactgcctttgggtggttcgctgattaccgcctcgccgagtctgtccatggcgatcaccgcattcctgatcgtcgcctcgatcaacgcggtcaatttcgttgatggcctcgatggtctggcggccggtatcgtggcgattggtggcatagcgttcgccgcctattcgtatatcatcgcccggtcttccccgagttatgcttcgttggccacgctgatcgacgtgatgatggtgggtatctgcgtgggcttcctgctgcataattggcatcccgccaaactgttcatgggtgattccggttcgatgctgcttggctatctcatcacctgcgcttcgattgtgatgaccggacgtcttgacccggcctcgattcatgccagcatctatctgccggtgttcatgccgattctgctgccggttctggtgttgttcctgcctgtgctcgacatgtgtctggcgattgtgcggcgtttggccaaaggccagtcgcccatgcatccggaccgtatgcacctgcaccatcgcatgctgaagatcgggcattcggtgcgtggcgccgtgctgatcctgtggggatgggccgcgttgatcgcattcggttcgctgacgattctgttcttcaaagcgcagcacgtggccgtgggcatggccatcgctgtggtggtgctgaccatagccacgatgtacccctatctgcggcatcgtattcccgagatccaagccgagaacctgacgttcgaatccgcacgtaaaaacgcgcagcatacagtgcctaaatcgcagtctgcagtaggggagagccgggattcgattggctctcaggcagcggattcgatgactgattcgcctgcaaattcgcgggactcgcaggtgggtgaggtgcaggacccggcagcggataagtgagcgctcacaagcgtgtgtcgtgaaggtcagcgcattttcatatagtgtttacatggctacaaaccttgatgaattaaacgcccagtcggcgtatgctccccttcccccgattttcgccaagctcggccttgcctatgacgatgtgttgctgttgccgaacgagacggatgtcattccctccgaagtggacaccagcactcatctgactcgcaagatcgtgatgaaggccccggtcctctccgctgccatggataccgtgaccgagtccgagatggccatcgccatggctcgtaacggtggcatcggtgtgttgcaccgcaatctgtccatcgacgaccaggccgctcaggtcgatgtggtcaagcgttccgagtccggtatgatcaccgacccgctgaccgtcaaccccgaggtcacgctggccgacctcgacaagctgtgcggcaagttccacatctccggtctgccggttgtggacaaggacaacaagctcgtcggcatcatcaccaaccgtgatatgcgcttcatcgcctccgaggattacgacaccctgaaggttaaggatgtcatgaccaaggagaacctggtcactggcccgtccaacatctccaaggacgacgctcaccgtctactcgctcagcacaaggttgagaagctgccgctcgttgacgaggaaggccacctgaccggcctgatcaccgtcaaggacttcgtcaagaccgagcagtacccggacgccaccaaggatgagcagggtcgtctgcgcgtggccgccggcgtcggcttcctcggcgacgcctggcagcgtgcctccgctctgatggaggctggcgtggacgtgctcgtggtcgacaccgccaacggtgaggctcgtctggcactcgacatgatttcccgcctgaagcacgactccgccttcgacggcgtgcagatcatcggcggcaacgtcggcacccgctccggtgctcaggccatgattgaggctggcgcggacgccgtcaaggtcggtattggccccggctccatctgcaccacccgtatcgttgccggtgtcggtgtcccgcagctcaccgccgtgtacgaggccgcccaggcctgccgtgccgctggcgtgccctgcatcgccgacggtggcatccactactccggtgacatcgccaaggccctcgtggccggcgcctcctccgtgatgctcggcggcacgctcgccggctgtgaggaagccccgggcgagaaggtgctcctgcacggcaagcagtacaagctgtaccgtggcatgggctccctcggcgccatggccccgcgcggcaagaagtcctactccaaggaccgctacttccaggccgacgtgacctccagcgacaaggtcgtgccggaaggcgtggaaggcgaagtgccgtaccgcggcccgctgaacgccgtgctctaccagatgctcggtggcctgcaccagtccatgttctacatcggcgcccacaacatcgccgagatgccggagcgtggcaagttcatccgcatcaccgacgccggtctgcgcgaatcgcacccgcacgatatcgtgatgaccgccgaagccccgaactactccggcttccacaacaactgatcggttgatgcccgctagcttgcgctagttaggggttgatttcttgtgaaaagggtctgcgtatgcaggcccttttcgcgtatgtggctcgagatagcttgtatgcgctggggtatagtctgaactgttctgcataagcgatgaccagcgaagaaaagaggcacaccatggtcgacagccatgacgcggaaacgtacagcgcgaaggactcgcgcctgatttggatcgattgcgagatgaccggacttgacatcttcggcggcgacgaactcgtcgaggtgtctgtggttcccaccgactttgacctgaatgtgctggacgagggcgtggattacgtcatcaagccgtccgaaaaggctgtgaaccacatgaacgatttcgtgcgccagatgcacacccgttccggcctgatcaacgagtgggagaatggcctgagactggccgaggccgagcagaaggtcaccgaatacgtgctgcgcttcacgccggaaggcgtgcgcccgctgctggccggcaacaccatcggctccgacaagaagttcctcgaccactacatgccgggcctcatgagccacctgcattaccgcagcgtggacgtgagcaccttgaaggagctcgcccgccgctggtacccggccgtctacgagaaccgtccgccgaagaacggcggccaccgtgccctcgccgacatcatcgagtccttggacgagttgcgctactaccgtaaggccttcatggcccccgtccccggcccggatgatgccgcctccaaggccatcgccgccgacatcgtggccaccagcattctcaataagtagtccgccgtacttggctcccctccctgaggggagtctagagaggttgatatgcgccaaaccgaagccctagccattctgaacgccggcgcgaacgtgtttctgaccggtgcgcccggtgccggtaagacctatgtcttgaacgagttcatccgccaggctcgggccgacggcgccagcgtggcagtcaccgcgtccacaggcatcgcctccacgcatatcaacggccaaaccatccattcgtggagcggcgtcggcgtggccaccgccctgagcccgagtctgctcaaactcatcaaatcccggcgcaaacgcaagattcaggctacggacatcctcgtcatcgacgaggtctccatgctgcacgcatggctgttcgacatggtcgaccaagtctgccgcgaagtgcgtcgcgacccacgcccgttcggaggcatccaggtcgtgctgtccggcgacttcttccaactgccgccggtttcggtgtccgggcgcaaccgcgacctcatcgcccccacccccgaattcatcgccagtcgcgaacggtatgcccgtgccggcttgaaccccgaaggcttcatcaccgaatcgctggtatggcccgaactcaacccggtgatctgctatctgaccgaacagcaccgtcaggacaccggcgaactgctgaccgtgctcaccgacattcgcgaaggcgacgtgacccagtccgaccgtgacgtgctcgtcacccgtctgggcaaactgcccgagcccggccaggtcgccgtccacctattcccggtgaaccggcaggccgacaatctcaacgacatgcgcctgaaccagatcatgcttgagccgcacgagttccacgccgagacagcaggccctgccaacctggtcgaccgactcaaaaagaacatgttggcccccgagcgattgatactcaaggaaggcgcggctgtcatggccctgcgcaacgacaccgatcgccagtacgtcaacggctcgctcggcaccgtgcgcggcttcgcgcaggagaacaagggcggctggccgatcgtggaattcgaaaacggcaacatcgtcaccatgaaacaggccacatgggaaatgatggacggcgacaccgtgctcgcctccgtctc

SEQ ID NO: 1263 - DNA, 32998 bp, Unknown
  R157_18m  MAG No. k141_657
cttgactcgttatttatccgtgcatgctgtaggcaatcggcctgtggtcggtctcctcccgcaacttatattgctgtgctgtgctagcgggtcttccctccagacacaagctttcctattatgcaaatccacccggacaacacaaaaagcccgaccactatggtcgggctctgcaaagtttggggttaatccagcttctgaacctggtggaagccaagctccaccggcgtatcacggccgaagatggacacgagcacggtaagcttctgagtggtgggctccacgtcggaaacaacggcggccatggtggcgaaaggcccatcggtgacggtgacctgatcgccaacggcgtaggagacttcaaccttgcgcttcttggcggcggcaggcttgtcgccggcggccttgagtgcctcggaagcgatcatcggagccatcatcgccacgacttccttgcgggagagcggtgccggatccttggtcgggccaacgaagccggtcacgccttcggtttcgcgaacgatacggcgggcgttctcatccggccacatacgaatcagcacatagccaggaacacgtacgcgggtgatgatcttcttacccttttcggtgtgcttctcgacttcttccatcggcacctcgacctggaagatctgatcttccatgccgaaggaggcgacgcgggactcgatgttggtcttcacgcgcttctcatagccagagtaggtgtgcagcacataccacttgccatcaagggaacgcagggacttggagaattcgtcaacggcctgctgaccggcatcggtttcctcggcctgctcggattcgttgacttcttcctcgtcctcatccagagaaacggcctcagtctgagtggaagcaacgggagcggattcagtcgcggccggagcggcggactcaacatctgcattgtcgacggatgcgtcagattctgcggaaaggtcagcaaccggttcagccggggcagctgcctcatcggcagcagcttcggaagcctcgacaacaggctcctcagccggcacggcgtcgagattctcgagattcagttcatcactcatgcgttgttattcaccttaggttgtgcggatcagccgaacacccacagcacgagcttgcccagaccgaagtccatgcccgtgacgagggccatcagcagcagcacgaagataaacacagccagagaccagaagaacagttccttggcagtaggggttacgaccttgcgaagctcgtcgatgatctgcttgataaacagaccgatacgcatgaagacattcggcttgactaccttttcgctgttgttcgtcttagccattctgtacctcgcgtcagctgcttgattattgaaaacttggcagggaaggcgggactcgaacccacaacctacggttttggagaccgttgcgctaccaattgcgccacttccctaggtgaaaatccacctcggcgtgcattccgtagagaacgcttcgccacggcgaaaccgccaagttgttatagtaacggctccggtggattatcgcaaatcgcgtgtcgcgcgcgtggcatgtgcgcggcacacgactcttctcagttagctcagttagcccattccttgaatcgacgcatgccttcggctaggtcttcgtcggccagtgcgtaggagaaacgcaggtaaccgggagcaccgaaggcctcaccagggacggcggccacgtgggcctcatccaacagtgcggcggcaaaatcagcggacgtatcggacacagtgccgttgggccccagcggcttgccaagcaaagcggtgatgtccgcaaaagcgtagaacgcaccggtcggagtcgggcagttaacgccctcaatatcgttcagagcagccacgatcgcgcggcgacgtgcatcgaacgccttgcgcatctcatgcacctcgtccagcgggccagccacggcggccagagccgcacgctgggagatgttggccacattggaggtcatatgcccctgcagcttggtggcggccttggccacctcaagcggcgcgaccatccagcccacgcgccagccaggcatcgcataggtcttggccacgccgttcagcaccagcagctgcccgcggcattccggcacggcggcaccaatgtaggtggtgcgcgcgtcgtcgtagttcaggtgctcgtagatctcgtcggagataacccagatgtggtgctcgacggcccaacgaccgatcgcttccacggtttccggcttccagacggctccggtcgggttgttcggggagttgacgatgattgccttcgtacgctcggtacgggccgcttccagcgcctcaagcgagggctcgaagttcacgtcggcaccggcgaatacttcgaccggcacgccacccgccaatttgacggcttcaggatagctggtccagtacggagcggggatgatgacctcatcgccatcgttgagcaagatctggaaggattcatacacggcctgcttgccaccgttggtcaccacaacctggtcggcggacacctcgtagccggaatcgcgcagcaccttagccgcaatcgcttcgcgcagctcgggcaggcccggcgtaggcgtgtacttgtaattctttgggtcaaggcaggcatctgccgcagccttgaccacgtttgcgggggtcgggaaattcggttcacctgcgccgaagccgataacgtcaagtccggcggccttcatggccttggccttggaatcgacggcgagcgtagcgctcggtgccacagtgttgatacggtcggaaagagtctgccattgcgccatagtcatggcttccatgctaaacctacagcacgaaaaatcgccagagccgcactatggtgatgggatctgtcgtgtgacagatcccatcagtcacacaagtacaagattgtcgcgatgaaccagtgggtgggcgtactgggggccgaggaaacgcttgagttgggcggtgttacgcccgagcatctgcggaatttcttcggaatcgaagccggcgaggcctcgggccaggtgttcgccgctttcggcatcgatccagaccggatcgccggcggaaaaatcgccatgcacttcgagcgcgccggccgccagcagcgaggcacgcccgccgcgaatcgcctggccggcacccgcatcgaccacaatagtgccgcgcgggtcggcggcgaagccaatccacagacgacgcgacgaaccgcgggccttaaccggtgcgaacacggtgcccaccggatcgcccatcatcgcagggcccgcgttcgaggcgcaagtgagcaccgtggggatgcccgagacggccgccacgcgcgcggcctcgagtttggtgaccatgccgccggtgccgaccttggagccggagccggagacttggatgtcgccaagtgcatcgataacgttcggcacatattccacacggcgggagccgggctgggaaggcggtgccgtgtatagcgcgtccacgtcggtaagcaataccaaagcttccgcgcgaactaggttcgcaaccaatgcggacagacggtcgttatcgccgaatcgaatctcgttggacgccagcgaatcgttttcgttgataatcggcaccacgccgaggtcgagcagacggtccagcgtgcgttccacattgcggtactgggtggcacgaatcgtgtcttcagcggtaatcagaatctggcctacgcgaataccgaaacggccaaaagcagtctcgtagcgagccatgagcaaaccttggccgaccgctgcggtggcctgctgagtagccacgtcggccgggcgttcgtcaaagcccagcgggccgaagccggccgcaatagcaccagaggaaaccagtactacacgcccgcccatcagtcgtatttgggcaagggcggcggccagagcgtcgagcttgtccgggtcgaggtgaccgctcggctgggtcagcgagctggagccgactttcacgacaatggttccggctgctgcgaccatgcgccgcacctcggcctgactcggagtgctcatttattcctcggtttcaccatcttcgctggactcaccgtggccgaacagactggtttcgtcatggcgatcgtcgtcaacggtcgggtcggcccagtggccggccttgcgttcggccatcatcgcatcgcgcacggcggcacgggcgtccatcatctcgtggtattgggcacgacgttcggcgttggagcggcggtgcgtgcgcgggtcctgctcttcgagacgcagatccttgcctcgggcaccgaggttggagccgtcgagcatttcggcaccggcggagatggtcggatcccaatcgaattcgaccatacgggcaccacgaccgatgcgcacctcgtcaccagggtgggcacccttgcggcgcagctcatcttccacgcccagcttggccaagcggtcggccagatagcccacggcctcgtcgttgtcgaagttggtctgcatgacccagcgctccggcttgacgccacgcacctcgaagaacacttcgccattgccgagttcgcggcgctcgaccgtgaactcaagcgcactgccgccctcgtcagcgcgacgcggacggcggcccttggtctccaatggcttgataaccacgcgcgtctcctcttcggcctgctcgcggttggccacttcctcacgcatctcatgcaccagcgcagacaacgcgaagttgagctccttcagcccctcatgagaggcggtggagatctcaaagaccttcagcccgagtttctcgaactccggacgcacgaactcggccaattccttggcctcgggcacatcgatcttgttcagaatcacgatgcgcgggcgttcgggaatcgggatggcgcccaatggcagttcgagcttgtcggcgtagagtgccaactcgttttccagcgcgtggtagtcggacatcgggtcgcggtccggttcaagcgtggcgcaatcaatcacgtgggcgatgatttcggtacgttcgatgtggcgcaggaactccagtcccaggcccttgccttcagaggcgccaggaatcaggcccggcacgtcggcgatggtgtatcgagagtcgccggcgatgacgacgccgagattcggcaccagcgtggtgaatgggtagtcggcgatcttcggcttggcggagctcatcgccgcaatcagggatgactttccggccgaggggaaaccgaccagcgccacgtcggcgatggacttcagttccagaatcacgtcgcgttcctcgccgagttcgccgagcagggcgaagccgggggcgcggcgggtcttgttggccagggcgatgttgccgaggccgccggcaccgccctgggcgacgacgcagcggtcgccctcgtggcgcaagtcggcgagctgtgcgccgggatgcttggctttgccctgttcgccgcgcgcctcaaagacgacggtgccgcagggcacgggcagaatcagatcctcgcccttggagccgtccttattgtcgcccaggcccatggtgccgctgccggcgacacgatgcggcatgaaacgatagtcgagcaggctggtggcgttacggtcggccacgaacaccacggaaccgccgtcgccgccattgccgccgttcggaccggccaacggcttgtatttctcacgacggatgccggccgaaccgttgcccccatcgccgcccttgacatggacggttactcgatccacaaaatcactcatattgattaccttacaaaaaagccgcgtccttacgggcgcggcttgaaaaagcttgacgctatatcgctcaggcgatgacgtcgacaaccttgcggtcgcgacgcacaccgaacttcacggagccatcggtgagggcgaacagcgtgtggtccttgcccatgccgacgttgtggcccgggtggaagttggtgccacgctggcgaacgatgatgttgccggccacgacggcttcgccgccgaacttcttcacgccgaggtattgcgggttagaatcgcgaccgttgcgagagctggacgcacccttcttatgtgccatgattcatggtcctttctataactcaggcaatcgccgtgatcttgacgatagtcagcttctggcgatgacccttacggcgagcaacaccagtcttgttcttgtacttctggatgtcaatcttcgggcccttggcttcatcgttcacaacctcagccttgacggacaccttggccagatcggcggcggcgagggtgaccttgtcaccatcgacaacgagggagaccgggaattccacggtatcgcccttcttggcgtcgagacggttcacgaggatgacgtcgccaacctcgaccttttcctgatggccaccggccttcacaatcgcgtacattatcgttccttttatgttttggaaagctaccttgcctaacacgcaccgagcctgcggtcagacaccgagtttcaaatttacaccaccatgcggactaaatcaaatgatttttgcccgcgtgtcaagcacgacacacctgttactcttccgccgtattgttggcggcgacggcagcggcggcaatctgagccagtttggctttgacgtcggcgctggaaccagccggttcgggagcgggagcggtgccgcgaccgtgcttgttggttttgacgaacgggtcaccaccgcgaagcgcgtagggatcgtcgtagtcggccgaaacggtcggctgatcatgcaggatgaaaccacggcccttgcaggtcgggcattcctcggagaacgcctcgaccagaccctggccgatgcgcttgcgggtcatctgcaccaaaccgagcgaggtgacttcggccacctgatgcttggtgcggtcgcgtgccaggcattcgaccaagcggcgcagcaccagatcgcggttggcgggcatgaccatatccacatagtcgatcatcaccatgccgccgatatcgcgcaggcgcagctggcgggcgatctcttcagacgcctccaagttgcagcgcgtcaccgtttcttccaaggacttgcccttgccgataaagcggccggtgttcacgtcgatggtggtcatggcctcggtgcgatcgatgacaatcgagccgccggacggcaggtagacctgacgttccatgcccttacgcagctgggagtcgatggaccatttgtcgaacacgtccttgccttcgtgctcggccgggtcccacttctccagcttgtccttcaggtcgggggccatggtgtcaaggtattcctcgatacggtcgtagaccttgtcaccttccacgatgagcttgctaaagtcgtcgttgaagatgtcgcgcaccacgcggatggccacgtcgggctcgccctgcaggagtttcgggcgcttgccgtgccagaattcctcgcgcttggcgttgatgcgctcccactggcggaccagtgattcgagatccttgacgatggcgtcttcggatgcgccttcggccgcggtgcggataatcacgcccatgtctttcggggcgatcttggagacgatgttcttcagacggctgcgttcgcgctccgaaagcttgcggctcacgccggtcatgccaccggagggcacgagcaccaggaagcggccggcaagcgtgacctgagaggtcaggcgggcacccttgtggccgatcgggtccttagtgacctgcacgagcaccgggtcgccggacttgaacgccagctcgatgcggcgcggctgaccttcgagacgagcggcatcccagttgacctcgccggcgtagagcacaccgttgcgggactggccgatatccacgaatgcggcctccatgctgggcagcacgttctgcacgcggccaagatagatgttgccgacggtctgtacttcctgaatgtcggagacgtaatgctcgaccagaacattgtcttccaccacggaaatctgggtgtggtgttccttctcgcgcaccaccatcaggcggtccacgttctcgcggcgtgcaaggaagtcctgttccataagctggctctggcggctgcgctcacggcggttgtcacggcggcgctgcttcttggcctcgagacgagtggagccttccacatcggtgatttcgtcgatgtactgctgcttgcgggagcggcggaccagcggctgttcgctgttctgactctggtcgtcggtgccctcgccgttcttgccgccacgacggcggcggcgacggcgagtgacggtctgctcctcatcgtcctcatcgcgatcacggtcatgatcatcgcgatcgtcacgacggcgggaacgcgtatcctcggcatcgttctcggcggtatcgtgctcgccgttggcaccggtttcgccgcgtgaaccacgacggcggcgacggcgcgaacgggtgcgggtgacgtcggattcctcgtcgccctcctcctcggcaatcggcgagtaggcgatatcgtccagctcgaggtcttcctcaatctgctcgacttcggcggctgcacggcgctcctgggcgttcagacggcgggagcggcgcgaacggcgggagtccgaggtgtcgtcggcgtcgaaatcgtcgtgatcggcgttggtatcgccggacgcggcgtcacgggaagcgtcacggtcggcggaggcgcggccgcggtcgtcgcgatcgtcgcggcgacggctgcgcggctgggcatcgtcatcgtcgtggctgcgcgagcggcgggagcgacgagacgggcgttcgtcggcgtcaacatcgtcatcacgagtgtcagcggtatcgtgcgcatccacggcggcgggcagcaccggttcctggaacagcagggacgtcatcggtttgccacggcgcacggtctcgtggccagagggcagggattcgaccgcgtcgaacaggcgctcatccggggtatcctcgtgcgtatccgcaactgcacggcgagaacgacggcgaaccgtacggtcttcgtcatcatcatccatatccataggcgcacggcggaggcgggagcgaaccgggcgatcctcgtagtcatcatcgtcggactggcgggagcgagagcggcggcgaaccgaacggtcctcgtcgtaatcgtcatcgtccacgactgaacggcggcgggaacgcggggcgtcatcgtcatcgaaatcatcggcactgaccgtgcggcgcgaacggcgcggacgatcatcctcgctatccaagtcggccactgcggaagcggcgcggcgcggacggcgcggagtctcgtcgtcatcatcggtatcgctggaagatgcggcggacgtacgacgggtgcgacgcggcgtttcggcggcatcgtcggccgtggaaacgcggcgcgtacggcggcgggttggacgttcggcggaatccttggaatcgctggattcatcggaatcgccggaatcggatgacttggaatcggccgcggtgctggcattgggaagcgcgggggcttcgaacagcggggtgcgttcctgcacttgcagttccagggaggcgccggcagcaccggtgccgcggaccacgcggcggccgccacgacgacggcgaacaggttcgacgggctgggaggcggcggcaggcgcagcgttcacggctgcagccgaatcggcattggatacggttgaattatcggttccgtcgttgacgaaaccttcacggttgtcagtgggcacaatgctcctcgcggcgcgctgcatcacgacgcctatttccaggcctatacgcttgactcacaccacgctctcaccgtggccgcgcgaaaacgcgccgcgtaaaggcaacttcgtctcaagtctgtcctgcgggtggcggacaccggcgcttgcgttgtctcattctcgagagccgcaaggggatcgacgccatctcgcacgctgatggttatgcagaaccaccatcctttagtatgccacatattttgtgcgggcgtggcccggcgaggctgacgttctctcggctcccctccctgcggtgacagctcccctcagagaggggagctagagaggtgtcagaccagccagtcggtaagaattgcggtcatggcggccaggtcggattcgggcacctgctcgtcgtgcttgtgcgccagcagcgggtcgccggcaccgaggttgacggccgggatgccgagctgggagaagcgtgccacgtcggtccagccgagcttggccaacgggtcgcggccggtgcgctccttgaccagtcggaccagatcttgggcgagcggggcgttcaggcccgggcgcgcggaggggctttcgtccttcatttcgatgccgtagccctcgaacacgccgccagtggccacatgctcgccattgccgagttcggcaccggcatccgcgcccatcatcagagccttggcctcggccagcgacttgtccggggcgaagcggtagttgacgtgtacgcggcattcatccggaatgacgttcgtgcctttgccgccggaaatcagcgtggcgttgaggccctcgcgatagtcgagcccgtccacgttcacggtggccggctcgtaagcgttgagtcggctcaggatgtcggccgccttgtggatggcgttctctcccatccacgcgcgggcggagtgcgctgccacgccgtgggtcacgacgtcgaagcgaatcgtaccgttgcagccgccctcgatgccgctgttggtgggctcgccgatgatggcgaaatcgccggtgatccaatcgggatgggcctcgacgactttgcgaaggccgttcttttcggcgacgacttcctcatggtcgtagaagacgtaggtgaggtcgactttcggggtggtttccggcgtgcggccgtcgagcgtggcggcgaggtagagcatcaccgcgtcggaggccttcatatcggtggcaccgcggccccacagcacgcggtcttcgggatgagcgtgggcgatttcttcgcgaatcagcgaatcgccgggctccagccacttcggtgggaaattgtcgatgaccggcacagtatcgaggtgcccggccaagatcacacggttcggctcgccgaagtcggtgccggccaccactgtgtcgccgtgacggcggacggtcaggtgctcttgctcgttaaggaaggcctcgacctcgtcggtgagggggccctcgtggtcggacacggagaagttctccatgatctgggtgagcaggctgttcagctgctcggcagtggatgcggtgcggttcaattcaagcgtcatgtgaacagcgtaccgcgtgggcggcgggcccagcacacccactacatgagattttgcggccgaatacatttttatgtgccacactggggtggcgaaagggaggattatgtcaggtctaatcagcgccatgcaaggcttctgcgttatcggcatcgtgattgcggtgggatatgtcgccgcacgaatgcgaatcggcgggccgtccgctcagatggtgctcaaccgtttctccttcttcgtatcgagcccgtgcctgatgttcgccatcctctccaaggaaccgatcttcgacatcttccatccctcgattatcgtggcgttcttctccgccgtgctggtaggcgtggtgttcctggtgctcaaccgcatgttcttccacctgaacgccccggacgccaccatcggcgccctgaattcgctgtacctcaattccaataacatcggcctgccaatcgccacctacattctgggcaatccggctctggtggcaccgattctggtcatgcagcaggccatcttcacaccggtgggcctgacagtgctggacgtgaccaccaagggcaaggtctccatcaaggaaatcgccaagcagccactgcatcaaccgctgcttatcggttcgctgctgggcattgtggtctctgcgatttccgctaaaagcggctggttcccagtgccgaaattcattttcgacccgatcgacatgatcggcgattcagcggtgccaatgatcctgatggcgttcggcatgtccctacacggcaccaagccgctgcagcagaagggcgatcgcccggccatcttcacggtcgcggtcctcaagaacatcatcatgccaatcatcgcgttcctgctcgcctatttcgtgatgggcttccgcggctccgagctgtacgcctgcgtggtactcgccgctctgcccaccggccagaacgtgtacaactacgcggcccgctacaacgtgggcctcaccttcgcgcgcgacggcattctgatgagcaccatgaccagcccggtgtttatcgcgatcatcgcggcgctgctgagctgagccggcaactgtaatcaccgtaaaaaaaaacttccgcgaaatccaccgtaggattccgcggaagcctgagatatacgctacttgagaatcgccttaatcgcctcatactgctgagcagtgagttgcaccgctggctcacggatcagggtggaaatgttcagtcccttggccttgaccgcacccttgatggcggagatgaacaggtcggtctgatcgtacagcgccatcaggtggctgatgcgttcggcggcctcaattgcggtgccatagtcgccggcctcatatgcacggtgcagcgtaacgaaggtctccggctccacattggtcatgccgcagatcacgccatcaccgccggagacgcggttgacgagatagtactcgtcgaaaccggagaacaccgcaaaccgtggattcacggccttgaccgcgcgaatcaccttgcgggtgtggctgattgtgtcgaccgtgtccttgatgccgacgatgttcgggtgcgcggcggcaagctcggccacgagctccggggtcaagtcgctgccggtgcgcggtgggaaattatagaggatcaccggaagattcgtcgcttcagcgaccgcgccgaagtacgccttcgcgcctcccgcagtagggccgaagtaatacggcgaaacgaccacgagtgcatccactccacttgcttcgactgcccgcgcgaagtcgatcacattgttcaagttggtatcgcccacgcccgcgaacaccttgatgcgcccggcgacatgcttggccacgaagtcgaccgcctgcttcttgacgtccagagggaaggcatagaactcgccgatgctgccaaacaccagcacgccgttgataccggcctcgatcagatgatcgagatgctgcccccaacgttcatagtcgatgtcaccgtcgtccttggtgatggtgatggatgggcagatgatgcctgagaattcggcgctgcttgtcatgattgttcctttcgtcacggaataggggtgccgcacaagcggcaccgggtttgcggcctctcccccagtcgtcctgcggacgatagccccctcatcagagggggcttgggtttagtcgatgttgtaagcgcggcgggcgttgttttcgaagaagtcctcgtcctcgccgaacgtgtccagcatgagttggaagtgcgtggcaaaggtcgagttgagttccacgaccggccagttggagctgtacagcaccttcttcgggccgaatgtgtcccgcacgtatttcacgatgtccgggtccaccgggttgtcgccggaaaccttgatatacgaattcggcagttcggccaacgctgcgagtgcggcgcacgattcctcatcaagcccgggcacgttgccgagatgatcgatgatgaccgtcacttcaggaacctgcgagaacgccttggccatgtcgcccagttccgggccacggttgcacagctcgaatggcaatcccttggcggccatcgcgcgtagaccggcgatgaattcgggttcgagcgcacggccccgcggctcggaatccacatgcagcggttccctgatgccatcggcattaatcgggacacgcatccaagggcttacccgcccctgcagcatgcgcttcaggatcagaggacttgcattctcgtacagcagccggtcctcaagctcgtgatcggccgcgtcgacctccacatatacgccgccgaggaaattcacgccaaatttggcgtactgtgcggctaggtcttcaatcgtgtacttgtgttgcagcgagggcaatcctgccagccatggcagatcctgcgcatccggatcccagatatggaagtgggaatcgattacgttgagtgtcatatcaggcctccttcagaccgatcttggaaccccagaatgcgtaccatgccacgaacaggaagcccgggaccatcaccaggatggcgatctcgatgcctgccgcatcctgaatcacaccgagcagcagcggaatcaacgcggcgcccacaatgctcatcaccaaagccgaggaaccggtcttcgccgcggaacccttgatacctttcagcgtcagggagaatatggtcgggtatccgatggaaatgaacagatacgccaccatgaacgcgatgacggagaccttgcccaggccaaggaataccacgaacatcagcacggctgaaatggtcatgtatacgccaagaatcttcgagggatcgaatttggccatcaatggggtggtggcgaagcgtccgatggtgaacagcagggaaagcacggaaagcatcatcgccgcggtgccggctgtgatgcccgcgccccagtgcttgagcgcgtaggcggagaagaccgccatgccggccacttgcaggccgatgaaaatgaactcggcaagcacgcccaatgcgaagtgcgggcgcttgagcaggccgaagaaggagctgttctcggaggaggcgccgcccgcggcctcctcttcgtctcccggaggcgtgggcagcttgaacagcgcgaacacggcgagcaccacgaccagcacaacgccgatcacaatgtatatcgtgcgggtatcattcaggaactgcgtcttagcggcgtcgaagccggactcgcctgatgcgacggtggtgccgagaatctggccaagaatcagcgggccaacgatgttgccgacgccgttgaaactctgcgccatgttgatacggaacgattcgcccttttcatcacccagcttggtgatatacggattgcagttggtctccagcgatgccgcgccgagcgcgataacgaacatggcgaacaggaacaggccgtagctggccatgttggtggcagggatcaccatgaacgcgcccagagcgaacaggaacagaccggagatgacgccgcccttataaccgaaacgcttggcgatcaagccggctggaatggccatgacgaagtatgcgccgtaataggccacctgcagtaatgacgcttcggcgctgctgagttctatgtagtttgcgaacggcgagttcaacgcgttcacgaggttcatggtcaaaccccagataaagaacagtgaggtcaccagcacaatggcgatggtcgccttggaaccggttgtgtttttggatgtcatcattgactccttagtgatacgagtttccccgatattgcctagcgaggagtggaccaccctgggccatgttggtaaacggatgacccagggcgcgggtgatacgggcggcatacgcggatacggcgtacggatggagcaatgatcaaagctccggaattgccgcgcgaatattcgggaaagggctgcttgtcagctcagcgcacggtcaaggtggacatagccgccatcgacgtacacccactgaccggtggtgtggctggagcggtcggagagcaggaatgccgcttcattaccgatctcttcggtggtggtcatacgatgttccagcggaatcttgtcggtgatcaccgacaggcgcgcctgctgggccgcttcatcgccaaaggtcttgatccaatcggcatagagcggggtccagcactcggagacgactatggcgttgacacgcacgctatcgtgtaccaatgcggcggcccattcacgggtcaggcccaggatcgcgcccttggcggccgcataggcgctggtcttgccttggccggtaagcgcggtcttggacgagatgttcacgatggatccgcggctttccttgagatacggcacggccgcgtggaccagctcgtaatagtgagtcaggttgccgtgaagcgattcctcgaactcacgccaagtagtggtctcgagatccttgttgtcgttctttccggcgttattcacaatgccatcgatatggccgtacttcttgtatgttgcttcgacgacgccggcgatcttgtcggtgtcgttgaggtcaagcaagtgcacatcataggtggtggtgtactgctcgatatccttcttgaactcgtcgagagcgctgtcgggtcgattaatcaccaccgggatggccccctcctgggccagttgcagcgtgatgcctttgccgatgcctttgaaaccgccggtgatgatgatgactttgccttcgagatgcagatccatgggaactccttcgtccatccttattctgcgtttcatgggtgttccatgtcacgcccggccggggcttcggcaccccagccggagtggttgtgtgttgttgtgttaagttgtgttgttcagttatgaatttccagttgcggtcagccgcgatacaggtacttctcggccgtctccagcgtcatttcggtaccgttgcccggagcggtcggagcgacgtagttgccgtccttgatctcggtcgggtggacgaaatgttcatgctggttatcgacgtattcgatcatgcggccgtccatcgtgccggacacggccacgtaatcgaacatcgcgaagtggcatacggcctcgcacaggcccacgccgccggcgtgcgggcagacgggcttgttgaacttctttgccagcaggtattcgagcacgatctcctgcggaccggccacgcgggtggcgtcgatctgcatgatgccgaaggcgttggcctgcaggtactgcttgtacaggatgcggctctgcatctgctcgccggtggccaccttgatggggttgatggcgcgcgcaatcgtggcgtggccgatcacgtcgtcggggctggtcggctcctccacccaagccagatcgaagtcgtggaacttgttgatccagtcgatggcggtgggaacatcccacacctggttggcgtccacggcaagacgcacgtcggggccgatggcttcgcgggccttggccaggcgacgcagatcgtcgtcgatgttctggccgaccttaagcttaatctgcttgaagcccttgacctgggtctcctccttggcgagggccaccatcttctcatccgagtagccgagccaaccgggagcggttgaatagccggggtaaccgacctccagcagatgcttgatacgctcggccttgcccttctgaccctctttgagaatcgcaacggcttcctcagggcgcagggcgtcggtcatgtagcggaaatcgagcgtggagaccagctcctccggctccatctcgcccagcagcagccacaacggcttgcccgcacgcttggccttgatatcccacaacgcggagagcaccgcgccgatggccatatgctccacgcccttttcagggccaagccaacgcagctgggaatcatgcacgaacaggtcccatgcaatgcgcatgttgtcgagcagttcctcggtgttgcgcccaatcagcacctgcgacatcgattcgatggccttgcaaaccacgtcgttgccacggccgatggtgaacacgaatcccacacccgtgatgccgtcgtcggcgctggtggaaatctccacgtacgcagaggaataatccggatcggggttcattgcatccgagccggaaagcgtcgttgaagtggggaatcggaagtcatacgtcttgactttggtgatggtactcatgtgttcgggctccttcgcctggtgtgaaccaacggctatatcgtacgtccgaataaagaaatttgcaagcctatttgcgaaaatttttattcaaggccggacaaagggcaagaaaacacggaattgttacggcacaatgcgtcataatggtgggaacaacgacgaaatcgtctcagtaattgaacggcgaatatccaagagggaagcaccgatggttaacgatacatccacccacaagctcaaggtcggcgagctcgcaaaaatcgccggcgtatccgcatccactgtttccaaagtcatcaatggcaggtcaggcatttccgacgagacgcggagacaagtcgagcaaatcctcaaagatcacggttactcaaggcctctggtcaacaccaaactctcccccaccatagagctcgtcgtcgaatacattgagcacaacggcacgatggaactcatcaaatacgcctcatactgggcgcagcaggcgggcctcgccatcacggtcacccagaccaaccatggcgatgccacggaagactgtttccgcggcatcatcgatagaaatccccaaggtgtgattatgcagcagatgggcggtctgaccactcaagcgaagtctttgttgaaatcgcgcagtattcccgtggtcatcatcgacccaatcgataccgtcgattcggatgtgatgagcgtgtccatcgataactggaccgcaggataccaggccggcaaacacctgctgtcgctcggccatcgacgcatcgccgttatccgggggccggcgaacctacagaccagcatcgcgcgctatagcggattcaccgccgctctgcaacaggccggggtggatctgccggagtcctatatcgaacagggcgactacttccccgccgaaacaagctatgaagcagcctgccggctgctggaactcaccgaccgacccaccgcgattttttgctgcaacgacttatctgcagtaagcacgtatcgtgccgcacgagagcataagatcgcgttgccaaagcaattgtccgtcatggggttcgacgacattttccccgccggccaactcatgccctccctgaccagcgtgcatcagccgttcagcgaaatagcccaacgcgccgtgcagatgatcatcgacagccgcaagggcaatcagggtgatatgcacgtcatcctccccaccagtgtcgtcacccgggaaagtaccgtaccgcctcagtcatcggcccgataatcggccagattcaagctggcggccacccgattggacgcgaacgcacccaccgaaaccagcgcatagcacagcgcaagcccgccgaagaagctggccagcgtggccggttcggtcatcgaagcggcgaacagaggggccataagcagcatggaacagccgccggccacgatcaccacgatgttgagcggggtgagtacctcgatgaatcgcgcacggttcaaggtcttgacatcagtgccctccaacaccagcatgcgatattcgccggcctgatcgtacacgctgccggcctgcatcacaccggagctgaccgcggcaagcacagcggcgaacactagcgtcaggatgccgccggtgccgatgtcgcgaatgaacacggtggacgggtcgttggcgtcaccgaccacggcggccgagccaaagaatccgcagatcgaggtgatgccggcgatgaacacggccagtgcaatgccggacacattgcgccacgcgcgcttcggattgtcgagaatacggcgcatggcaatcatcgtggccgcgtccttgggatgcttggccttggctttggcgcgggcggtgaccacccaggagcccacgaggttcaccagcgcgaagcacagcagcatgaaaccgatgatcacgccgtacatcactacttcaccggcctgagccagcaccatcggattcttgaacagaagaacggcaatcaccatgatgacggcgaacaccaccacacgccagccggacggcagcgtagtcgcaacgcgtgaagtgacgccgagtggcgtgatggccacgcgccgaagcgtgaccagcgaagagatcagcgccaacacggtcacgccaacaagcgtaatgatcaaggcaatcggccccacccacagttgctcgaacgtaaacgtctgattctggaaatgcagcaacatgattagggggatcaacacgcagtaccccgcgatgccaatcagcgcccccaccaaggcctgcccagccgcatcaagcgccgtaaggcgaataacttgccccgtggtcgcgcctgccaagcgcagggatgcgagccgagcgtcacgacgggacgcagccaatcgcgcggcggaaccggcaagcgccacgaacggcacaatcagcagcaggcaggcaaagaacgccagcacgacgtatgccgtggcgtattgatccaggctgtggggattggcgatacgctgcttccagatttccgctgttccgggtttgcaagcgtcgagattgattgcgcatccaatggtgtggtcggcggaggcgcgccacatgaacccatgcacgccgcccaaaacggtgagaaagatagtggtggctgcggcaaaagcaatgatggccaacaccgaagtatgacccgcactgccacgcgagccggggcgatggaacaatcgccacaatgcgaaagcgctcatcgtacgcctcccagctggccgtcctgcatggtcacggtgcgcgagcagaacgaagcgacgttggggtcgtgggtgacgacgaccacagcggaaccgttgtcccgcgcggcggctatgagaatgcccatgacctcgcggccggtggcttggtcgagcgcgccggtcggctcgtcggcgaagaccacggcaggtttgacggcgagcgcacgggcgatggcgatgcgctgcatctgtccgccgctcatctcccccggccggtgcgtggcgagcgcgcgcaatcccatgcgttccagccacaggatcgccgtgtcggtggcggtgcggtagggcatgccgtcgagcatcatcggcagggcgatgttttcgaccgccggcagttcgggcagcagctggccggattggaagacgaatccgaagacattacgacgcagtttggtacggtcggcgtcgctcatatggctcaggtcagtgccacggaagacgaccgtgccggcagtcggcttgataatgccggccaacgcgtgaagcaaagtggatttgccggagccggacgggcccatcacggctactgtctcaccctcccggagcgtgaagttcacgtggttcagggcgagcgtgtgcatggtcggcatggcgaagccgggctgggctggctgggctggctggccggcctgaatggcacccggtccggccgcagcgggattcgccgacgcataaccggctcccgtgccggctggcatcacgccggtgacgccgtgccctgcctgtgcgcgggccatgctggcggtgtagtccatgaccaggtcgtgcgcctcgatgaccggggcccactgctgggtgtgcgatgccggctgctggaactgttggggttgctgagactgctgaggctgagccgccggtcccgacgccggctgaggctgctgcaattgcgatgctgctgtgttcatactcccgagcgtacggagcgaacgcccagccgaccatcgggctgcggtatgaacctttctggatcaccggcccgctcctcatccgcaaggattagagatacgcagtcgacgcgacaatccatatatcagatgttcattgctcgagaagacgaggaacagtggaagaccggttcggaagctggaaccacaacagaccaagcaaaggagcccacatggccatcgcaatcgacatcccgcacacaccaatcgtgtccgtacaaaagtcgtacaacaggagtatgactacaaagaataacaagaacagtcgttttgaaatgagactcacctaagagcaacgttccagaatcgaccaagcggccgagtccaaaggcatgacttcgttgcaatgggcattatcgaatctgctcgccgccgcagatcgggacatccatgaagctcatatcattcggcccaacagtaaagcgtggaatgatttcaccgcagcattaaacgaacctatgggcctacgtctgaatgaattgttggagcgtgatcccatatggacgtgaccaacttcactgagcctcggcacctgactgcgagcgaggatatttctggtttcgactgcggcctgccattggtcaatgattggctggtttccacacactaagtgcatacagcattgagcattcggaagctcccggttggctgaggcgaaatagtccgaaccccattcccgtaattttgctaggcatgatgggcgtggatatcagatttcaaaccatgcacgtcgacagtcagttactccgagatgcggtatttcattctctgaacgatatgattttcggcatatccctgaatcatctagaatgtttactccgctcaatgtccacaatcaccaatgattaatggctggagaccgctatttgacgccgaccattgtctgaatcgcattcagacacaacactcctcattgcgcgcagaccagcgagttccgccgagtcggcgatgtgtctcttcggcggttgattttaggattttccgcatgcgacagctgaccacaccgctaaaaatgccattttcgcactgacttggggcggaggtcgtggcgaaacgcacgagggaacgtgtgtcatccgatatggtcatgcccgccagacattgaagcgtcctgtctatgcgcggttgatgtcccggtggcggggtcaatcgatcgacatacgaaccgggacaaattcggctgtcccggttcgggatttcggcctcttttggcgaaccgggacaggcccttccatgaacacccgatatatgcaaatccaaaaccccggaattccgccattccccgacggcgaccatcgcacgatagggcgtcaggtgaatgagattctgtcccggttgcctaaaaagaggcaaaatgacgaaccgggacagcgaaatctgtcccggttgtcccaaaagagacgaaatgacgaaccggggcagcagaatccgtcccggtccacacgcggttcacacggcattacccaagtgaactcatcggcaaaacattggcccagccaacaccactaccgatgtccagcacaggccagctcgtccaggcgggcggcgaagcggggccagtcggtcttcatggcggtgaggagcttgcggttgggcacgtcgtcaatcgggacccagcagatttccatgctttcgtcgtcgtttgccttgggctcgacggtgtggccgggcttttcaaaggcaaacacggtggtgtaggcccacgggccatggtcctcgcggtaggagccgaccacctcgatgtcttcgggggtgatgttggcttcctcgtagctttcgcgcaacgcgccttcgatgggcgattcgccgtccgcagtggcaccgccggggataccccacgtgccaccttcggcgctccacgcggcacggtgctgcatgaccacgtgagtcaccttgccgctcgccgggtcgcggcgagccagcagaatgccggacgcaccgttggtgccccaatgcttgcggccgcaggcgcagtccacccagccatcgccgggctgatgcacgttttcgaccggcggcagaatgccagcgtgctggttgcccgaggccttgctttccggctccagttcgccacggccgacattccacaggtcggtccacgtgatgcccagttcgccggccagatgccgggccagcggcaggctgaggccgatgataccgtgcggatcgccctcgatgctgtcgatgaacgcgccgccgaagccttccagcgtgaacgatccggcgacttccagcggctcgccggtgacgatgtaccgttcgatgtcgtcatcggtgaattcgccgaaatggactttggcatggcttgcgccgcgcacggtacgtccggtcgcgaaatcgatcaggcagtggccggtccacagttcgccggtcgcgccgctcatgcgcttcagtcgttcgcgggccacggcttcgctgtgcggcttgccgtagcattcgccgtccaggaggaacatcgaatcacagccgagaatcagcgggccgaccgtcgcctcggtcagtcccggctgtccggcaatagcggtggcgatgggttcggtgatggtcggcatgtcgatgccggagaagtcgcgcgtggtggcgacttccgccttggaatagtcgatgggctggccagcggcggctttgcgcaggtcttcgacgacggcttcgcgttccgaatccttgatttccttggccttgagcgggtaggcgatcacgcgatcgccggttgcggcggcggcagtattggccgcatcgcgatacgcacggtgaacggcctcggccttggctgcggcaagaatcatcacacgctgcttgatgctcaaatcgtcgacggtgacaccttcctcacgggcggccgcttccagcgcagcaggctcatccacgtgcgagacgcgaattgtggggcagatacccgccgaatacagcacgtcacggcgaggcttggacttggaagcaagaattagcggaatggacatgacttaagtccttatgctcccgctggcgggagctgtcgaacgaagtgagactgagggtggtctctgccggtatggcggaccactctcagaccgcctgcggcggccagctcccgccagcgggagccttctcctcgacttagcgacgctcgatttcgacgccggcggtgttgatgggcaggtgaagcacacgccagtggccggaagcaagctgctccgatgcgatctggtcgatggcttcgcgggcgttgccgtagtgcagcacgagcacgcaggggccggcaccggagacggcggcggcatagcccttggagcggaagagcgcaatgagctcggtggacggcggcatcagggtaccgcgatacggctggtgcaacttgtcctgcgtggcggtgaacagtagcgcgttggactgggcctgagcggccgtaagctcgtcagcgaacggcgattcacgggttccgccagcgcaagcgcacgtatcggcatcctgagccggggcagcggcgacgccggacttgccctgctgggcggcctgggccagcaccatgggattcatcgcagcgggcagcagacccacgcgagacacgttgtagacggcgtccttgtatggcagttccctaggcagcgcctgacgggccttctcagtggacagctcatagtcgggcacgaacacggcggcggtgatggacgggtccaccgggtagttgacggcgtggaatccgccgtgcagcggttcaccaccaggaacggcgaccgagccgacgccttccgcggtttcgaagtcccaagagacggtcaggccaccgaacacagccggggccacattgtccgggtggccttcgatctgggcggccatatcgaagatggccggacggttgaggtcaccggtctgggcgaaggccgcggcggcggcgatgccggccgcgatggcctcggcggaagagcccatgccacgagcctgagggatgttgttggtcgcttccagcgtgaagccgagtcggccgaggccgaacgtggcacaggcacggcggaaggtggagaccacgaggtgggtttcgtcgcgtgggagggtgtcggcaccctcgccgtggatgatcacgtgggcaatgccgtcgttcgggtcgtcgttgagcgtgaaagtgagctcgtcatggtagtcgagcgccagacccacggtatcgaagccggagccgaggttggcggacgtggcgggcacgcgcacgtgaacgctattgcagattgggttcatggttgttccttaaaaaggagctccccttgtcaggggagcttgggtattcagctttcaactcacgggcagccgttcgaccgcctcatcagagggagcctagacggtgtcagtccagcacgcgcaggatggacgggtcaccggtgacgaagtcgagcgcctgcacggccttgacggtgttgcgcagggtttcctcgtcggtcaggtgggtcacgatgcgcaactgctgaatctcgccgtcgtagccggggtcggtcatggtgggcttcagatcctggttcacaccgttgatggagacaccgttcttggcgaactcggcggcgatggcggccagcacgcccggcttgtcgtggatcaggaagcgcacggcgaatgcagccttggaggcggtaatcggagccttcggcagattcttgtacagcgggatggacgggccggtgcagccagcagcaatgtggcgggcttcggtcaccacgtcgcccacgacggcggaggcggtcggagcgccgccggcgccacggccgtagaacatgaggtcgtcggcggcctcggccttgacgaacacggcgttgaaggagccgtgcacggaggccagcgggtggttctcgtcgatcagggccgggtagacgcgggcggagacgccggcctcgccgttctcgaccacggcgagcagcttgatgaccttgtgctcggcggtggcggcggcgatgtcgtcggcggtgatcttggtgatgccttcgacggacacgtcgtcgatggtcacggaggtgtggaagccgagggtggccatgatggcggccttgttggcagcatcgtagccttcgatgtcgccggtcgggtcggcttcggcgtagcccttggcctgggcgtccttgagcacgtcgtcgaactggagacccttggtggtcatctcgtcgagaatgtagttggtggtgccgttgacgatgccgagcatgctggtcaccttgtcgccgaccagggactcgcgcagcgggcgcaggaacggaatcgcaccacctacagcggcctcgaagtagatgtcgacgcccctggcctcggcggcggagtagatctccgggccgtacttggccagcagcgccttgttggcggtgaccacggaagcaccggattcgatggcggcaagcacgaacttgcgggccacggtggtgccgccgatgagctcgatgacgatgtccgagttggtggccacgctcaaagtatcggtggtgacgatggactggtcgatccacgggaacttctcggtttccttcgggtcgaggcaggcgacgccggtcagttcgatcgggcggccgatacgagcggacagttcgtccttctgctcgacaatcaggcgggcggtctgggagccgacggtgccggcaccaagcaggcctacgcgaatcggggtttcgctgttgtgagccaattcagggtccttccaaaaagttttctatatcccacgcctattttacggattatttccgacagcagaccgaaagtactcatcaagctgacggcccttttcgtattatgacggttttggccgcacattacagactgtcaggcgctcacctctgcacgctgattactcgctgacgtcgaggttgagtaggtcgtctacggtctggcggcggagcatgacgtgcgcgccggactcgctgacagcaaccaccgccggaatcagcgcctggttgtagttgctggccatggtgcggccgtatgcgccggtaaccggcacggcgagaatgtcaccgcgcttcaaatcggcgggcaactgcacctcgtgaaccacaatgtcgccggattcgcagtgcatgccacacacacgggtaagcatcgtttcagcggaaccagtgcgattcgccagacgcgcggtgtagtcggcaccgtagagtgccgggcgaatgttgtcggacatgccgccatccacggacacgtacacgcgctcggcaatcgggttgccggcactgtctttggcatcggacaagtgcacgtgcttgatggtgcccacgcggtacagggttacgccggcgggtgccacgatgtaacggcccggctcgaagctgatggccggggcgggcatgccgagcgcacggttggtgctgttgaccgcatccgccaagcgagtgagttccacgtcaatgtccattgaatcttcgccatcggtgtaggccacggagtagccgccgccgaggtcgatttcgggcaggatgtaggcgtcggtggcccacagggtcttgcgcagcagcatcatgcgcttggccgcgtgaatgaaggcgtccgcatcgtggatgttggagccgatgtgcgagtgggctccgaccagttcgagtacgtcctggtcggcgaggatggtcttgagcacggcgatggatggaccgtccgcaatggcttccatcgcggcggccagcgccttgtctgtgtcggagacttcctcgtggctcaggtcgtacgggtacttgacgtcgtagtgcagctcgcgctctgatttctcggtcttctccgcgccattttccagggaatgcgtcgcagagatacgcgcgttggtagcggcaggcgtcacgtctttgaggtcgttcagcacgtcgagcacggcggcgtcggccccggcggccagcagcggcacgccgaacttctggtcctcgtgagcagtggagatgtactcgtggccgccggcgtggacaccgacggtgacgcgcagcatcacacgagcgcgtttgccgagcttgcgggcgatggcggcgacgcgctccggctcgtcgggctcgtcgatcacgattttggcgaagccctgttcgatggccagcgcgatttcctcatcggacttgttgttgccgtgcagtaccagacgacgtccgggaacgccagcggcgagggcgattttcatctcgcccatcgtgcaggtgtccacgaacatgccggcctcggtgaccaatcgcacgatttctttggacaggaacgccttaccggcaaagctcacgtgcgtagtggatgtgttgaatgcttcggcggcagcgcgcacgaagtgcctggcacgtgcgactacttcatcagtgtcgatgagatagagcggcgagccgaactcgtcaagcagcgattcggcggtacgaccgtggaatgtaatggcaccgtcggcattcacagccgtagcggtcggccaaattggagaaatgggcataatcacatcttttcgggggcggtgacgccgaggaggtcgaggccgttggcgatgacctgctggacggcgtcattgagcttcaggcgggcggcggcacgggccggctccggattcttggcgatctccaaggccttgcgagcctcatcgtcgccacgggtttccggatcggtcagggccatcggcaccacgcgctccacgttgtaccacttgtgataggtggcggccagttcttcgaggtaacgggccaccttgtgcggctggcggtcgtcggccgcagtggcgagcacgctcgggaactgggcgagggcggcgagtacctcgccgtcggcctcggtgtcgagcagggccaggtcggcaccctcgtagctgatgccggcggcggctgcgttgcggtccacgttcttggagcgggcgtgcgcgtactgcacgtagtacaccgggttgtcgttggtgtgcgaggcgagcagggccaggtcgatgtcgaagttctggttgtagtcggagcgggccagcgagtagcgggcggcgtccacgccgaccacggagaccagatcgtcgatggtcacgacgttgccggcgcgcttggacatgcgcacgggcttgccgtccttcatcacgttgaccagctggccgatgagaatctgcatgttcttgccgggctcgtcgccgaaggccgcgcacatggccatcatgcggccgatgtagccgtggtggtcggcgccaagcatgtagatggccacgtcagccgggttttcggcgcgatggcgcttgtcccagtagtaggcgatgtcggcggcgaagtaggcgaactcaccattggacttgatgatcacacggtccttgtcgtcgccgtgcttggtggattcaaaccaagtggcgccgtccttgtcgaagatgtcgccgcgggacttgagctcttcgatggcggcgtcgaccttgccgtcggcgtacaggctgttctcatggaaccagacgtcgaagttcacgcggaagtccttcatggacttctgaatctcatcgaacatcatcggcacagcgcgcttgcggaattcctcgcgcacttcggtgtcggcctcgccgagcggttcaccgtcgtcgttgaggccttgatcctggtgggccagtgcggtcaggtccacgccgtcggactcggcttcggcctgaacacgggcggcgatctcgttgatgtaggcacccttgtagccgtcgcacggggtttcggtctggtagccggcctcgcccaagttattggcctcagcccaagcggcgaccagcgacttggcgaagcggttgatctgctcgccgtggtcgttgaaataatattcgcgcaccaccttggcaccgttggcctcgagcacgcgggccatggcgtcgccgacggcagcccaacgagtgccgccgatgtgaatcggaccggtggggttggcggagacgaactcgagattcagggtctggccgcccagatgggcgttgcggccgtattcgttgaccttgttgagatgcttgtcggtgtcggtcatggcaccggcggcgagtacggtgtccaccacggcggcggccgaggcggagtcgagcgtgatgttgatgaagccggggcctgccacctcgaccttggcgatgccgtcggcttcagcgagcgcggcggcgaacggctcggccagatcgcgcggcttcatgccggccttcttggccagctgcatggcgatgttggaggcccagtcgccatgcgcgcggtccttcgggcgcatcacggcgagcttgtcgacgggcggaatcatctcgtcggtcaacgtgccggcctggccggcggcgacgaggttgtgggcaatgctggaaatcagttcacttaaggcttcagggctcattcttctaaggataccggcgacggcgacaccatgccgcgtccggtcattgtcggcggccataatggaacgacgcgcgaaagaggtgcatatggccgggctcaacccccaatcattggtcacgttgtggcagatcgaacagtatggttcgttctccgccacggccaaggccacgggttggtcgcagccggccatcagccagcagatcaaaaagctggaggcacagtgcggttcgactctggtgcaacgcacctcgcatggtgtggaactcaccgccaccggttcgatgctcgcccgccacggcgaggccatcgccgatcggctggagcgggcggcccgtgaggtcgaggattatcggcatcatcggtttgctcacctgcatttggtggccccaccgtcaatctgctctactatcgcggcccgtaccgtggtcaagctcagtatgttcacggacatcgagctgagcctgattcagatggagccgccggaggcgatcggtctgatttcccaaggcaaggccgatgccgccgccgtgttccggtacagcagcatcccgaacttcctgcacatcggcgacgatctgaccttccagtcgctgggttacgatccgatgcgattgttggtccgccgctccagcgacatcgccaaacgattcgaggagaccggcgaacccgtgccgctgtccgccgccaaagacgagcattggatcgccggctgccccacctgccgcgcaaatttggtgaaactggccacccgtgccggattcaagccggatatccgccactgcacggatgattactgggccacgcagaacctggtcgaggttggcatgggcgtctcgctggtgccggcgctcgatacacatatcaatctgcaaggcgatctggtggcctgtcccatcgccgacgattttgcggcgcgcgaggtcggcatcgtgactcgtgccggcgaccatcgtcccgcgctcggttcattgctcgaagagctcgagcgcacgtcactcaaatatttgagcgccaagtagtcggacagcgataagcaagcttgcgaacgccatcacgatttcggggagccagaccgttgagcagcccttctgtaccaggaacaatgacatgttatgagcatgaacaacgtttcccagtcaacgactttgagcagcgcaaccgccggtgcctcttgctttgatgccaatcacatcgacgtgacgaccatcgaagatctgaagcaggtcggttcggacaaatggacccgctaccccggctgcatcggcgcattcatcgccgagatggattacggtctggcgccgtgcgtggccgaagccatcgaagaggccaccgaacgtggcgcgctcggctacattcccgacccgtggaagaaggaggtcgcccgctcgtgcgccgcatggcagcgtcgatacggctgggatgtggatccgacgtgcatccgtccggtgccggacgtgctggaggcgttcgaagtgttcctgcgcgagatcgtgcgcgccggcaactccatcgtggtgccgactccggcctatatgccgttcctgagcgtgccgcgcctgtatggagtggaggtccttgagattccgatgctgtgcgagggcgccggcgagagcagcgggcgcaatgatgaatggctgttcgatttcgacgccattgagcaggcgttcgcgaacggctgccatgccttcgtgctgtgcaacccgcacaacccgatcggcaaggtattgacgcgcgaagaaatgctgcgattgtccgacctggccgccaagtacgacgtgcgtatattctccgatgagattcacgcgccgttcgtctaccaaggccacacgcatgtgccattcgcctcaatcaaccggcagacggccatgcaggctttcacctccacttcagcctcgaagtcgttcaatattcccggcaccaagtgcgcgcaggtgattctcaccaatccggacgatctggaactgtggatgaggaacgcggaatggtccgagcaccagacggccaccatcggtgccatagccaccactgcggcctatgacggcggcgcggcatggttcgagggcgtgatggcgtacatcgagcgcaatatcgcgctggtcaacgagcagatgcgcacgagattcgccaaggtgcgctatgtggagccgcagggcacgtatatcgcgtggctggatttctcgtcactgggcatcgatgacccggccgactatttcttcaagaaggccaacgtggcgttgacagacggccgtgaatgcggcgaggtcgggcgcggttgcgtgcgtatgaacttcgccatgccctacccgctactggaggaatgcttcgaccgcatggccgccgc

SEQ ID NO: 1264 - DNA, 31056 bp, Unknown
  R157_18m  MAG No. k141_663
aactggcaatcattgactataaagaagtagtacaaacacgctcttgagttctcaaaccaccaccacaccagcaagacaggaaaccaaccagaagaaggaacccgccgcgctgagcggcaacaggtgaataacttacacgcaaccacgccacaacgcaaatcaaagcgcacaagaacccaaggaatcggcataacagcgcggttccttcggcgtgtcgcacagagcccaatttgctctgatagggctagcgtaacccctcgaatgtttccggaaaacatcgaatccattattcggctggcgtgtcgcacgagttttcggactgtcagctccatgttcatcgttcggcaaccacaccaccggcgcacaatcaatgcatggcaacaacgctccatcatcggatttcgttcatgaatcacgggtatacctgtagttatgaccaagaagattgctgtattaaccggggcgggcatttccacgtccgctggcatccctgatttccgcggtccagacggtgtgtggaccaagcatcctgaccaaatgagcgtttacgacatcgatctgtttctgcgtaacaaagaagaccgtgagtactcctggcgctggcagaaggaatcaccagtatggaacgcacagcccggcaccgcgcataaggcgctggtcaagctggaacaagccggcatgctgacgctgctggccacgcagaacttcgatgcgctgcatgagaaggccggcaacagcgacagcgtcatcgtgaacctgcacggcaccatcggcacctcgcattgcatgaagtgccatcaggaatatgccacggcggacatcatggcccgtttggatgaagaacccgatccacattgccatcgcaaactgaagtatcgcggcgatatgccatgcaatggcattatcaaaactgatgtggtgtatttcggtgaggcactgccggacggagcgatggagaagtcgtacagcttggccaccaaagccgacgaactatgggtaatcggatcgacccttgaggtgtacccggcagcgagcattgtgccggtggccgcgcaggcgggcgtgcccatcaccatcatgaatatgggtcacacgcaatatgaccatcttgcgagccgcttgattcatgaggatatcgccgtcgcgctgccgaagttggtggacgagacgattgcggagaacaagtagtcctcagcataacgaaagcgccggtgggtggttaagcaactgatgattgttggttaaccacccaccggcgctttcgcgccacctcccgctagcgggaggtattggagcacacttctgcgcggcctcccgccagcggtattggaatcagtagatgcgcttgggctggaatccagcttccctgagtgccacgaggatgcggtcgatgtgctcggggccgttggtctcgaccgtgacgccgagagacaccgcgttggtgtagtggccggatgccttgaactggtcgtggtcaagctgaatgacgttggcgcgctgctcggcaagcagggtggccaccttgacgagctggcccggagtatccggcagctcgacctcgaagttcatgatgcgaccgcgggcgatcatacctttctgaatcaccgcacccatggtcacggtgtcgatattgccgccggacataatcggcaccaccacgtgcgggccggtggcggcggcgaacttgcgcgaacgcaggttcaggtgttccagcgcggccagcgaaacggcaccggccgcctcgaccaccagcttgtgcttctcgagcatgagcagaatcatttcgttgatgtcgcgctcggtgacggtgaccagatcgtccaggaactcgttgatcagagcgaagggcaggtcgccagggtgcttgactgcaacaccttcggcggaggtgaccacatggtcagccggagacacacgacccgcggccagcgagtccttccaggccggggagccctccggaatcgcaccgattacgcgcacttcaggcttgaacgtcttgatggcgagcgccacgccggcacccaagccaccaccaccgagcggcacgaccacgtcagtgacgttcggcacgtcttcgaggatctccagaccgatggtgccttggccgcagatgacttcgtaatcgtcgaacggcggcacgtaaatcatgccttccttgtcggcgagctcagcagcgtgggcggcggattcgtcgaacacatcgccgtacagcaccacatcggcgccgtaggccttggtggcatcgaccttcagcggcggggtgatctgcggcatgcagatggtggccttcgcaccacgctcacgggccgcataggccacgccctgggcatggttgcctgcggatgcggtgacgatgccacgggcgatctgctcttcggtgagcgatgcgatcttgttgtacgcgccgcgaatcttgaaggaaccggtgacctgcaggttttccggcttcaggagaatctcatgaccagtcatctcgctcagcaccggcgaagggataatttccgtatgacgggcagtccctttgagacgtttggcggccaacttcagttcggctgcatgatcacgctgcagcgccttcaaaacatccttttgttccatagcttttaattgtatggcgcggggacaccgaaaacagtggcttatctcgctaacgagcgctcatttacggtaattcccgttcgtaatcagctttcgaggggctgatttggcttcgcggggaggtctatctcctcttcgaggggctgcccgatcgtgcaatgcgtgagtatgacacatcatttgcagcggtattatgcggttttcggagcccggctattcaggcaccaaccccttgaaacggagatagacctccccgcgaagccaaatcagccccttgaaatgaagataccgcctagcaacacttataggctgacgacgacgccctcccatggtgcaagctcacggccggcaagagcggccacagcgtgcgcggcgtcatacgtgctgatcaccacgttcgactcggtgattccggcggcggccagttcggcggtttcgcgcggtagatcaacggttcggccggacatgttgaccacgaccagcagcttctcatcgccgagggtgcgggtgaaggcgtagacatgcgcgtcatccgcatcgagcagatgccagtcgccggccgccacgacaggcatgtcgtggcgcagcgcgatgagctgcttgtagaaggcatacaccgaatccggatcgtcgaattcgccggccgcgttgatcgccgcatggttgggattgacggagatccatggctccttagcggcatccggcgcagtgaaaccggcatagacagagccgtcccattgcatcggggtacgcgaattatcacgaccgcgcgcggcgatacccgccaacatcgattcgggcgactgcactttggcttcctcaaccctttgacggtaagcgttcagggactcgaggtcacggtactggtctaggcgcgtgaagtgggcgtcggtcatgcctagctcttcgccctgatatatgtacggggtgccgcgatgcatgtgcagcatcaggccaagtgccttggccgaacgcacacgagattcctccgaggagtcatcaccccaacgagaaacgacgcgaggctggtcgtggttaccagtaaacaggcttgcccagcctgcattcttcacggccgcttgataaccggccataatgctcttgagcttcggcaggtcaagtggcagtggcttccatttgacgccttcgcagtcaaaatcaacgtgctcgaataggaagagcatgtccagctcgccgttggcggggtcggtgatgtattcgttgcgctgtgcggtaacgccgggagcctcgcccacggtgaggaagccctcacggccttcgaacacttcacggcgcatttcggccaggaattcgtcttggcgagggccgtccgcgcagaacggattcgggttggaatagccttcctcacccacgggcagatcgtccagctcggaaccgtactcgccgggcagcttgccagacaggtccgtgcgcttggaaatcagcgtaatcacatccatgcggaagccgtcaacgccgcggtcaagccaccagttcatcatgtcgtataccgcgcggcgcacagccggattttcccagttgaggtccggctgcttcttcgagaactgatgcaggtagtattcgccacgctcagggcaatactcccatgcagaaccgccaaagtaggagccccactggttgggctcggcaccgggctcgccggcagtggtgccgggacgggcgggacgccaccaataccagtcggcgtgctcatcatccttgtttttggacgcttcaaaccaggcgtgttcatcggaagtgtgattgacaacaagatccatcacgatcttgagcccgcgcttgtgggcctcggccagcagctcatccatgtcgtcgagtgtgccgaacagaggatcaatgtcctgatagtcggaaatatcgtagccattgtcgtcttgcggagacttgtataccggggatagccacagcacatccacgccgaggtcggccagatagtcgagccgtgacgtaatgcccttgagatcgccgaggccgtcgccgttggtgtcttggaaggaacgcgggtaaatctggtaaacgaccgcattggaccaccacggatttggggtggcaccgttggtgcggatggaatctggaattactgtgcgttgtgaagtggtcatcgttggctcctccattatttatggtctacattgcctgttgctcatagtctaaaaagcgctgaattacatttccattggggaactgcgttggtgtgccggaaacaaaaaccgcaaagagccggaaggcactgctacggctcaattctcataagctgcacatgctatttagcaacatatgggccctttcgctgtttgtggtgggtgactgtgccgtggggtgatgttggtcgggtaggttggaggcatggatgcctctcacctgttcaccgccgcgcttcggctgcggtcgccttggagggtcgggtctgcggacttccgtgacgccgacggcgacgggcgggagccgcacatcacgatcggcttcgagcccggcagagggttcatgctcctgttcgaggcgtgggtgtggctatatcgcctgtgctcgtggatgatgcactcgaggctcgaacctatgaaggagctcgcccgcttgttccgccgccataatctacctgacctgcggcagctcacatattaacggttcttctgattgcgacgcgcaagagcaacttcgggcgcgcttggattgcctgcttgaacccactggtgcggggatagatgatttagttgacacgcctgcgggaatctggtggggatttcgctggcacaccggatttcaagcaaaccccgcctcgggaaccgctccggacttcggcgttggcccggttcgtatgtcaatcgattgccgtctgaaccgggacagaatccgctgtcccggttcgcgatttttgtccttttttacaaacagggacaagccaatctccgcagttcatatgctccgtaatacaaaatcggcggaatagagccgatcccggaatcaacatgttgtcccggttttcacataaaacgattgacattcataccgggacaatgaaaattgtcccggttcgtgaaaatcgcccgaaaccgcgaaccgggacagcggattctgtcccggttcgcgcgtcaaacggttgatatgcggaccgggacaagccagtggcacggcgacacagcagatgcgctcaattgcaccgtaagccgtacggtttcgtcactttttcattcgcacaacgagcaaaaccacatgacctttgtgcgccaccgccacatcaaccgaccgtcgcctttattgtggcggtttccagtatggcaacaggacagaaaagcctcctccggtgagagccggaggaggcttgggtggaagcggacctttacttcacagagtcctgcaattcaggactggcctacggccagacccaacatgacctcgcgagtacgcgacctatccggccgcccgggccgggaaacagcccacggggctgtttccttaatcggctcgtctcgctcgacgcggtgaagtaaagcagcgcctgcgctgttttacttgaccgctcccctcatcacaccaccgacaacccacttttgagcgaaaatgtagacgatgaggatcggggccatggccatcaggtagctggagaaggccatcgggtagttggtggcgaactgcgagctgaagacgtactgggcgagcgggatggtctggttcgactggtcggtcagaatgatcaacggcaggaggaagtcgttccaggcccacagtgcggtcaggatggcgatggtggcgttaatcgggctcatcagcgggaagatgatggtccagaaaatgcgccacgtggatgcgccatcgattcgggccgcctcttccagcgaaaccggaatcgaacggatgaagccagtggcgatgaacaggttcgtgcccaggccgagcaccgtgtacaggatgatcaggccgacctggttgtccaggtgcagggagcccatctgcttcgcaatcggcagcatgacgaccgggaacggcacgaacatggcggcgatgaagaagtagtacaggaagcggaagaagcgcttatccatgttgcgggccacagcgtaggccacgaaggtgttggtcagcaaggtgagcaccacggcggccaccgtgatgatcgcggagttgagcgcggccttcgggtagttgaccttggcggaggcgtcggcgaagttgtgccactgccacgaggtgggcagggcgaaggtgccggcttcggccggagtcttcagcgcggtgacgatggtgaagtagagcgggatcagaatggtcaggctcagcacggccacggcggcggtcagccaccagttgatcttgtggtccctgcggaacttggcgggcttgccggacttggacggggtaactgttgcagtagtcatttcttatcctcccctaaatcagatctgttcctggctgcgggagatgcgcagctgtacgaaggcgatgatcgccagcacgatgaagaagagcacggcgtttgcggtctggtaggcgtactcgccaccggtcaggccacccttccagatgaggtaggtgacggtttcggtggaggagttcggaccgccctcggtcaaggcgacgacctgatcgaaggtgccgagcgcgttcttcatggacagcacgaggttgatggtgaagaacggtccgatcagcgggaatgtgatcttccagaacttctgccaagcgttgacgccgtcgatggcggcggcctcgtagatttcgtcgtcgatggtctgcaggccggcgaggtagatgagtaccgagtaggcgatgccctgccagacggcgaggaagacgattgggatccagctgagttgctcattggtcaacagcgaggtggacagccacttgatgcccagcgccttgccgagctcgggcagcgggttcatgaagatgtacttgaacacgtagccgatgaccagcacggagagggtgtaggggatgaagaagacggctcggaagccattcttgaaggcgatcttcgagttcagcagcaccgacaggaacagggcgatcacattaatcagcaccgtgatgagaatggcgatgaggaacgtgaacaggtaggcgtggcccacgcggttgtcttggaagagggcgatgtagttcttcaggccgatgaacttgtaatcgccgtagccctgcgagttggtgaaggaatactttacgccgtcaagaaatggcaggtacaggaagaaggcgaaaatgatagccgccggaaccaccatccagtagtaggcggggtccaccttgcgggtggagaaggcggagaccttcttcttggccggtttcttggcagcggtcttggttgcggttgcgtgtgacatgatgttctcctctcctaccgatcactcgaaggtcctggcttggaccttgtcccattcggtctgcatctggttcaggaagcgatcggtgttgccggaggccaccatggtctgcaggtagccgccgatgttgatggacgaaggaatgtagtggtcgcagaagtcggccagtcggttttcctcgaagaacgggcgcacggtttccagcgcatcgttgccgaagtaggtgtccttcagcggcgtgatggcggactgggcgtcggcgtaggcgtcaagctgatccttctgcatgaggaactcgacgagcttcatcgcttccttggggtgcttggtgttcgcaccgatggtgagcatcacgtcgtcgccggcggtgaggatctgctcgctggcgtcatcggtggccggcatctgggcgaaaccaagttcgatatcggggttgatcagcaggatctgcgggatggcgtaggtgccgagcgggatgatcgcggccttgccttgggcgaagttctgcgtgccctgctggtaggtgacgccggtgtccgcagtggagtaggtgaagagctcggattccttctcgactgcggtcttccacagttcctggaacgtggtcttgccttgcttgagctcggtgtacttcgattcgggaaccagcgtgccggccagggaggcgagcggtgcctgggtggtccaggcgtcggccacggaaccctgcagcgggttgatgccggcgtccttgaaggtgttgagcatatcggtgaactcgctccaggtggtcggcggattctccgggtcaaggccaaccttgcggaacagagccttgttgtagatgtagccggaggcgttacccgcgaagggcaggccatacaggcgcttcttggaggaatcggtggtctgcaccagattcttggcgatctgcaccatgccggggttgagggtgtccacaatgggttcatcggtgaagtcgtagaacacaccggaggcggcgaagttgccgaagctgatgtcgccgttgaaggtgatcacgtccggcacacgattcttgacgaaacgggtgcgcagatcggtctgggcgttggcggagttgttgatgttgaccttgatggtcgggttctgcttctcaaagtcggcgaccatggacttgaactggtcggcggcctcggacttgaactggaagaaatccagcgtgacggtgcctgcggtgctggagccgcagcctgtcaggccgaacccgacggcgatcgcgcacatcacggcggcggtgcgcacggccagacgcttcagtctaggcgttgcatgtggggaatcggacagcataattgttgactcctttatctttcttttcctccggcttcggtgccggcggttcttccactttccaaggtaacggttcggccatttcattcccagcgccagcgagcccacttgcgcaagcaacaaaaagcgcggtattttgtgattaacgcaataaatacagcgaaggggcttgcatgtctgatgtcaacgcgattccacagtggttttccggatccgagcatacgcatcgcgtggcggcggcaattgcccaatacgggccgatagcccgcactacgttggcacagatgctgggactgagccaaggggccttgtcccgcatcaccagcgatctgatctacgccggggtgatcgaggagcttccggccggggccggcccgtcaggcaagctgcccgagcgattcacgccaagggaaagttcggatcgtcgcggacgcccgcagacttcgctggtgttgtgttcgaacgcacgcaccttcattggtgtcaaggttcatgggatgtcgattgtggccgctgcggtgaacgcgcatggcgaggtggtgtccggccggcacgaggtgccgatcggggcggatcagtcggctgaatatgtggtgtcggccatcacgcggctggtgcgcgaatgttccgccgatatcgcctcttccggactgccctcccccactgcggtgggcgttgcggtaggtgggcatgtggttgacgattcgattgtgacgttcgcgccgttcctgcattgggacggggccacggacttggggacgatggtcacagaggcgaccggcctgccgtgcggggtgttcaatgatatcgattctctgctggtggatgcctcctggttcgggccgggtgtcggcgtggatatgttcgccgtggtgaccatcggcgtgggtgttggttattcgctggccgtgaacggcaagccagtgcagtacccggataagagctatggtctggtgggccacgtgcttatcgatccggaggggccgcgctgcaccagcggacatatcggctgttcacaatgcttgactgacgattcgatcgccgaacagtactctgcgattgtgggtcgcgcggtcagttttgaggactttgcgcgcgatgccaagggacgcgtgccgcaggccacgcagttggtgaaccggacgtgtttccggttgggttcgctggtggctacggtggcgaacatcgcgatgcccggacatgtgatgattgccggggagtccgcgtttttggccaagctcggcaccgattcgctgcgcgatggcattcgtttctaccgtcacagccagacccagccggtcaagttcacgattatggaccacgactggcagctctgggccaaagccgccgccagtcgcgtaatcgtgaagcatattgggtaggccgttcttggctcccctcagagagggaagccaagaacgttgcttcgccacagttactccgccacgaccagcaattacggacttgcctatcggcaaggctcaatcccaccttcgctcagctgtcgcttcgctcaggccgtggctactgacagcctactaggctgtcagcttaacgccacagccttgagcaatactgcctgctgggggtggagggacgggggacggatgccgtaacgctgcagggcttcgccggtcaggactacgccttcctcgttccaccagccgagagtgctctggccgttggtcagaccggtcaaatccaagctcgggtcgagcgggctgacgcggtaggtgcgctcggggtcaagtccgggcaggtgcacgggcgcggccggataggtctggctggtggtcagctgggtgaagcggtagatggcggcgtcgcggttcggcatcaccatgccatccaagcgcacggccggatcgttggagtcggcgtgcacgcaggtgtcgatggcgaaccagtcgcggtgcttcttgaattcggccacccacacggccagcttggcgagcgcctcgtccggctccttcaacaggttccattcgatgcccatgtggccgaagaacgccatggccatgcgcagttcctggctggtggcacgctgggtggagtgcgcgggactggcacccacgtgctcgcccatcatcgccggcggcaccagcagcgaggtgtagcgctggatgtccgcgcgctcgaccgggtccacgcagtcggagacccagatacggtcagcgtgctctaggatgccgaggtccacgcggccaccgccggaggagcagctttcgatctcaaggcccggatgtgcggtcttgaggcccttgaagatgttgtagacggcgagggtctgcgcgtgcacggccgggcggccggagcggcgggaaccgggctcggtgacgaacttgttgtggtcccacttgatgtagtcgataccaagctcgccgacaagctggtccatgcagccgtagatgtagtcgaacgcatccggattggtcagatcgagcacctgctgagtgcggccctgcagcggcagtcggccggtggtgggcgaaagaatccaatcggggtggttgcgggccacgtcggaatcggggttgaccatttccggctcgaaccacaagccgaattccatacccttggcgtgcacgtagtcggcgagcgccttcagggacttcggaccatcgggccagacgtcctgcgcaatctgccagtcaccgaggccggaggtgtcgtcgcggcgggagccgaaccagccgtcgtccaccacgaatcgttccacgccggagtcggcggccttgtcggcgagcgccttcagcgtatcgaagttgtggtcgaagtacacggcttcccatgtgttgaggatcaccggacggccgtgcgagaacaggcgcgggtgcagggagcgcacgtaggagtggaagcgggcggcgatctcgttgagaccatcgccataggagccgaacagccacggggtgtcgtaggagttctggccttcgccagggccagcgagcgtcacttcgccgccgaacaggagttcgccgccgccgatcacgccggttgtgtagggcagacgttcggcggacagcacggagttgccgctccagcccacgtgcaccgaataggcgtcgccatgctcgaagccgaaaccgggcacgccggcggtcaggagcagggatgcgtcgaagtcagggcggccggcgagctgcggcttttcgaaacggccgacggtcagcggctggcgctgcggactgcgttcacgtagatggtgaccggtggtggtgaggatttcgccggcggattcgggcagcgggaagccgagctcgatcttgccgatctcgagcggggctccggcgtctgcaccgaacaggttggttacggtggccttctgacggaccaggccgccggggagcagttcgaggtgccactcgacttccacgccctgctcctcatcgcgcgcggtgactatgacgccgggcacgcgggccgggccggtggcgtgggcatggccggccacatcggtgtagctttcgccggacacggcatcgagggtggcttccagcacgccgccggtctcgatgttggtcacggtgaacttggggaagagctcgacgccggcgcggcgcagcaccacgcgctgctcgccgatccagctttcggcctgggtgggcaggatagacggccaggcggtgtcgtcgagcgcgccggacacgcgctgcggcttcagggcgtcataggcggccagcagggtgtcgggcttggccagcgggcggccccagtggacgatgtgcggcaggtcgctgccggcaaacaccagaccgatcgccacattggcggcgggctgggtcaggtagacggcggtgagtgcggtgccgtcagcggcggcgccggtgaaagtggaggtgttctcggccatattgtctccttcgacgtgtgtggatttgcattgcactactggtttcgatggtagaagaaatggaatatgttgccttggtgccgcgtgttggttgcgtgaggtaagtaatgcgtccgtgtctatcgccgctgggcgaagaaatcagtcaggatggactgacactcgccttccagcacgccgccgtgcacttcaggactatggccgatatgcggatcgcgcggaatatcccaaatcgaaccgcatgcaccgagcttgggatcccaggcaccgaacgcgatggtgccgatatgggtctggatgcaggcacccgcgcacatcgggcacggctcaagtgtgacggccagcgtgcaatcggcgagattccaagcgtccaaggcttgggccgcctgacgcatggcgatgatttcggcgtgggcaagcgggtcgccatcagcctcacgcgtgttgtatccgcgcccgacaatctggccggccgcatccagcaccaccgcaccaaccggtacgtcaccagcggctgcggcctgaccggccagttccagtgcacagcgcatcgcctcgtcatattccataccaacgagtgtatgcctttttctcatatcgtctcatgatgtgcataatcggccgcaatcttaacgttttcttcatggttcccatatacttttggtggagaaaaaatacgagaaggcggcaacatggcggtatttgagctcatcctatgcatcattgcggcggtggtggtgagctcgtttgccagtcgcttcgtaccgaaggtttccacaccgctggtccagattgtgctgggcgtgctggttacgtatctgccgtttttcccggatgcaaagctcgacccggaactgttcatggtgctgtttatcgcgccgctgctgtatctggaagcgcacgaaatcgataagtcggcgttgctgaaaacgctggatctgagcctatcgctggctatcggactggctatcgtcacgatggcggcggtcggattcactttgcatgccgtctggccgtccatcaccttagcctcagccttagcactcggcgcggcactcggcccgaccgatgcggtggccgtcagctccctaggtaaagaagcctcgctgacgcagcgtcagcgcagcgtgctgaaaggcgaatcactcttcaatgatgcttccggcatcgtcggcttccagttcgctctggccgccgccttcactggcgaattcgccgtggggcaggccgccggcgaattcgtgatctccttctttggcggcaccttatttggcctggtgatagcagcagcggccaactggctattcgagaccgtgcgatccctcggttgggaaaccaccaccacacgtattctgatggaactgttcctgcccttcctgctgtatttgggcgcggaggaattcaatgtgtccggcattctgtcggtggtggccgctggcctgttcatccgattcgaccgtaccggcgtggggccgaatgtggcacgtacgaatatcgtttccacttcagtatggggtgtgctgagtttctcgctcaacggtgcggtgttcattcttctgggcatgcagctgccgcgcgccatgagggccagctggtctgacccgtatatcagcaataccgtgctgatcggcattattctgctggtcactctggtggtaatcgcgcttcgattcttctggattgcggccatgctgcgcgttgcgcgagatacaatcaccggccagcgccgcaaaatgacacccgaacgctggcgctcggccgcagtgatgacctttggcggccccaagggaaccatcacgctgtcattgatgtttaccatcccgtattacattgccggcggtgcgccgttcccgatgcgtgacgagctgattttcattgcgtcaggcgtgattatcgtgaccttgctgctggccaacttcctgttaccgctattggccccgaaccgtggcaaggatcccagcgcggaaatgattccggtgaccatcgatgtgttacgcgccacggtggaggaattgaccggacgcatcacgccagagaatcgccgtgcgattctgatggtaatcgaccaatacaccaagcgcatcggacgattgcagcagcgcatcggcgataccgatcctcagggattcgagcaattgcagatcgaagcgctgcattgggaaaaggaattcgtgcgcgaccgacttgccgacaccaaggcgcatccggcggcggatacggccacgcaagagctgaacgtcgaagcctgcgagcgcatgcttgaccagattatgaatacgctgcgtcacacttccactgatccgacttcggggcatgcggtatcgcagattcgcggtcgcttacgcatgtttcagcggcagatgagcaattacgccaaacgcacggtgtccaagattcgccataccacaccattggtgagcgaggatcagattttcgcgcgcacccgcgaactgcaggtcgaggcgattcatcatgttatcggccggcttattgacgagatgggccaggatacgtacaacaccgagcattgttcggcgctgttgctggattatcgtcgcgctgaggcttcattgcaggcacgtccgaatatgagcggcactacggaaaccatcacgcaggtcgaggacgtaaagcgcgagagctacggtatcgaactcggtgtgattcaggacatgtacgaagccggcgacatcaaccgagcccaagcccgctccctgaggcgcaacatctacgttatgcaggtcgatgccgattccggcatctagtttccttggctcccttctctgaggggagccaagttggggattgctatttccgtatgattctcttcagtatgtgcagtagtgcttgcagtgctcacttcgctcatgggagaacagtctatgaccgcgccggccacaagcgccctcgatgtccgattgctgtgacggccgcgccaattccagtgatggcggctgactacagcacgccagaggtaatgtcgttgtcgagcagccactggcgcaaatcggcgaactcctcaagactcacattgtgatccagaccgtggtagctcttggttttcagccacgtatgctcttccaaccaagcggcggtggcgaacagttcgtatttcgggattacgccatcgttcttgccgtacgtatagaacacggggatatcgtaatcggccaggcgagagtcggcgggggccgtgccgggcacctgaccgggtgtgttgaaaccggacagggagacgacggcccggtaccgctcggggttgatgcgcaacaaatgcacggcgaccagtccaccttgcgaaaacccaagcggcaccacgtcacggtcggcgggaatgttgtcggccacccatcggtcgactgctgtggcggcggcatacgcgtcgtagtcacgatcatcgccgataggcagggcatcgtggaaccacgcgtagttgccggggtcgggattgccttcacgggccggcgcgagtgtcagcggcccgcgcaatgccacgaagtcgttatatggagcgatgaggcgcatgatgtccgccatgtcttcttcgctggatccccatccatgcaggcacaggaacagcggatgcgtggcatgctggtcgaagccgccgcgcgaggtgacgctgtgttccacggtgagtggctcgccaaaacgtccaggcacagtggtggattcgcggccgatcagaggctggctggcattcgcttctttgctcataccaatccaatatagaggtcttgcgcgctgtgcggaaaacgatggaccatgatttcagtcacattgggtaatccgcgccgaatcgccttgggactttccaggggataccggcaatctgtcaggcattaccgctgtttgcggctgcggtgtctgtggctgcggtgattgtctcaagttcgccgccccactgctgctgcagtgcggtcatcttgctgccctcgccgaacaccatccagcgtttgccgttcagcaatcgccaatcacctttcgtttgctcattatcagcgtattggctcagcagttcggaaatcttgctttcgataggtgcccggctgatggctgcggacgattccgattcaaaggacacgaaggccactctcggatcagtgcacatctgtacggtggtgatgcctggcaaaccgcccgtatcaagcccctgccatccttctttgcacgcgccggcagcttgttctatgccttgctccatctgtgcggtatcttcgacgggtgccttgtcgttcgactgctgaatcagtccttccgggaacaatacgcccatggccacgccgataaccaagcaaactatggcgcacaccagtgcgatgatgccgcccgcgcccactcccccgtgagtggcgtaccgaggcatggtgactcgcgcagcgatgaccagaatcagggtgatgctgataagcaccgccgccgtcaacgcaatgtatcgtcctggcactgccgtcataaaggaaatggcgtaaggcgcgatttcatgaaccgccgaggtggccgataccacgacggctagcagtccgctgacaacggcaagtctgcggcacaatatcgacgttgggctgctggcttttgtagcggcgaatcgccggccggcattccgcctggatgggcgtcgattctgtgcacgacgtgagctgcgcgaatcgtcatactgaccatcgccgaagaaatcgtagtcctcatcgttgcgggccatcggtgcccccttcctgccgattacacagccagtgtaccgctatggcttgggaatggcggtcattcgggggaatgattcagggcaaaaaagaaccccggcggttgcccgccggggagagaaaggagagagaagaagaaagggggttcaattgtcgggaactgctgcggctcctgatcagctttccgctgacatcatttatataaccactgctttctgggtctacctctaagtttctctgagaaaaacctgagaatacttgcgattgatggaccgcggaagcgtgaggagcctctcacgtttccgcccaaggcgctagacttgaaggcagtatttatttgcccaaggagtttttcacatgctgctgtccgatcgcgatattctcgccgcacagtccgcaggtcatatctcacttgatccgtggacccccgaaatggtgcagcccgcttccatcgacgtgcgattggatcggtacttccgtttgttcaataaccacgcctacacctatgtcgatccggcggaaaaccagggcgcgctcaccgaacagttcgaggtggatcccgacgaaccgtggattttgcaccccggcgagttcgcactgggttccacgtgggaatacgtcaagttggacccgtccattgccgcccgtctggaaggcaagagctcactgggtcgattgggtattctgacccattcgactgcgggcttcattgaccccggtttcgaggggcatattacgcttgagttgtctaatgtgtcgacgctgccggtcaaactatggcctggcatgaaaatcggccagatgtgcttcttccagctgagctcgcccgctgagcacccttatggctccaagggcaccggctcgcattatcagggccagcggggtccgacgccgagccgttcctacgagaatttctaccgcgcgcacatcgacgactgagcgttgcgacgtaccattcggccggcggatgccggccatttgcttaatcccaaggagatgtcatgaccaacagcgatggtgggttccagttcgacttccagcagcacgaaaagccggtcaggccaacggttcctccgattcccgggcaagagacggcagcatatggcgcgcagccagcgacacaagccacaccggctctgcagttcccgcaatctgtgcaggcagcacagccgacgcagtttgcacagcccacacagcccatcgatccggccatgacgcaaccgttctcaccgcaattcccggctgcggttgccgcacaagcaccacagccggcggcagccacgcagccagtagtatccgaaacaccaatcgccgctgcgcccggccagcagcaatacgtttgggatcagacgacgcaaagcttccgcccggtggaaccgacagcgccggtgacgccagccgcaccagcggcaccggcgacatcgcctgtttcggcagcttcaaacgccgcgacacaagcgttccagcccagtcaggccgagcagcctgcggtagatgccgaggcaacacaagcattccggcctgatcaggtcatggcaacacagcttttcgaagctcaggccatgccgaatgccgaaaccgcggccacacaggcattccagcctaattcagctgcggccacacaggcatacggcgcatcatccaccgtatccggtgagaccgttgccatgccggcaacgcaagtagcgtctgccgatgatgctgcagccacacaggtgttccaaccggccgccctggctgcttcggcacaggctcagcctgctgtgatgcctccctccattccgttgaatcaggtctccgatgaggacgattccgatggcgccgagcctcgtcacggcggtagcggcaaaaagaacacccgcaaaatcgtcggcattgccgtagcagtagtcgccgtgatagcgctggttgtcgccggcctgctctggtggcattccaacagcagcaaggcgagccaagccgtggcattggccgagtgcaaggtagcggccaagcagtacacgaatgctcagaagaagctcaccaccgccatatccaatggccaaaccagcgcgcaaacatccaccagcgatgtggccgatgccaatacgctcaccacgctgaatcaggcgttgcaagacgccgacaatccgaccgacaccgccaagtgcgattccagcctcaacgccactgagctgaagtctcacactaaagagctgcagaatgatgccagcgacatggctgacaagacggatgccatcaacaatgcgatcaaggccgttaatacttcaaaggcgacggccgataccgacacactgaaatcgaacctgagctcggctatttcgcaggcgcagggcacactggatagttccgcgggcagtgtggccgatgagaacacccgcaccgcgctgcaaaacgccatcaccgaggccaatacggtgatgaacgggaccagtccgtccgaatccgacgtcaacaatgcgatttctagactgcagaaggccgagtccgacgtcaccgcctcgatgcaggccaagcagcaggcagatgccgccaaacaagctcaggaagaggctcagcggaaggccgaccaagaggcacagcagaaggccaagcagcaggcacagcagaagtctcaagacgggtccacctctactgacggccccgacggcagtcacaactgaggtctgcagcgttctcccgtttcccatggggcggtaacttccccatggggcggttagcgcattttcctttttcgcggaataacgccgttttcagcgaccgccccatgaggaaatcaccgccccatgaggaaatcaccgccccatgggataattaccgccccatgaggagccgtttggatatagcagtgggccgggccctgaataccagagcccggcccactgctatatgcccacaatcagggctattgcgatggcttaacgcttggctatcgcgcgtagcacaatcttgcgtagctcggaggcaatcagcacgattgcggccaggcagatgcattccacccaagccatcgggctcaatgccacggtgccgaacggaccgttaaggaacggcacgtaaatcaccacgagctgcagcgccacggacaaaccaatcgcaccccatagccacttgttggagaacagacccacgaatgcggactgcagatgcgaacgggaggccagcgcgttgaacagctgggcaaacaccagaatcgtgaagcccatcgtacgggcctcggtcatctgcgcttcatggccgatggcatccaccgagcggtcggtgaacaagccgccggataggtgcatgtccataccaatcagcgtgacgatggccataatgacgccgacgaagatgatgtcgccccacatggaggcgtcaatcacgcggtccgtcatcttacgcggtttacgacccatcacatcgtcggtctgcgggtccacgcccatagccaacgccggcgcggcatcggtcagcaggttgatccacagcaactgtgtggcgagcagcggcacggtgacgcccacggtttccggctggcggatgccgaggaagccagcaaacaccacaccgaggaacacggtgaacacctcacccacattggaactcagcaggtagcgcaggaacttgcggatgttgtcgaagatcacgcgaccctcgcgtacggcggccacaatggtggagaagttgtcgtccgccagaatcatcttggcgctctgcttggtcacttcggtgccggtgatgcccatggccacgccgatgtccgcggacttgactgccggggcgtcgttcacaccgtcgccggtcatggccacgatgttgccttgacgctgcaaggattcgacgatcttgagcttgtgctcgggggccacgcgcgcgtacacggacacttcggacgtggccttgtcgagtgcggcctcatcgggcagctggtcgagctggtcgccggtcagggccttgccgtccttggcgatgatgccaaggtcggaggcgatgcgggcggcggtcagcgggtggtcgccggtgatcatcaccgtgcggatgccggcacgatgggcctcggtcacggagtcgcgcacctcagtacgcggcggatcgataatgccgaccatgccattccagatgagatcggtttcgatggcttcggcctgatcggcgatgtcggacacctggcctgcggcgttgacgcttacaccgggcacatcagccaaagaactggtttccagcggacggcaggcctcgccaagcgtacggtaggcctcggaggagagacgttcgacggtggcgagaatcgactggcgatcgccttcggtgagcttacggacctgaccacccacgcggatgcgcgtgcagtagctcaacagcacgtcgggcgcgcccttggcgaacacggtgagcttgtctgaatcggcgctgtccttggcgatgatggacatgcgcttgcgttcggaggtgaacggaatctcgccaacgcgcgtgtagcgcttgatcttgcgatcggccttgaccttgcgtgcggccacgatcagcgagacttcggtggggtcgcccacaatctcccaacggccgttctcctcgcgtagttcgccgtcgttcgcgagcgtgccggccacaagcgtggcgacgacttcatcggccacaatctgggcctgctcggattcaggactgacgccaccggtcataaccatgcggccttccggcgcgtaaccggtgccggtgatctgcactgcgccggacggggtgaccacgcgctccacggtcatctcgttgcgggtcagcgtaccggtcttatccgagcagatcacggaagcggagcccaaggtctccaccgaatgcagtttcttgacgatggcgttgtgcgcggccatacgctgcacaccaagcgccagcaccacggtcaggatggcggccaagccttccggcacggcggccacagccagcgagacggccaacagcaaggaatcaatcacgtcatggacgtcgtcgaagccttccagcacggcgagcgccaccagcaccacgacagcgatgacgcacaccgcaatgccgaggatcttggagacgtaatccatctccttttgcagcggggttttctcatcttcggtggcggagagcatgtcggcgatcttgccgacctgcgtgttcataccggtgccggtcacgattgcgcggccggtgccttgcgtcacggaagtgccgttgaagatcatgttggcacggtcgcccagcgccttggcttcggtgagtgtgtccggcttcttaccgaccggcacggattcgccggtcagggaagcctcggcgatgcgcaggctggccgcgttgaccagtcggccatcggcggagactgagtcgccttccgcaaggacgatgatgtcgccggggaccacgtcggcggtgttgatgcgcatgactttgccgccgcgcagcaccgaggtctgcggggccgtcatttgggcgagcgcctcgaccgcggcctccgccttggcctcctgcatgtagccgagcacggcattgacgatcagaatcaaaatgatcacgatggcgtcgaacggcagcacttcaccgccttccgcgccgggctgcgcattggccttttcgatgaaccatgcgatcaccgagatgatggtggccgcgatcagcaggtagaccagcgggtcctggaactgggccaggaatttcttccatttcggtacgggcggggcggtggcgagctcattcgggccgaatttggccagtcgacgcttggcttcttcctcgctcaggccctgggatgggtcgacattcagggctttggccacgtcgtcggcactggtcagacttggatcagcttcccccaatagcgcttcctgcgcgcgcacttcttccgattccacgacctcgttcgttgcggtcgcggacactgcggattgatctttgagatcatccataatgttctccttggtattgccgcggagtagtcagccttgcggccgctgccgggttttctctcccggctggacgcacaggactgcgcggttatggacaccggcgcaactgctgccgatgcatacgattgctattattccataactgcgtggcgcacttggcgcacagcgtaatagcgttttgcctagaacaggcgacgcaaccaggcttcagccaaatcaggccaacactgcacgcattcgacgatgtgcgcatagaagccgttgccagcggtttccgcattggccagggacaggccgtggctgccttcggggaacaggtgtgcttcgatgctcacgccggcggcccggcaggcctggatgagcattagcgtattctccacgggctcggcttcgcggtcggaggtcatggcgtagccgccaccaggcaaaatcaggatggccgggcgtatgcggtccggttccatctcctcgctgttgtcggccacatagccaaagaatcgcgcctcgacatataacttaagaatcgtgagaatcaaagcaattcataacctaggaatagtgagttttacggcattatataacttaggaatcgtgatataatagctcataaatccttgaaaatactaggaatatgagcttaacatgtataagagaaaagtatacgaccatctacggcgatggaaagcagcgagcaagggtactactgcgttaatgattgaaggagcccgccgcgtcggcaaaagcaccgtcgccgaggaattcgcgaagaacgaataccgctcatacatccttatcgactggcagaaggctccgcaggcggtacgagactcgttccgcaacaatctggatcatttggacacgctgttcatggacctttccgtctattacggcgtacgcctgcatgagcgtgacaccctctttattttcgacgaagtacagctcttcccctttgcccgcagcgcggttaaacaactcgttgcggatggtcgatatgacttcatggagactggctccctgatctccattaagaagaatgtcgaaaacatcttgattccctccgaggaagaatcggtgagcatgtttcccatggattttgaggaatttctatgggccagaggagaagaactactcgccgatgcgatacggcaatcttttgcggacaggcgagcaatgtctccgctgctggacaacaaggcggaacgcctgttccgtgaatacatgctggtgggaggtatgccgcaggccgtagagcgttatctgggaacatccgatatgggcaatgtcgatcgagtgaaacgccaaattttgcacctgtacgctcaggacatagagaaatacggcggagattcgaaagaacgggtcaaacgtatcttcgatgaaattccagggcaactttccaagcatgaaaagaagttcacactgtcgtctttaggcgaaaacgcacgcgaacgtgaatatggcaatgctttcttctggttggatgaatcgttcctgatcaaccgctgcatgaatgccacggatccgcatgtgggcctgcgcctacaccaagaggactccacgatgaaatgctatatgggagacaccggcttgttagtaacgcaagtgtttgccgaccgcgcatacacgtcgaatgagttgtaccgcgatatcctgttcggcaagctggaagtgaatgaaggcatgctggtggagaatgtcgttgcgcagcagctccgggcctcaggccatcgcctgttcttctattcccgatattcccgtcaggcgaaggaccgcatggaaattgattttctccttatcggggagtattcaaatgccgccatgaaggccagggtctgccccgtggaggtcaaatcgacaaagagatacaaaacctcatcgctcgataagttcaagaataaattcgacagccgggtcggcatgcaatatgtgctgcatcctagaccaatgcgcgttgaaggagaccgcctatatctgccgttgtatatggcgcattgcttgtgatgattctagaacgtatcgcagagaatgattctcaataagaaaagcgtgaggattacgatgcctcaatcgcacatgcagagcgtcatatcagtgagatcccgccgttgcggaccatgtttaattgtgcggaaaagttcggatgcctcacacttttcttgacgggaattatttactgtgaggcattgcgcaggttggcggccatggcgcggtcgcgcaagcctttggtgagcttgagaccgagggttacggcgatcaggactatcgtgcaggcgatccacagcgttcgaccgccgaagttgctgatggtccagccaccaatcagcggcgccagcgcaatcgataccgaccacactacgttgtagacgccctggtacgtgccgcgtgccgacgcgggtgccatggcggcaaccgtagtggtggcgatagggaatgtgcccagctcacccagcgtccacagcactacggcaagcgcgaatccgccccaggaatgggccgcggcctgcaccgcatagccgatgacggttacggcgaggcccatcaccagcacgcgtgaattgcccatgcgcgagaacagtttcatcgcgggaatctgcagcaggcacaacataccgccattgatggtgagcagcaccgaatactcgcccagccctagaccaaggtccgtcatggcaatgggcaggccggaggtgctttggaagtacacaaggaagtagccgaacatcagcagggagaagccgaggaatggcgtatcagtgagcacgcgccgccaattgcgagacatggagcccttggcactggcagccggtgcggcatccgagtgattcggcccctcgacgccggcgaattccgcatgcgtaacactgcgttcgtcttcatggcgcaccgcacttggcaccgatacagtaatccccaaatgccgcacctcgcggaagaacgcaatcagcaatatcgtgacggctatcatcaccgccgcttcaacgtagaacatcagcgaatacgagatcttgaccagctggttggccacaatcggcccaatcgcgtacccaaaattaatcgcccacgattgcagtacgtacgcacgttgctgacgttcggcgggcaccacatccgcgatatacgcggcgatgaccgggctgggcagtgaggcgaacgcaccatagacaaacagggccgcgcctaaagccacggggtcagtgagcacggaaacgaccagcagggcagccgctgcgccgatttcgccgatgataatcatggattggcggccgaatctgtcggacaaggtaccgccgaacaggcagccgatgattgcgccgaagccgtacatggccacgactgtgcccaccacaccctcatcgaggcgcagcgcggaaaccaaatatatcgacaagaatgaggtcacgaagcgacccatccacagaatcagaatcgccaaccataatccccaatacagcagggacagtccgaatatcatgcgctgcttcttcactctcaataccttaccggctaccgacggcggaatagccgcgttttggcgcggggtgctgggacaatagcacctatggctatcaaaaaaggaccgaccaaggggtcgggtggcaagcatcgcaacaaactgaagggttacggccccactcccaaagccgaggaccgcgtctatcacaaggcgtataaggccaagaaagcggccgaacgtcggcagatggccgacccgcgtctggcagcccgccgtcgagtggacaagttcgcttcggcggatacttcggatctggtgtacggccgtaattccgtgctggaagcactgcgcgtaggcgtaccttcttccacgctgtacatcatgtctcgtattgaacatgacgatcgtactcgcgaaatcgtgaaaatcgctggtatgaacggcctgcacatgctggaggccgatcgtctggagatggatcgtatcgcccgctccggcaaccatcagggcgtgattctgaaggtcgatccgttccagtactcctcgctgaacgagctggccgatcgtgctgagaagaaggccaaggcaatggaggccgcgaattcggcggccgcccgtattgctgcgcgaccgctgttcattgcattggacggcgtgaccgatccgcagaacctgggtgccgtgattcgttcggcggccgcattcggcgccaatggtgtgattctgccggaacgccgttccgcttcagtgaacgccgccgcttggaaggtgtctgccggtgcggccgcgcatatgccggtggcgcgcgtggtgaacctgactaaggcacttgagggcttgaaggagcgtggatactacgttgtcggccttgacggtggcggcgataagctcgtcggcgagactggctttgaatccgatccgctcgttgtagtgctcggttcggaaggcagcggtttgggccgactggtgcgcgaaacctgcgacgcgattgccggcatcccgatcagctcgtctgttgagtcgctgaacgcttcagtggcggcgggtatcagcctgtacgcggtgtccaacgcacggcgcaaggctgcggcggagtgattgtcgcttgaggccgtaataggttgtacacacaaagaagcccctctatttgaggggcttctttgtgtgatgggctcacctacagacagtccaccggattgtccgcttaatgactccacactgccgcatccggatcgtcatcggggttgtagccgtcgtcgtccgggtcgctgtaggtggattcgtcgtcaatgacgccggaatcggcctcttcgttaagttcggcgagtgccttggaatcaaggttgtagctcggcagaacgttgtcgatgtagctggtcacggcctcgcccatcggcacgtcgtggccggccttctccgccaggaaccagcgatggtcaagcacctcatggaagaactgagcaggctcgatctgggagcgatattcgcgcggaatcatacgcacggtcggctcgaacacctcgcgcatccaatcggtggccacgatttccagatcctcgccctcacgccacgtggaggcacggtaggcgtcaaggtcgttgagcagacgacgggcctggttctcctgcacgtcaaggccggtgaggcgcagcagcttgcggttggcgtagccggcgtccaccacgcgcgggcggaccagcacacgcttgccgtcctcggcggtcttcatttccagctcgtccacgtcgaagcccagctcgttgagcttgttgacgcgctgctcaatcttccacatttcgtccgggttgaacttgtcggtgtcggtcagagcgctccacagcgagtggtagcggtcgactaggcggttgcccacctcgatctcatccacgtcgccgggcagtagcttgccggacgccaaatccataagttcgccgatgatgttggtgcgggccaagtcgatatcgtattcgcgctggccgtcggtgagctggacttgcaggtcaccggtctcggcgtccaccaggaaggcggagaaagcgtcggcgtcgcgcaggaacaggacgttcgacagggacacatcgccccagtagaagccggccaggtgcaggcgcaccagcagcacggcgagggcgtcgatcagtcgttcggcggtgtccgggcgcaggttgcgggcgaacagcgcacggtacggcagtgagaacttcaagtgccgggtgaccagaatcgcctccagcggctccccttcacgggtgtgacggccggtgaccacggcgatcggggtcacagttggcagttcgagcttctgcagtcgacgcaggatctcgtactctcgctcggccacctggcgcgtgatctccttcatggcgtacacctcgtcgcccacgtgcacgaatcgcacgacgtggcgggagatgcctcgcggcaggttggccagcaggtcctcaggccaggtggccaagggcttgtgccagggcagcgtgaacatctttgggttcgagctggcggcggtgattttcagtgcttgcggttccgctgaatcggcgtgttcgtcttcggctttgacagacgtggccttcagcgcacgcggatccatctggggcaattcgttcaactccatgtgttcgattttacgtggtgcttgggaagtgcagcgagtagcggcgacttcggcgcattattctcgcatacgaatagatcatctgtatgggatttgccagccgaattgacgtcccgtatgcgacgcctcatgcgcaatctgaacaaaatgaacgcaacgagtagcatgagccccgctgccgcagcaatgcttcctacggcggcaccggtacggccgataacgccaggctttaccggctccttgtttggattattttcgggcggagtgacgagagttccggcgctaaatttcggctctaccgtgatgttgagatcggcggccgtgtctccgctgccgggaatcgagatgaggaacggatcgcagtcgtatgctttgttggctttcgccgagttcgtgcgggagaccagatataggccgagcggcagattctggaaagtgagctggccagctgcattggtgatgccggaatgctggtacagcttgtttttcgccgcgtgcgtagcgaacttcttggccgcatcgtgatattcacttgatgtcaggcgttcccaatcggcagtgagactggaaaaatcactgacggttttatatgaggagacgctaccatcattgttcgttgtgacggtggcgacgcgcacgatggcataagtatcgccggcaagtgatttgggcgcggctgtatctcggccccatacggcattgatggtgagagtgccgaaggaatcagcttgcgcatacggcaccatagagccgagggctgcaagaacagtgaggatgatagtaacggcggcggcaatcatggcagcaatgcgcgccgcaccatactcgcttccgctatgcaggtctaacatgtctgcccggtcctttccgccgtgatgaatgtgattggttatttgtactgcctggctgagtaggcaagtcaccgtccggctcgatggctgcggagctagaatcatcagacgcgaccttggcgctcccactctgccggcgtcgccgctcatgacgctgccataaatgccatgcgatgagcaaggcaatcagtgcaagagacggcaacaagtactgcagcggaatgtccacgtggaacgtggatttggcgtcatcctgctgctgcggcgtgtatgggatgcgatggccacgcaccagcagccgatgcgtattgaccgcatacggcgtacaagtgatgagcgtgaccaaatccttgccgggctcaattgccagttgtttggtatcggtcggcagaacggtagtgatcttatcgacctgatacgcata

SEQ ID NO: 1265 - DNA, 8918 bp, Unknown
  R157_18m  MAG No. k141_1101
cgtaatattctggcgtttcgccgcttgcttcatcagtttgatgagccatctcctactcgtcattatattgttaactcctttcttgacaactctgtcaagtgtggtatttacttttaaccgccgaacgtgctgaactcggtggtgcgctcgccgggagcaatggttgtggactgggtcatgcggccttggtaatagcgggtttccttgagttctccgttgatgacttcctgaaaatgcgcttcgtggcgctgcacggcgggggagccgaggtcggtggcgttctgataagcggcctgatggtatttgagccaatgcgacaactccctgccgttggtcgaaccagccacggatgcggcgtcatatggggtcagaccgttgatgggcgttgcgccgggagtgcatgagacgtccgaatgcactgtggatggtgttgccgcgggcgcgggcgatacatgcccttgcacggtgagccaattatcggtgaccgggttggcggcaccatccagcgcggcgaccagttcatcatcgatttccacgctggtgacccacgtgcgttgcggaatcggatgattggccaccggcgatccggctgtcaccacatgctcgatggtatattcctctgcccaatccgaggcaagcgtggcggcaacgatgccaccttgggagtggccgatcagtgccacgggctcgtccttgccgataccagcctgacgcatcgcctcggcaaccgtgcgagcgctgtccgctttcctgcggcgctcctgatcggcgctcatcagttccacgttctgcgcccagccgaatggcgagtcaggttgtccatcggtacccgggatggtgaccagccaggagttggttccatcagcccgttcatagcgttgaatggcgatggtcccatattcgagtccgctgttcagctcgattttgccgagccgttcttcggcgagcctgcgcagattctccattgactcggccaccgatccgcttgcacggacgacgtcggcattcgcctgcacctcgcgcacgttcagatgattgccttggacgacgtctttcgccgggccggagaaattggcgattttccccgcagccttgttgacctcatcggtgtgcgcaatgctcttgccgataggtacgccgccaatgattccgcccgcgccgctgagcactccttcctggaacggataggtgaacgtggacatccatgctgggttcggtttgccgtcaatagcccagccggccagaaagccgcccgccgccacagcggcaacacccaccgcggcatatcccggtttggcctgtgtaccggcctgcaataattcggtaaacatgcgccgagccgtcatctccgcctgagaatacagagagtgtgcgcgaatcagcagatcggccgcgccacgcagatcatcgctcaaccgctgacatgccgttgcatggtcataacaccgattgcccagcgcggcatatggtgcagtgacatggccgggaacaacggcgctcggatcgcccgactgcaaggtgacgcacatcggcgcactatgccgatgtgactgcaactgtaatgcggccgattcccaagccgtggctatggccgcaaatcctgccgcctcgtcatcgagagccttggctatggcggcatattcttcaagagtggctggcgcatatcccactccgccgtaaacggacgattccacctgccagtaatcgtgctcgctcatgatgacccccaagccaatcggtgggtggtctccatgtcttgcgcgagactggccgaatactgtgcggtgcgactgagccgcgatcggaataggtcggcggctttaccggtccacacgatgttgcgagagcggttcacggccaccgccatctggtccgattgcgccagtgtggccgcacgttggacggacacgaggtcgcgactacgctgtaccgccgcatggcaagggcaagtgccgtaatcgaacggcgtcaccgtattgccggcaaagccgccggcgggatcgatgggtgctggggtgctggtgtaggtattcatatatccagctaaaaggacaggactcatgcttgtccagccggaacgaccaatgtggttctagcttgccgattttgggcgaagttattcacaagtgttgtgtatagccgtaacgattatccacaaatagcctgtttgggcacaccttggatcagccatgggctatcgggatcagacaaacgccaaagccgacagccgaaaccgggaaacagccgcgataaggccatgacccgtgaggatgtgagaaaaagagcaaccgtgaacgactgcttaccacggcttggtggccccggtacccttgttctgcgtcgccttctgctcggattgggtggtgttcgactgggtatcggtggattgctgattggccttcatcagctcctcgacctgcttcttctgctcgtcggtcaacgcgccgccctttttggcattggctgaggaactctcggattgctgcgccgattgggcttgcccggaatcggaaccgctgttctgcgcctcggcctgtttcagggtgatcttcgtcagctcggaagaaatcgaagcattggtgtcgatggcgtccttgacttgcggcaacagaagcgtacgcattcgcccggcctcggcgaattgcgcatcggtctgctgctgttgcgccttgagcgtggtgatatccgtggactcatcctgagccgctttgatattggcattcaatgatgcggtggcctgattgaacgtaatcgaagcggacaggtttactgccgccacgccggcaaccagcagcagcaatacggtgccacaagccaggacgatacgtgcccaaagcgggcatttcgcccgcatccgaatattcgccgagccatcgttcttgtggatttcgttactgtttctcacagcagcctccttgaggttgcgatccatgcaccgacttccatggcaagcaatatcgccaacgcaatggccaacggccataccaccggcgtggtgcgtgtgcgttccttgaccgtggtggtcatgcgccactgcttcgacgacctggccgaaaccgaatccgccaaagtctgtgaagcgtccacggccacatatgtgccgctgatctcgtcggcaatgtctttaaggttcttctcatccatcttggagatgccgggttcgccggtatccgggtcgaccacccagtggtccgtggtgttggaatcgccggcactgacgccatcggcgatgacgggaatcttgccgccctcggtcgagccgacgcccacggtaaacccatcattgagatactgtcgcagtgacgagaacgtacgacgcgtcacattcgaggtctgttcgccgtcagtgatgaggtacagcacaatcgcatcatccgggtgcgcttcacgaatcgacttcgcggtcagcagcaattgatcgatcggagcatccagactggatcccgccgacacggatgtggcttccaccgccaacgtgttggcccaattatcgatggccggcgcatccggggtcagcggcacatcaagtgttcccgaagcaccgaaccgtaacgccgcgaaactggcgtccgggtaagcagcggtcacatcatgcacggcctgacgcgcggcatcgatgcgggtaatggtcttctcggacccgtatgtggcatcagccaccgccatcgacccggtggtatccaccgccacgatgacgtcggtggcattgatgacctgtgaggtggtagacgataccacgctgggagtcagtaccatcaccgcgacaatgagcagcataagcgtacgtcgtatgcaagcccacacggtctcgtcactggaagcacggcggcgaacaaacaatacgatttcgagaatggccagtacggcgagcccggccgccagcagtccgccggcgacccagcccaaggcgggggagaaggtgaatccgttcatcgcctcaacctccatgcacatacgatccagataatgagtatcacggccagagcaagcgtccacagactgggagcgtccaccattgaggatttcaccttgttctccacatccgtatctctacgcgactgaatatcccgtaccagctcatctatcgacgcgccattcgattgggtgaggaagatgcctccatgcgactcgatcgcggacttcatatccgttgtggtttggtccgattcactggctttcggcccggaatacaggccgtccacggtgattttggtctgctgggtcaagtccaacgcttcggtcagcgaataggtgggtttgcctgacacgacgttgtcggtggccagcacgatggatgccgcacgctgacggtcggcattcgcatgattggcttcgccataagcgaaaccggggagcatcgccgcgcaagacaccacgccgtcgccaatcaaggaggtggcgtccttgcggttctgcgtgccttcgagccaattggcgatgtcctgatattcggcatcggacatcttatcgatgtcatcctgcgactcgacgcctttcagcgccttgctggcggaggtcaactgtttggtgaccagttcgtagtcgtcggtcagcgggaacaccgtgcgtgaggtcgagttgaagatactcaaaccgatacgttccccctcgaaatgcttgaccagttccaaataggtatcgatgacctcgcgatcataggggagcgtggatcccgacacatccagacacaggacgatatctcggctggaagcgcgttcgtcaccggcatccacttggctggggcgagccaccagcacaatggccagcgccagcgcaagcaccagcacgctgatggcgagacggcccaaagcgcgccattgacggaacagacgggaagcgtgctcggtattgagatcgtcgtccatcgagaatacaggggtgtcgtcggcggcgttacggcgggcgaacacgacaatcagcacgataatcgccagcgctgccaagacgccggccagagcggcccaaggccaatgccatgccagcatcatgaacgccacctttccaccagattcgccacccactcggcggcctgctgcacgctggtcgtctgggcgattcggttgcgggcatcatcggcaaattccggtggatacaacgcgctaatggtctgcttcaatgcgtccaatccttggcgattcgcgggcgtgcgattcaggtacgccaaatcggtcagcgtactggaactaagctccttgcctgatgcggcaccggcgaaatcacgggcgatgacggccaattcgacgaaagcctcatgccggggcagtgctccggattcatgacgggccaccacatcgtcgatgcgggcacgccactcggccttggagccggcattgctatgagtgccacgcgcacggtcgctgttccgaggtttgcgtgcggggcgagccagcatgatgatcaacgcgatcagacctaccgccagcaacaggcatgcgacgatggccatcaccaggggagtggtcaaggccaacgactccacgggcctgagatcgccgggatcagtggcgagcgggatgatggggaacatgctgtgcatcatagatcacccgccaaagtcagtccgaccagttcgggtgcagtgcccagtctattgcgtgtggtgcgggccaatgcccgggacaccagggcgacgaaacgatcgaacatggattcgctggatgcggctcgaatgatatgggaaccggcacgggtgagctcctgttccaaagccgcggccatatacgcgcgatgagtatcgacctcggccgctgccttggcgttgcgcaggaatgccggcacacgccgtgcactcaagccgtcggcgggagcgtggcgggatgagacggccttgaacggattcatcgtcgccacatcgatcagcaccatcggatgggtgcgggtaatacgacggatcgtggtgatatgccgctcctccatcgcatgctcatcggtggccaatacgatcaatgcctcacgatccttgatacggcgcgcatattccagcagcgcgtcgatattacggtgatgatcccaatcacgatcaagcgccttgtccagcgtgcgttcgaactgcgcgaacccaccgttgaacggcacgcgggtgatgctggactcatcgccgaacaccagcgaaatatcgtccgaccggcgcaacgacagtgcggcgaacatacgcagcgcattggcggcaacctgccatgcgcgttctccggaagggcatacgccagtcatctccaggccaacgtccatcagcaaccagacccgtgacgtcgacaggcgctcgcgctcgaccaccatggggcggccttggcgggcgctggtcttccaatcgataagacgggattcgtcgcctggctcataggcatgcacatccatcgcatcgccgctgccgccacgacgcccggatgcgtgttcgccctccagcacgcccaaagccttccttacggtaggcaggctcagctgagtgccaagggcctcgattttcttgcgaacggaatcggaactcacggaacaggaaccgtttcgacgatcttgtcgacgatctgatcgctgaccacgccatcggccagtgcctcgaacgtcagcataatacggtggcgcagcacctcatgagcgaacgccttgaggtcctcgggcaccacatagtcgcgcccggacagcaacgccttcgcctggccgatacgggtcaaggcgatggtggcgcgcggcgaggcacccaaacgcaccaaggacgacagtcccttgatggggcgggagccggcacctcgtgacgtggcggtgatatcgaccgcataacgcatgatcgcgtcggaaacatgcacgcggcgtgccgccttgcgcagaaaatcaacgtcagacacggaaatgcgttcgccggtgatggtgtcgggaccgatcatatcggagccacggtgggtgagcatggccagcatgcgagcctcttcgtcgggcgaaggataggtcatgacggccttcatcatgaaacgatccatctgggcttcgggcaggttgaacgtgccctcctcctcaatcggattctcggtggcgatcaccatgaacggcttgggcaaggcgatacgctgcccgccgatggtcgtggcaccctcggccatggcctcaagcatggcggactgggttttggcattcgaacggttgatctcgtccagcagtacgaaattggcgtgaatcgggccgatctgcgtggtgaacttctgcgacgcaaaatcgaagacctgcgtgcccaccagatccgatggcatgagatcaggagtgcactgcacgcgtttgaacgagccggatacgcaggtggcgagcgtctgggcggccgtggtcttggccaagcccggcacggattcgataagaatatgcccgccggccaccaaggtcacgataagcgattcgcgtagattatcctgacccaccagtgtctgggcgaacctcgcccgaatggcgtcggccaggatacgtgcgcgtttggcgtcatcggcacccagcggagccgatacgccgggcgcgggaacggtgaccggtcgtgcggcggtggtcggcgaaggtatgttcggttgcgtggggaacaaagtcatgccctcactgtaactactcacaatgactgttggtctgtctaaagagtccaatccaccgggtcggcacccatggtgactagggcttgattggctctggagaatggtttggagccgaagaatccgcgggaagcggacagcggactcggatgaggcgatttgataatgaaggcattggtcagcaatggctcgaggctttgcgcattacgcccccagagaatcgccaccagcggcttgggcttgccgtcggcgtccgtgcgcgcgttcaacgcacgaatcgcggcctcggtgacttcctcccagcctttgccctgatgcgaattcggccgcccgacgccgacggtcagacatctgttgagcaacatcacctcacgttccgtccacggtgtcagatcgccgttggtgggcatgggcaccccaaggtcgtcaaccaattccttataaatattgaccaggcttttcggcagcgggtgaacattcggcgccacgcagaagctcaaacccaccgggtgacccggggtcgggtaggggtcctggccgacaatcagcaccttgatggaatcgaacgggatggtgaacgcgcgcagaatattgtggcttgccggcagccacgggcgcccggcggcgttttccgcacgaagaaaatcgcccatatggtggatggcgggctccacgtcggccaaggcatgggcccaccccggctctaccagttcgctcaatggtttgatcatgactcaccactgtagtcaaacgtgcatatccggtgcacgaggcgtggtgtggtggactgatgagttgtttgccgattacactcatgggtagttttgacaggaagaaagggcgattatggcacgcgacatgatgacctacgaatcctatgaaccggattgcttcgacaatcctccgaagggaccggtgggagttcaccgtggcgctcgttcggcagtggcccgcctctgcccgttcatcgtcgttattctggtggccgcactgtgcggtgtcggggtctgggcatggatttccggggaatacaggaatgcagtaggaggatcgtcccagactgcgaccacgtccgggactgcttccaagtccgattcgtccagcaaggctgggaccaaaaacagcaccaaggatgattcctcgtccacttcgaccgatccgtccaaggactcgacttcggattcggcaaaatccgataccaacagtgatacgacatcttcgaatgagaatcaagactccgatcagcagtctcagcagtccggagccaccgcgactgtgaataaggccacgcaggtgcgtgtggtcaacgccacaggaatccaaggatatgcaggtcagcaggccgatgtgctgcagacc

SEQ ID NO: 1266 - DNA, 8000 bp, Unknown
  R157_18m  MAG No. k141_1367
agcgtgttgaacgtgtccgcgtcgccatgagcctcggcgccataggaagcgatgaacgtcttcttcggcgcgccggagctcagcaccacgcggaaaccggaatcctcatcaagacgatcctggccgatatgcgtaatgccgttgtcctggaatgactggcggatgaaatgcgcccacaggccgttgcccagaatgccggcgtgctcggtcggcacgcccatgcggctggccgcctgcagcacgcgatagctgccgccaatggagggcttcggatgatcggccacggcgaatccgccctgtgccggcacctcgtccacattgagcataatgtccacccagacttgacccagtgaaatcacgctgggctcgtgagtgccgatacctcgcctgagattcaacatgacagcctccttcgtcgtaagttgcacgaggaccccttcgtcccttgccgtctcttataccgagattatatgagagtttgttggatgcggaataggcagtccggcgtgttttatcgggtaaacgctacgatttgcagcgtaattcgccgctggcgaaccgctggcgaactgctggcgaactacttgcggaccgctggcgaaccaatgccgaaccgctcgcgaaccgctgatggcccactcgcaagttacgctcgaaccgcgcgtgaaccgccgaagttcgcccatgatacacgcaagagttgcggttgtcggtattgggctatatatttgtgaagttgtgtgttcggcatgtcgggtgaaaccggcggtcgaatgcgtgaaagacttgacacatcaaggttaagggagtccatcatggcagctcgttgcgcagtgtgcggcaagggaccgcagaccggtttcaccgtttcccattcgcaccgtcgtaccaagcgtagcttccgcccgaacctgcagtctgtacgcaccacgattgatggcgagaacactcgtctgcgcgtgtgcgtcaagtgcctcaaggccggcaaggttcagcgcgtggccgcgtgaatcgcgtactaacgtggagcaaaacccgtttgagcttcggctcagcgggttttgttgtttctgcggcctaaagaggccgtgcgaatagaataggccaatatgagcatcactatggacaccactctcgcttcgctggtcaccaacaagcgtcgcgtgtccgcgctcaaatcgctgggaatcgtcactgtcggcgacgccctgacctactatcccttccgcgtcaccgaaccggtgccgcttcgcgccatccgcgaggccgcacccggccagcagatggcatttgccgccgtgatacgagacatgcgcgtggtgccgatgaacgctcgccgcggctaccgactcgaggcgacggttgacgacgccgacttcgcccggtctcgtcgcgtacccggcagcacggcccggcttacgttcttttcgtatcgtaaatcgtatgtggattgggtcagcatgcggctgcgcgccggcacgtctgtggtggtctccggtatgcccagcgaatacatggggcagctgcaattcacgcaccccgaaatcctcactgtcgcgcccgggtcggccggagcaggagcggggcttgagggttacgctcggggtgcggcatccggcaatggtgcgtttgcgggaagtaccgatccgtatgccagtgtgcagtccgcgtatccgccggccgcggctgcctcttccggggccgcgctgaaatacgacgccgataccgtgcaagaggcgcttacccgcgtctgccggccccgcccggtatatcacgccagttcgcgtatctcgtccgaacatattcatgagacgattctgggattgctgtggatgatgggggcccgcacgtcatccacgcctgacgggcaactcgctggcgctgggtcagccggcattgtggctcccacgaccgacaccatcgccgtccaaaacggggaagagaattccggcacgaccgccgaatccggtgctgaggcgctctcccaatccatcccagatgtgctgcccgaatcggtgcgcaaggccaagaacctcatgcatcgggctgaggcgttcctggccattcatgatccggcctccacgacccggttcaaggaggccatcgaaaccctgcgctatgaggaggctttcgtttcgcagacctcgctgcttaaagccaggtcgcacgcccataaatccgcggctcactcttgcccgttggtaaccgacagtctgcgcgatcagttcatcgcatccctgccgttctccctcactgcagggcagcagcaggttattcatgatattgccgccgatttggctcatgactggccaatgcagcgtctgctgcaaggcgaggtgggctccggcaaaaccgtagtggcgctcgctgccatgctccaagccgtagacgccggctatcaggccgtgcttgttgccccgactcaggtgctggccgagcagcatgccgaaaccattggccggatggtggagcaactcaagccagcgattccagtcacgttgttgacgggcggcatgaagcttgctgcgcgacgtaaagcacttgctgcggcgtccagtggcgagccgggcattatcgtggccacgcacgcggcgttttccaagaccttccaagccccgcacttggccttggtggtaatcgacgagcagcaccggttcggtgtggaacagcgcgaaagtctcaacgccaaaaccgatgacggcaccacgccgcatctattggtgatgaccgccacgcccatcccgcgcactgccgccatgacttggtttggcgatctcgatatttcctggctcaccgaattgcctggcggccgcaaaccgattcgcaccgtggtggtcaatgaggccgacgccgccaccatgggccgtatgttcgcgcacattcgcgcgcgagtcgacgcgggggagcgggcctatatcgtgtgcccgcgcattgatgcggatgatgaggggaacgaaggcggttccggcgtttcggcagcagccggttctgcccgcggacgcgccgcagcatctggttccagtgcccgcacagctgcgggcggccgtgcaacgcgtgcggcggccgacgccatcggcatcgacgatccctacgaaaccttcgacgaaaacggcgaaaccgtggctcgcccgccattgcatgcggtggccgaaatcgccgaccggttgcagaaactcccgcaattccaaggcattcggtttgcgactctgaccggccgcgacaaggatgacgtcaaaacccaggtcatggccgattttgccggcggcgagactccgattctggtgtccaccacggtgatcgaagtcggtgtggatgtgaaacaggccagctgcatcgtgatctttgatgccgaccgatacggcctctctcagttgcatcagctgcgcggccgcgtggggcgtggcggcaccaactcgtgggcgttccttatttcccgtgcggaacccggctccccggccgagcaacggctcgaagtgattcaccgctcgctcgacggtgccgaaatcgcccaagccgacttggaattccgcggtgccggcgatgtgctcggcgacgcccaatccggcggcaagtccagcctgaagctcctgcgcgtggtcaaggacgccgacatgatcgccgacgcccgcacccgtgccgagcagcttctggctgccgaccccgaactggcagacgaggtccaactcgccggtgccgtcctcgacttcacccgaggcaacgaaaccttcctgacctccagctgaggctagggctgcgccccccccgtaatcgcacgatattgtattttcatctggtaaacagaagtaaatgcttgtgccagagacggattgcatatgcatgggtgcttcgtggaagctgattctgtgttccgttgctgagttacggacgtgctggcgatacgcagctttcgcgttcgacaagctgcgtgggaaaaatgaagtaattctgttccacctttccttcccgcgcttcgagaatcaggttgatgcattgtctggcgatgaggtcgaatggctgcctgatggtcgtcagggatggacacatgcttgccgcaggatagacatcgtcgaaaccgatgatcgataattgttcgggcagactgatgccgtgctgtcgggcggcgcgatagacgttgatcgcgccgagatcgttgaacgcgaagatggcggtcggtcggtcctgctccctcatttccaggagatcgcatgccgccttgtatgccttgtcagacacgtagtcgccaaccttgatgagatgtggatccgcgctgatgccgtttttctgcagcgccgccatgtatccgctcagtcgcgcctgcgaggactgtgaattagtagggccagtgatgacggcgattcgtcgatgccccaatgatatgaaatattgcgtggcgagcattcccccggtccagttatcaatgcccactcccaatgcgtcagcggagacctgaccgaccggatcgacaatcacatatgggatgttcctcgtctgcagcagcgattcctcggccgatgagatattcgataagagaagtatgacgcctagtgggttgcgttcgatggcgttacggaggcagctgctggcctcgtttcttgttgcgtattctccggaatccggtccggcgcagcttacggtgatgccgaggccaaaatctctggcgtatgaagctgtctccttgaccatttccacggtgccgttgttggtcatttcgctgacgaccagttcgattgaccgtatggtttttgttgtgggaagttttttgcggaatccggcttcttcgaggagcagttccaccctatcgcgggtctcgtcggagactccatcacggccgttgatgaccttggacacggtagcgggggatactcccgccgcttgggcgatgtcggagaccttcggtctgtttgttgttttgattgtggccatgactcttctcttttcgtatgcgacgctgcaaaaaaagcgttatatatagagtagcgaaattttcgctactctaaaacagcttttttatcggcgtattgctgtctatatagcggaaatgggtgttgtagacatggattggctgctgtttcttcgatgagtacgatttgtgcatatcgttgcaataaagcccttttaaggcgaaaaaacaagataaagaaaatttcgccacgcgcaacgaagttttatttgctcttttttgtaaaaccttgtatattgaacgtaccgatgaatgaaacggcaatggcaacgatgttgttggcgggctcattcagacgggttaagaagaaagagaaaaactatgacaaatgcaacggcgaaaccggatacttccgggatgcgcaagccgaagcgcgagtacataggcatgttatattgtcttccatacgtggtggtcttcctattcggcatgatcatcccgatgttctacgcgctttatctcagcttcttcaagcagtcccttctcggtggcaccacattcgcgggcttcgacaacttcatagctgcgtttaaggatgaagcactgtggagcggtttcaggagagtgctgatttacgcggcgattcagattcctctcaatttgatcctttcccttgtggcggcgctcattctggattcccagagaatccgtcatatcgcagtgccgcgaattttgctgttcctgccatacgcggttcctggtgtgattgcagcactgatgtggggatatatctatggcgacaagtatggccttgtcggccagattgcgtctatggtcggggccactgcgccgaacatgctttctgaaaagcttatgctgttcgccatcgcaaacatctgcacttggtgttctcttggctacaacatgctgatttattattctgcactgatcggtattccgaccgagctgtacgaatccgctcgtatcgatggcgcatccgagctgcgtatcgcatggtcggtaaagattccgcagattaagggacccattatgatgaccgtgctcttctcggtgatcggcacgcttcagttgttcaacgaacctagcatcttgatgaattccgcgccgaatgtgatcaccagtaactacacgccgaatctctacgcatacaaccttgcattcaatggtcagaacctcaactacgctgcggctgtctccttggtgattggtgtcatcgttatgggccttgtcgcagtcgtgaaggtcattggcaataagtgggagaacaagtgatgagtgaagcaatcgcaaaaccacgttccaagtcgctgcagcgcagagacgccaagctggcgctcaaggcaagcaagcgttacaagcgtatgcagcagcgtgagccggccccgaaactgaccggtaagcagcgtgtgctcaactggctgttgcacatcattatggctttgatggtcatctactgcctcgtgccgctgttgtgggtcatcttctctgcaacaaagaccaacgagggtatgtttagctcctttggtctatggttcgatgacaagaatgtgttctggcagaatgttcaggaaactcttgcatatcagcatggtacatacgctcggtggttgctcaacacagtgatgtatgcagttgtcgccggatttggtgccactatcatcgccactctcgcgggttacgccattgccacaatgcgattcccgggccgtaatagtctgttggcgataaccttggcattcatgtccattccggccacggtcatctctgtcccgctgttcctcatgtactcgaagatcggtctggttggtaccccatgggcagtgattatcccgcagctggccacgccgttcggactgtacctgatgattatttatgcgcagacatcggtgcctacttctctccttgaagcggctaagctcgatggcgcaaattcttggaccatcttctggaaggttgccttcccgctgctgtctccaggcttcgtcactgtactgctgttcacgctggtcggtgtctggaacaactacttcctgccgctgatcatgctctccgataccaacgattatccgatgacggtcggtctgaacatgtggctgaagatgggtgccgaaggtaccgcggatggtcagattccgaacaactacatcgtcaccggatgcctcattgcggttgccccgttgatcatcgcattcatgttcctgcagaagtactggcagtctggcctttcggctggtgcagtcaagcagtgaatcctcgccgcacggttattggcgatcacccattcgttgctctaacgaccgtgcggcatccatatccgtttaaagaacaacaataagacagtgattcatgacacacaaaggagtaatcatgaagaagatgaccagaatcgtcagtgcgctggcggcgcttactatggtagccagcattgcggcttgtggctcaagtaccggtgccaaggacactaaaactgcagtcactataggggatattaacaacgccctcactgatacttctaaaaatgtcgagctgaatgtatggggtttctccggaaagcagatggcagggccgattgaagctttccagaagaagtacccgcacatcaaaattaaattcaccaacaccggcgcggcaagtgaccatttcaccaagttccagaatgtcgttgctgctaataaagatgttccggatgtcgtgcagatgagtgctgaccgattcgaacagtacgctatttctggtgctctgctgaatttcgccaacgatgatatcgaaaaagcgtggagcaagctttacgcaaagaccgcttggagccaggtgcattatgctggcggcctgtggggtgtgccgactgatgctactcctttggccatgtatgtgcgtaaggacattctcgacgagcataatctcaaggtgccgaccacttggcaagaattctatgaagaaggcgtcaaactccacaaggaagatcccagcaagtacatgggcgtcctcatcaataacgatatctcctgctttacggatttgctgcgttcggctggtgcgcgcccttggaaggtcaattctgccgatgacatcagcctga

SEQ ID NO: 1267 - DNA, 3937 bp, Unknown
  R157_18m  MAG No. k141_1390
attgcgcatcgaccgtagcgtccgccccgaaccgtacactcacaggtggttttgtgattccatagcgtgcagccaaggcagtacgattgccggtttatccgcacgcacaggtacctacgccggttggtaaaccttacattccatacattgcaaccgaacgtttaggagcatgtatgcctgagcagcatattgataacgagaagattcccacacgtcttatcggcgcgattgtggctgtcggctcacttgccttcattggcattctgaccgaaaccgtgatgaccgtgcttttccccgcactgatgcgcgaattccatgtcgacacggccactgtgcaatggattaccacgatttatctgttggcggtggccgctaccatgcccatcagctcgtttttgaagcgccgattcgcactgaaaaccatttttcttgcggctgtgattctggccatcgttggctcgctgatcatgatcgtcgcccaagccttcccgctgctgattgtcgcccgcattattcagggcattggctcaggcgtggccacgccgttgatgatcaacatcattctggagcagtctcctcgttcgaaaatcggccgattgatgggcgtaggatcgctggtcattaccgtggctccggccatcggcccgaccgtcggcggcgcggtgaccacagtgctgccgtggcgcgcgattttcgtcatcgccattccgctggtgctaatcgcagcatgcatcggcatgaagtgcattgagcagaagacaccgaccgaggctgcctatcttgacccgattcaacttgggtccattgttgtcgcgttggtcggtctggtgctggcgctcaaccaaggtggcgtggccatcagtgcggcggtgtccggcaagtcagccacacgctccggcattatcgccattgtcagtctgattgtgggcctcgccttgttgatcgtgttcgccatgagttccaagcgtgccttctccccgctgctgcgccttggcattctcaaggatcccgccgtactgttacacgcctgcgcatatctgctgctgccattggtcgccatcggctacggctatgtcatcaccaatgtggcacagctctcgctcggcaccacggcatttgtggccggctctctggtgctgcccggagcactggtcggcgctgtctgtgccccgcttggcggctggttctacgataagttcggcgcggtcaagccgattctgattccgatcggcatcgctattttgggcccagtgcttatgctggtgttctcgatgcagcttacgcccgtgctgctcgccggattctatttcattttcggtctgttctattccatcggcaatgcgaatgtgatgaccagtggcctgtcggaggtctctcccgagttcaagccggacggcaacgccattttcaacacgtgtcttcagtttggcggcgctgccggtaccgcactgttctccacgattctttccgtggctcaggccggcgcaggagaagaaggcaccgctgagtttgctcacgccactgccgtcggcggcacatggacgtttgccacgatgacggttatctgccttattggctggtgctgtctggccaccgcgttccgcattcgcgcctcacgccggcgcgcctaagaccatcagtccgcggcccgcgacgcctcccgcccggattcgtcaccgtgcagtatcgggcgaatcttggcaagacgctggctgacttcgtgttcatagccgcgatcgttgggatggtagtactcggtgccacgcagctcttcgggcatatattcctgtggcgccacggcaccgggccaatcgtgcgcatacttgtagccctcgtggttgccccactctttcataagcttggtgggggcgttcctcaaatacagcggaacagcgccgatcttgccggtatccacgtccgcgagcgcctggttaatggcgttatagctggcatttgatttgggcgcggtggccacggcaatcgtggcttcggccaaaataatacgtgcctcgggcatgccgaccagcgccacggcctgcgccgcggccacggtgacctgcaaaatctgcggggcggccatgccgacttcctcgctggcggcaatcatgatgcgacgggcgatgaagcgcggatcttcacccgctttcagcatgcgcgccagataatggatggcggcatccggatcggagccccgcatggatttgatgaatgcggaaatcacgtcgtaatggtcatcgccgtctttgtcgtagcgcacggtggcggtgtccattaccgtagccacgatttcggaggtgatgatgggtcggcgtgcgccctttttgcgggcttcgtcgccggtgaccgcgccagccgcggcctccagaatcgtgagactcttgcgtgcgtcgccaccggccatgcgcacgatatcggcgatggcttcgtccgtggctttgacctcgtccctgagaccgcggtcatcagtcagcgcgcgctgcaccagttcggtgagctgatcaggctccaatgactcaagcttgacgaccaccgaacgggagagcaacggtttgatgatggaaaagctcgggttctcggtggtggcgccgataaaggtcacgtcgcggttttcgacggcgggaagcagcgcatcctgctgggatttggagaagcgatgcacctcgtcgatgaacagtacggtttcccggccgcgtgacacgagccgttcgtgagcgcgggtgagtacgtcgcgcacgtctttgacgccggaggtcacggcggagagttcctcaaacacgcggccggattggccggccacgatggtggcgagcgtggtcttgccgacgcctggagggccgaacaggattacggagctcggcgcggtgagactgcctttgctggccggattggcgaggcggcgcagcggcgagccctggcccaacacctgcgtttggccaatcacctcgtccaaagtgcgtggacgcatgcgcaccgccaacggccgtgtcatcgactccggcgcatcagccgccccaaacaaatcgttctcactcataacgtcctatagtaccccagtgttcgaacagacgttcgagctgcaccttggcttccctcagagaggggagccaggaatcagttactcaccttgtagtcgtggaagactacttcgccggtgtcttgggtggcgtcaaggtccacgatgccttcgatggcccagtcgtggtcgccatcggaatcatcgataatctgacgcaccttccacgtatgctcgtcgttctcgtgcttgtcatccaacatgaacagttcgggcgagcgcgcttcggcgccgatgcccacgtactcgtgctcgtcgtagtagtcgtcgagcacatcttcccattcgtgcacgccgtagccccagtccttgtcgagcgcgccgagcttgtccggctggtcaaggtccataagccgcacacggcggaacaaggcattgcgcaccagcacggtaagaccacgacggtcctcgaccaccgcgctttttgcgccgggcgcggccagggatgccgcagcctcggattggtcagccgagtcaccggcgttctcccattcgtccaccagcgaggagtcgatggagcgcacgagcacgcgcagccacgagatgatgtcttcgagttgctcgtcacgcttttcgggcggcacggtgcgcgccagcgtgcggtaggcgtccgagaggtagcgcaacagggtgccttcggagcgggcgatgttgtatcgggtgatgtatccggtgaagtcggaggcggtttccaccatgtcgcgcaccacggatttcggcgacagccagtagtcgttggcccacggcacatcgtggcggtactgatcgaacgcggcttcgagcatgtcttccagtggcttcggatacgtaatctcctgcagcttatccatacgctcgtcatagtcgagtccgtcggccttcata

SEQ ID NO: 1268 - DNA, 19018 bp, Unknown
  R157_18m  MAG No. k141_1434
gaaggggtcgcgcatcccgatgcgcgtgccgatcgccgacaggcccaaatgcgtggactcgcgccgcgagttcggccattatgagtccgacacggtcgtcggcgcctccccgtcgaggcggtgcatcgacacgcaggtcgagcgcaggagccgcaggctgttcgccaggttcgtccccgacaagagcgcgctggccacggcgcgcgccgaatacgacatctacaaggacatccccgcgccggcgcgcatcgaccgcacctgggacaacggcaccgaatcctcctgccacatgctcgtggacgaggcgctgggcatgctcgcctatttcgcggacccgtactcctcctaccagcgagggtcgaacgagaaccgcaacgggcgcatccgccgccaccttcccaagaggaccggtttcgacgacctgacggacgcggacctgcaggccatcgtcgatgagatcaacgacacccccatgaaggtcctgggctgggaaacgcccaacgaggtttggtaccgcgagctcggcaagccaatgtcaaagacaagccacccgaagacgagcgttgcacttacaaattgaattcgggtcgactatcgcaatgtcgatccgcgtctgggaaccatggacgacttcgacgccatggttgcagccgcacacgaagctggcatcaaagtcatcgtcgatatcgtgccgaaccataccgccgataagcacgtcttcttccaggaggcgctggctgcaggacccggttcgcccgaacgcgaccgctacatcttccgagacggccgcggcgagcatggcgagctgccgccgaacgactggatttccctgttcggcggcccggcgtgggaacaggtgcccgacggtcagcggtacctgcatatcttcgccaagcagccgccggacgtcaattggaacaatccggacatccacgaagagttcaagaagaccctgcgcttctggtccgatcacggcaccgacggcttccgcatcgatgtggcgcatggcctggccaaggacctggaatccacgccgcttgatcagatggacccgctggccgtgcagcatggcctctgccacgacttcacgagcccgctctgggaccgccgcgaagtgcacgacatctaccgtgaatggcgcgaggtgttcaacgagtacaacccgccttgattcgccgtcggcgaggcatgggtcgtgccggagcgccagcatctgtatgcgagcaccgacgagctcggtcaggtgttcaacttcgagttcgccgaagcgaactgggatgtggacgcgatgcgtgcggcaatcttcgtcggtctgcgctccgccgagaaggcgcacgattcgacgacgacgtgggtgatgagcaaccatgacgtgccgcgtcacgtttcgcgttacggcctgccgcgagtgccggcctcgtcgcatcaccagctcgccaaggactggctgctgcgcgacggcaccagctacttcgaagatcgcgagctcggcaccaagcgtgcgcgcgcggcgattctgatggagctcagcctgcccggttcggtgtacatctaccaaggcgaggagctcggcttgcctggagtggcggacatcctgtgggatcgtctcgaggatccgacccccgttcttcacccgcgaacggttcatcgaaaagggtcgcgacggttgccgcgtgcctctgccgtgggtcgccgccgacgtgcctgcacccgctgaatggaacgcgggattcggcaccggagcatcgttcggattctccccggcgacgaaggccgacggctcggccagtgcggacccgcatctgccgcagccactgcggtacaaggattatgccgccgatgccgaggctgctgatgacgcgtctatgctgaacctgtatcggaccacgctggagctgcgcgctttgctactcaccgcaaccgccgatacctcggactgcgcggccatcgatgccggacacgacgtgatcgcgtactcccgccccggcacggacggacgccgtttcgccagctacaccaatttcggtgtggcggcggtgacgctgcctgccggtgaggtcgtgctcgcctccggcgatctgaccgctgacggcgctctgccgcaggacaccacggtgtggatcctgctcgactaattcttccttctcctctttcccctccgcggcttcccgggtcttcccgggaagccgctttttgtatgccttgttggacgtgtggatgtacagagaggggtgtagccgcgttgtagaggactgcgcgcgggcgggcatacgcggtggtgacgtgggcgtgaggggttgtataagccccaaatcagcccctcgtaagcgagatatgtggctcgtcagtcgaattgcggtttggcatgattctgcatgcctagagatgctagtggtctgccttataaataactgaaggaccagcttcttctctccccccagtcagcttcgctgatagccccctcgtcagagggggcacataccgccgctgtctgcttcacggcaacgtcccattagaagccgatgccggcttgcatggctccccttgtcaggggggcgtcccgcggaagcgggactgaggggtagtcatttaacgaacttccgacggaggacactagagagttagggtcgcgctccagtgcgcatacgaaggggggcttcccggaacaatccgggaagccccccttcggcttgtaatcgtcagcccttgacggcgccagccatcacacccttgatgatgtacttctggcacacgaggtagaagatgataatcgggatgatggccagcacgaggcagcccatcatggcacccatatccaccgagccataaccacccttgaggtactggatggcgattgacatggtcttgaaccggcgcatgtccaacgtcaggtacggcaggaggaaatcgttccagatccacatggcctgcaggatggcgaccgagatcacggacgggcgcatgatcggcagcgtgatttggaagaaaatgcgcggcacggaggcgccgtcgatcattgcagattcctcaagttcctgcgggatgcccttgatcacgcctgtgaatatgaacacggccagaccggcgccgaagcccagatacacgatccacaggccccacggagtgttcaggccgagcatatcggcgatcttggagagggtgaacatgaccatctggaacggcacgatcatgttgaacaggaacagcaggtacagggacttcgccgtgcggttgttcacacgcacgatccaccatgcgcacatggaagtgcacagcaggatgagcagcactgcgccgaccgtgaccacaacggtccagccgaaggactcgattagattggtgcgcttgatgccgcgtgtgtagttctgcaggccgacgaacgccttgccggtcgggatggagaacgcgttgcggctgatgtatgccttctgcttgaacgagttgatcaccacgaggacgatcggaaacacccaagccagcgagatgatggtgaacagcgtggcccacagtactggatgcttgactttctcgctcatgcggacacctccttgctagtggtgagacggttctggatgatggcgattagcgccacgatgatgaagaacacgacggccttcgcctggccgacgccctcgaagccggcgcggccgtagaacgtgcggtagatgttcagagccagcagctcggagctgttggacggggcgccgttggtaagggcgaggttctgatcgaacatcttgaagccaccggtgacggtcaggaacgagcacacggtgatggacggcatcatcaacgggatcgtgatctggaacagcgtctgggtgttggttgcgccatcaaccgcggcggcttcgagcacatcgcccggaagcgcctgcaggccggcgatgtagatgatcatcatgtagccgatctgctgccagcagtacagcatgaccatgccccagaagccgtacacacccgagtaggtgattgaacgaccccagtgggccagcacgccgttgagcaacagcagccagatgtagcccaggatgatgccgccgatcaggttcggcatgaagaacaccgaacggaagatattggtgcctgcgaaccgcttggtgagcatgtatgcgatcgcgaatgcggccacgttgatcacgatggtcgtcacgatcgtgaacagcaccgtgtacaccagtgcgttccagaactccttgtcctgcacggcattgacgtagttgtcaatgccgatgaactgggcgtccgtcaccgtgctgaacttgcagaagctcaggtacaggcccatgatgaagggcaccacgaaaccaatcatgaatgctgcgaacgtaggcagggcgaacagtgcccaccacctgcgaatcgctttgccagtcatagaaatcatgccagcctactttctcctccttgagcacacccgcactactgcgtgcgagtggtccgaatttgggattgttcagtctcctcagtgctgaatagcaccaaatcgaaccggtttaaggttaccataccacgcgtatgaccgatggtcaaacgttgtcacagaaagcgtgtccatcactccttcctcgctgcctaagcacagggcaaaatgctggaaatactgatttttggcatttccgatgcagaataacacatatgataacgttgtcttatcgactgctcaacacatggtcgacgccgtccgcgtttattgttgtgtcatagacgcatctcactgcaaaggagaccggcatgggaatcaacatcaaagatgtggccaacaaggccggtgtctccgtctccacggtctcccgcgcgttcacccgaccggagctcgtgtcgaaagcgacgcgggccaaggtgctggccatcgccgaggagctgaacttcttgatcctcccgctcggccatggtgctcaagtccggccgcgcgctgcgcgtggctttgctgatgagcgatcacattcgtctatggttcagcgcttcgatcatcgaagggctgaaccaggtgttccacgcgaacggctatgacctgtcgatcttccagatcttcagcattgaggagcgccgcgagttcttcgacatgctgccgatacggcgcaacgccgacgccgtgatcgtgccgtgacgctgcacttcagcgtgcagcagcgatacgaatcgttcgtacaggtctgcgaacaatccggtatcgacctgaccgccatcgtcatcgcggacggcgatgaccgcatcagccgggcgaccaccgaactgctttcgatggatcgcatgccgaccgccatcgcatgccaagaagacggtatcgcgattccgctcatgttccagctggcgcgcactggccttcgcgtaccgttcgacgtgtctatggtcggatacgacgacagcttctatgccaatgagatcggattgacgaccgtgcggcaggatccgatcgcgatggcgacatgcgcggcgcttaaagcccttgatctcatcgagacagggaagacggccaagccgtttgaggtctttcccgcgcagatgctggtgcggtccagcacgaccgaggcgaagggctgaggggctgacgaatcccgtcagccgctgaccagacctcgccgtaaaaacggggttccgatatggtatcgaaaccccgttcgctgacgttgcgtgatcatgggctaacagccgactggggcaacgctttcacgccggagtcggactcaggacgcgtgcgcggccgagtactccttggcccagccgtccacgaacgcggtcttgaccgcatcccagctctgggtgccctgtgcgtactcgaggagcgcgttgccgagatcattcttccactgctcggacggcatcatggtgaagttccagctgacctgcgtcttgccggacttctgatcggcgacggcggccgcaaccagcggattgtcggtcttgatgtcatcgaaggtcttgaacggggtggtgaagcccatctcggtgctcagcgcctccttgccggtgtcagaagtgatgacccacttgaggaactcggcggtggccttctggtcggcctcggaggccttggagttgatgcaccagtagttctcggagccggtggcgagtccttcgtcctgctcgtccgggtcgccgatgtagatcggcatcatgcccacctgctcggcggtcatgccggcgttctgcagattggtccatgcccaggtgccattctggtagaaggcggcctcgccgagtgcgaactcggagttcgcgtcatcgccggtcttggagctcagctgagacggctcggtggtggagtccgtgatgtacaggtcgaagatgttcttgtagttctccaggcaggtgcccttgatggtggccggctgctcgtgatgttgtcttccttgaactcgtagtagagcggcaggttggccaggtgggtcttgaagcgccagtcggagctggagtcgaagccggcggaggtgaacgcgcccttgatgccgagctcatccttgcgggcctgcatgtcgtcggcgacggccttgagcgtcttgaaggagtcgatatcgtcgatagacttggccttcgcgccggacaggccgaagtacttgttgaggatgtccttgttgtagatcaggccgtaggtctccatggcgtacggcacgccgacgaccttgtcgccgtccttgagtgcgacatccgggttctgcagctgcttgtagacctcggtgtcggacatgtccgccgtgtagtccttccagttggcgtagccgaccgggccgttgacctggaacagggtgggggcgttggacttggccatctccgacttgagctgctgctcgtaggtgttggatgccgcggtctccaccgtgacttctacgccggtttcgtcggtgtaggcctgtgccaggtccttccactgatcggcggctttcggcttgaagttcaggtagtagaccttgccgttgtctccgacctcggcgttggagttggtgtcgctgccgcacgtggccatgctgatggacatggctgccacggcgaatatcgctgctgcggatttgattgtacgattcatcttcgacccttaccctaaatgctaccggtcccatcttcgttgagtcggcgccaccggcaccgttgcttccggcgacagaatctattgtgcactgtttcccagaagaatgcaaacgagtgcaatccatctctcggcagaacggctaacctcggatagacaaagtaatcaaaaccgcacatttttaccactgttgtcgccgttttacagactgcaatcgattgcaataaacgtttgcaactgtgtcattcttcgcgcgcgattacgtcactccctgcgtgtcgcgggcattattccgctccgaggcggcccagtggtttgtttcgctaatgattgaggatttcggttttgtgtctctccccccagtcagctacgctgccagcccgtcccgcaagtatggacgcgctccgcgcggcagcctgctagctcgcttgtcggctcgcatgttgtctacagacagctcttcacggcaacgtcccatcagagggggcaacgtaccgccactgtctgcttcacggcaacggtccgtcaaaggaggcaatgccgctcagacgaatacaagacagaccactagttcgcttcgtgaatcctctgcgctgcttcggcgtccttcgcaccaacgcaatgaggcgggcgaagagcatggaatctgctcctcgcccgcctcgtctcattgcgctcgtcaccgcggccagcggtacacacgatccggcagcgtggggaatgcggcatgcggctcacgctgataccagtacgcgatcgatgccacgtcgtcctgccgctcgaagaagccgcgatggcccacgccgatctgctgcacggtcacgcgcagatcggcgcggaaacggatcggatcggggatgtgccagcgatagaagccgcgcatcggcgggcagtcgtcgttgtgataatcgttgtgcaccagttcatcgtgcgcggagtaatacggataccccatgtaaggcgtgcagtagttctgctccacggtcttcccgttcacctgcttggcgaagctccacgagccgccgaagtagtcctcggtaccggtgccgcagatcgtcgggtattcgcggttgccgtcgatatagaacttgaactcgccttcgccccaccagtaccgttcgagcgtggtcagcgccagataggtacccacatactgccccgagccgcgtacgccatcgagcaccacataatcattgcccagctcggtcagccgctggcgacgccactgcgcatggaagtaggcggtatcgggtggcagtggatcgtcgtacaggctgtagtcgatctgatagaagaacgcgccgattgtgttcacatgctgattctcgagcgttacccgcgcgtgcctagcgaacggcatcgggaagaacatgttgaacccgcggttgggcaccacggccaccggttcggagttgacgaggcatgcgcggccgaatccgcagcagaagaaatcgccgagcgggcactccacgctcggctcgctttcgtcatcccagtagaaccgcagcaccagatcacgcagcacgaaacagtcggcgtccgtggtcttttcgtcgacggtgatccagatatgacggatgcagccggggccgtcgatgtcggccaatgtgaccgtttcgccactgggaatgttgcgcaggcaggggctgcccttgcgcgacgggcccagttcgctggcggcgatgccgccgcggccgggctccccggtcggattctccgcgttgatcgcacggctggactcacgtcgtagggtcatcaatgaaccaaggtcggcaatcatcgtcaatctattccttccattacacgaaccattacgcgaacggttccggtgccgcacatgacgcatgacgccggaaccgtcctatgttgcggcagtcgccgcgatgccactgcttcgtctatgacaatgacaatggcggtcgccgcacctgctgcctaagtgctcgaatcatgcgcgcatcacttgtgcaccggcggcagcatgccgaagttggactcgtagtcgttccaggcgctggtccaatcgtcgagatacgccttcttgacgccgttccagtcgccagtgccctgcgcgtactcgagcagtgcgttggccacgccgtcggcccatgcctgaccgggaatgtaggcgccgtggatcggcgtcagaccgtcggattccagcttgagtgcggacttggtgagcgggttgtccggctggaagtcttcgctgtcgaacgtggtgaacggcacggcgaagcccatgtccttggcgaggatcttcttggcgtcgtcgttggtgaccatccacttgatgaagtcgagcgtcgccttcttgtccttctcggatgcgttcttgttcacggaccaggagatgtcgtagatggagttcgccgcatacttgctttcgttcgggaagcccatgtagtacggcagcatggcgaggtcctcgtcggccacgtcgttgtccttgatctgcgagtaggcccacacgccgttcgggtagaacgccacgcgaccggtggagaactcggcggtggaatcctcgtagttgaccgagccgagcatggtgttctcggtcgggttgtccttcatctcgagatcccacagggccttgtagttgtcgaggtaggtgcccttgagctccttctcgaagtccacgccctcatcgatgtactcgtaggcgaccgggacctgggtcatgtgcgacgcgtaacggtagtagttggaggcgtcgaggccgggggtggagaaagcgccgtcgaggccgaggtcgtccttgtgctgctggatgctgtcggcgaccttcttgagcgtggcgaaatccttgatgtcatcgaaggacttgatgaccgagtagctcttcttggcgtactcgttgatgatcttcttgttggcgatgatgccgaaccattcggcggcgtacggcaggccgtacacgtcgtcgccgtccttgtgggccatctgcttgccctgctcgttgagcagcttgtaggcttcggagtcctgcagcggctcgaggtaattcttgtacttggcgtactggtcgaagccgccgatgccgaacatggtcggggcgttgttcttggccagctcggacgacagcgtggattcgtagctgccggaagtggcggactggatgtcgacctgcacgccggtttccttggtgtacatgtcggcgagttcgttccactggtcgacgacttccggcttgttgttcaggaagtagacatggcctgcgtcgctgttcgtgcttgagccgcatgcggccagtcccagcgtcaacgctgcggcgctgatcaggacaattcctttggacagcttattcatggatttcctttcttcatctgcggccacggagccgcctcgcacttgttgttgtacggggtgccggactgcatacgtcgccgttggtgcagccggttttgctgtagcgcatttcgttatgcgttggagtggattattggtctggctcaggtgttgcctcgttgcgtaagcatacagtcgaaccggtttgatttataggatatcgaaccggttcgctatcgtcaatcgggcgtgttccagcgtgtcgctacgtagccgggggtgagtcacggaagggatggtgcggcggcagtggtggcgcgcggaatcagcgtggctctcaccgtggtgaccgtttcgctcaactgctcgcctcgcatgagggcgagcagttgttgcgcggccagtcgcgccatgtgctgcgggtcctgatgcaacgtggtcagtccggcgactacggcggtcggatggtcgtcgaatccgatgatcgacaggtcttcggggatgcgtatgccaagctgccgcagatgccgcatgatggcgaccgccgcttcgtcggtttcgacgcagatcgcggtcggccgatgctcgctgctggcgatccggccggctatggcagccatggcctcatcttcgctcatggcgtccatgtcgctggatgatgcgaacgcgaccggttcggcgtcgggaatgcattcgcgcatcgcgtcgaggaagaaatccttgcgcagatacgagctggcggggaacggtgccggtttcggatgtgcgacgtatccgatgcggcgatggccgagttggcgcaggaatcgtacggcgtcgttcatggcacgcttgttgtcgagcatcacggatgcgggcaggcgggaagcgctccgtgcgtcgagggcgaccgcggggatatgcatgctggaaagcaacgtcgattcgctgtcgtccagcgagaatgacgggaggatgaacccatccatattgcgtccgttgctgggcaggtcggcgaagaatccatgcagttgttccaggtcgcagacccgtacgggcacaagatcgtagccgtggggttccagcgtttcgagtgcgccttcgatgcagctcgcgttgaaccatgacgcaatcgtgcagccgaacagcatgacgacgcgcatggttttgccggatgccagcgatgatgcgctgcgggacagcgtgaaatcgaggcgacgggcggcgtccagcacgagttgccgggtggacggccggacgctattcatgccgcgcaatgcgcgcgataccgtggcgtcggagactcctgtggctatggccacgtcgtggattgtcgccatgatgtctcctttcgctgtgtggtgggcggtgtcagatactgtagccgtgctggcgccgccgcaatcgctgcgacgtacgcccatgcacattaatagcatatatgtatgcgcttacattcttttgtaccacgatgtgcgcgttgttagcggtcacggtttgattgtgtttgcaatggtttaccaatgttctgtattgtgcgcatgtgatgtgacgcgcaatctgcaggcggcggttgacggtgtgcaatgtaagcgctatcattttgttgtgtcaatcaatgcatggttgatgcagccggcatccgatccggcagggcgaccgcaaggtcgtacacggatatgtgcatggaggcacgtatcacatgagcaaggagagccattacagggaggtaatgatgacaggaagaacgtggaacaccatcgccaaggcaatcggcttggtatcagtggctgcgctcagcttcggggcgctggctgcatgcgggaacacgaccgcggtcgacagcagcaaagggcgtgtgtactacctgaacaagaaggcggaagagcaggagaaatgggaggccctggcgcaggcgttccaggacgagaccggcatcgagacccagattcagctttcggccaccgactacgaccagacgctgcgttccgaaatggccaaggacgaggcgccgaccatgttccaggccgacggcccgagcttcatgtacagctggctcgattatgccgccgatatgagcgactccaagatctacggcgagctgactgacagctacaaggaccgcacgctcaagaacgccgacggcaagccggtcggcatcccgtacgcggtggaaagctacggcatcatctacaacaagtcgctgctcaagaagtatttcgatgcatcgtggtcatcggtcaagtccatcgacggtctcaacaacttcaaggcgctcaagaccgtcgccgatgagatccaggaacacaaggacgacatgggcgtcaagggcgcgttcacttcggccggcatggattcctcggcgttccgatacaacttccatctgccttctctcccgctgttctacgagtaccgtgatgacggcgtcgatatgaactccgtgccggaatccgtcaagggcacgtatgtcgactacatgcagaatatctacgatctgtacatcaccgatgcaacggtgccggccagttcgctttcaggcaagaccatggatgatgccacttcggagttcgcgctcggcgaggcggtgttcttccaggacggcgtatggatttactccgcattgcaggatcagggattcccggatgaggacctcggcgtgctgccgatctacatgggcgtcgacggcgaggagaagcagggcctcaaccaggtgatctccaactactggtgcgtcaattccaagtcttcccagaaggatcaggaagcgacccagcagttcctggagtggctcgtcacttctgatgccgcacgtgaatccatctcgcaggacatgggtctggtcacgccgttcaagaccttcgacgaggaggcatacaccgtcaagaacccgctggtcgaagccaaccgcgagtaccaggagaacggctactacgacgtcatcagcgtctccaccgtgtcccaccagtgggaaaaggatctcggctccgcggagctcaactacgcccaggggcagggggactgggatgcggtgaagaaggtcttcaccgatgactgggccaaggaatacaagctcgccttcgccaagtaagcgaagtaatcgacaggcgatccgaggggtcgcagcgtgaggggcgtccgttgccatagtgctggacgtccctcacgcgttgttgtgttgttgcgaactggctcagcgcggcccgctggacagcatgtggccttccgacttcgcacgcaacgtcccagcgaagccgaatgaccatacactggcctgcccgcgtcgcatgtgcggcaattacgttttccaaccatggaagacggtatttcatgcacttttccaaccgtgcacgtgcggagacggctgagacggttggcgcagagacagctgaggggagcctccatacggaagactcccctcatagagacgctactgcaagtcagcggtcatgcagccggtattggccggctgcgaggcgtcatgcaaggtggctacgcatgaaccactggaatttctcgagctgctggacgtgatcctggatgacgttggagctgatcacatccagctcgtccagctcggcgatggccttgcggtcgtcggcgatgaaggcgtcgtagtactcgatcagcgccttgagatacgcctcggtgccggcgcggccttcgacgtcgaacggcttccgcgtgcggttgcgcatgattgcgtcggtacggccgtccggcgtgccgcccagcgtggcgatacgctcggcggtctcatccgcctgagccagcacggattcggcctcaggatcgagcatcttgtgcacggcgatgaagttcggtccggtcacattccagtgtgtatgcttcaggaccagcgcggcctcctgctcctagctcagtcggttctgcagaatcgcgatggccttctcgctggtcgcctcatcgagtcccggcgcaactgattattgggaggtttgagcaccggatgttattccgattcggcactggggttattgtgggatggcaccggcgtgcttggtattgggcactgccggtgccgttcctgtttgcgagactggttggcggctaccggccgggtgcgtgttccctcatgttgtagtcgccggtttctatccaggtggtgttgtgcacgatccggtccatgatggcgtcggcgtgggtgccgcctccgagtcgttggtgccagtccttttgggggtattgggtggcgaacagggtgctgccggtgtcgtgtcggcgttccatgagctcgaacaggaagccgcggaagcgttcctcgggcgggtcgaacagccattcgaccgggcgcgaggaccgtgtacgcgctgtagcgtttgagcagtctggaccgtccttggggcttgtcggcggcctgacgccattcctcctcgaggtcggggacgcggatgtagcgggaacggtaccggttgcggcacgcctgacgcgccagggcgcagacgatccagctcttgccggacccgcagtagccctgggcgacgatgttgcggtgtcgcgtgacccatgagcagtctgagagcgaggcgatcagttcgcggctgatgccgcgttcgtcgagcaggtcgagggtgcgcaggtcggcctgcgggtagcgcagcctcgcccttctggccagtccgccgatgcgtttgtccgtgaacgcggcgtgcgcctcgtcgaccgcgagttttatacgttgttccgcgttcaggggcgcgcatgcgtcgtcgtcctgatgcaggagcgcgtcgagaagctcctggcatcccatgtcgcgcagctggtggcgggtttttgttcgtcgagcctcatcgcttcgtctccctcgcgttgtagtcggcgccgcgcacgtatcccgcgggcggttcgacgtcgagacccttgactttcgggtcctcgccttccatgacctcgtggtcctggccggtgtcgaggatcgtcttcaattgccggtggcggggcgtgttcacgaccctgcgggccacgtcgcacgcgttctccagtcgttgccgcccgtagcggcgcgacagcctcagcaccgccagagcggggtcgatggcctggtccggcctggcatatgattcgaagatgcgggatatgacgatgaccgcgttcgggccgacgcccgacgcccatgccctgacccggggctcgtcccattcccgccagttcgcctttttcggcaggtccacgtcgcgcgtggaggaacggttcgactgaacggcatcgaacagccgatgcacggcgacccgctggccatcgtgccagatctcgagcgtgcgggcggtctcgcgaagctcgacccgggtgccgatcagccggtggggtacggaataccggttccgcctgtaaacgatatggcagtcgttggcgactttcctcgtgccggcccaatcgccggtctcgtacggcatgacgggcagcgggatcatcatgggtcgctcctcggactcgaacaccgccaggcggctgccctcgcgtttctggaaaggcgcggcgttgtacgcgtcgagccagtcgcggatcgcccggttcagttcgtcgagcgaatggaattcccggtcgcgcatcgcgccgacgacggcccgttcggcgtgcaggacgaggttctcgccgctgggcttgtccttcggccgtttcaccctgcccggcagcaccgccgtggaatagtgttcggcgaggttgcggtaatggtcgtccggcacgatctcgccatcgcggggatggctcacgacaccggtcttgaggttgtcgcacacgatcctgaccggcaccgcgccgaaatagtcgaacatgcacacatggcagtccagccacgaggattcgcgcatgtcgccggtcgcgcgcacgaacgagtaacggctgaacggcaggcacccgacgaacaggtacgccttcgacgtctctccggtgaccgtgtcatggatcggcatggtcgccccggcccagtcgacctcgaccgtacgcccggccttgcgctccaccctcgaggtgacgcccagacgcagcacgtaatcggcgtacagcttgcagaaccggtcgtagcccatgaacggaaccccttcacccggcacgagtccgcgtactccgcgtgcagcagcttcaacgtgacgcccacgcgccccaattcgctgtgcacgcgcgcccagtcgggctgctcgtaggcgctctcgatcacacccctgccggggaaacagcagggcgtacacctcgtcatcggttttgtcctccacaccatcgtaggagacgttaagccggtcggcggcgtcgaacacgtcgatcacgctatgcttcgacataccgtagcccacggctatcgcgttgcgcgacaatccttgctcacgaagcctgagcacgagcttcgccttgattctgcgtaccatcgttggcactcctttcgccatgcgtccatcacatggtgaaaggagactaacccaaacggcgccgaaccacaataactttggtgctaaaccacaatgatcccgtgaaacggcaatggtgccgaactggaataaccaacgtgctcagcaagtcaaatattcagcaacaaatgcaagtgtcatgatgttccttcctttcatcttcaaggaacgtccctcccagtctacgcgcccttgtccgacggctgaccgcgctgtggaaggccgccaactggtcatcgggtctttgatcgggaagatggcgcgtttggcgtgtcgccaatgatgtcgcgccttattggcatttgtgctcggttgagagctgttgcgcaaactgcacccaccggtaaaggaaaggggattctgcagttcattcatgttctgtggaatcgttggaaaacgagattcacaggcagaatgacatgtacaggggcaggaagcggcgtatgccatcctgactcatctggcgggggtgcagcacgtattcttcgccggctcgttgtgtgaatttcgcgtggaacttgtctagggacaccgtggaatagcgtttgccggatttgacctctacagggctgactctgggtttcatggctgcgtccgggtaaggtcggatgatcaggaagtcaatctccatgcgctcctcgcggatgctcgaggattttgagtagaaatacaggtcgtgcccggatgcggtgagctgctgagcgacggcgttttccgcgagcatgccctcgttcacgccgtccgctcccagcaacacttgccggtacacttctggcaaggcggagcccgaggcggagaatgccatggtagacaacagtccggtgtcagccatgtagcatttcactgttgcgtcgtcggcgctgagcgccagaccaattgacgggtcctcggcgagggtgcataggttgaccgtcgccgcttcgcgcatccaagagaaggccgtcatgaaatcacgcgatctcgagccgttctcgacttgcgtgtacaccaagcgcttctcgtgcttcgacagctgaccgggaattgcgtcgaacactgctcggattcgtttagccgccgtgccgccgtatttctcgatatcctcgcggtagatcttgaggaccatgcgcttggccctgtcggcggccgccatgtccctattcggggcgtaggccgtgaccgactgtggcatgcctcccaccagcacgtattcgcgccataggcgcgacgccttgcggtgcagcgagtccggcaaggggctccccgatgcaaacgagttcgtgatcatctgagccagcgcctcttcgcccatggcccacagaaactcctcgaaatccagaggacccattttcatggactcttcctcggagggaatcagtatgcccttcacgttttcgttaagggagattagggatcccgtctcgatgaagtcgtaccggccgtcggcgaccaagtgcttgatgaactcgcgggctggcgggaacagctgcacttcgtcgaagatgactagggacttacgttcggtcagggtcacgcccaacatggcgcttaggtacaggaagaaggagtcaaggtccccccttgtgtcgagcagcgttcgacgaaactcgtctcccaccttggtgaagtccacgagagcgtacgaattgtattcgttgcgcgcgaactcctcggcaatggtggatttgcccacgcggcgggccccctcgatcaacatggcggtgtgacctccgcttgaccgcttccattcgactagcttgtcgtaagccttgcgccgaaacatggctcctcccttatgattgcacgtttctaagggttaagtatagtacaagattgcacgtttctaaggtttcgcacggtgggtgaattgcacgtttctaagggttaacgaaatttctgttgggaacacttcgctggccggccccttttgttggagagccgtaatcaacgaattaatgacgcgggatactgggaagaagcctaggcggcatcggaacccgtcacagtatccggctgcgaggatgcatcggtggcaccggctttgcggacttcgatggtttcgatgcggcggccatccaccttggtgatgaccatgttgtagccgtcgtcggaatgcagcacgtcgcccaccgcacccatcttgccggtcttggacaggaagtagccggcgaccgtctcgtacgggccgtcctccaattcgatgccggtcagatcggcgaagtcctcaatggtcatgctggcctcgatcgtggccacaccattgacgaacgcggtgcgggtggtgcgttcgccgcccttctcgctgggcagatcgtactcatcgcga
